United States Patent Application Publication US 2011/0014706 A2 - sequence listing, part 56

SEQ ID NO: 174589 - DNA, 1120 bp, Arabidopsis thaliana landsberg; identical to SEQ ID NO: 42049
  unsure (1)..(1120): unsure at all n locations

SEQ ID NO: 174590 - DNA, 312 bp, Arabidopsis thaliana landsberg
  unsure (1)..(312): unsure at all n locations
gaaacatgaatggtcgaaacatgtctacactttagnggatttggctgtgtttaatcccaagaatcatttaatccttggagtgattgctaccggtgaaattgttttctcaatgagatatacatccaaacctttttatgttttatacttcaatcccaaaagaaacactctccaaagcgttgaaatccaaggtttggagaatcatcttagagtttacgccttggtggaccttgcagaggatctttatgttaatgatgtgatgcaactcatctcaagccatgcaacccaaggccaacatatcattacgcaaaggcc

SEQ ID NO: 174591 - DNA, 1171 bp, Arabidopsis thaliana landsberg
atttgctgacttatgttatttcatgagaaagatgttcgattaattgggcatcagagacctctcatctctagcaaagactcttattgttgggctgggactaataatggtttatacacggtgaagtctggatatgaaagaagtagcagagagactttcaagaatctcttcaaggaggctgatgtttatccttctgttaatcctttgtttgacaaggtttggtctcttgaaacggttccaaaaattaaagtcttcatgtggaaagctttaaaaggtgctcttgcagtagaagacagattaagatcaagaggcattcaaactgcagatggatgcttattttgtaaagaggaaattgaaacaattaatcatctattgtttcaatgtccttttgctagacaagtatgggcactttcacttattcaggcacctgcaacggggtttgggacatctattttctccaatataaatcatgtgattcaaaattctcagaattttggaatccctcgtcatatgagaactgtgagttcatggttattgtgggagatatggaaaaacaggaataagactttgtttcatggtactggtttaacgagtagtgagattgtagctaaagcttatgaagagtgcaatctttggatcaatgctcaagaaaaatcaagtggtggtgttagtccttcagaacacaaatggaatcctccacctgcaggtgaactaaaatgtaacattggtgttgcttggtcaagacagaaacagttagctggagtttcttgggtgcttagagattcaatggggcaggtcttactacatagtagaagatcatattcttatgtacactctctatttgctgcaaaaattaaaagttgggaatgggcattagagagtatggatcatctacattatgataaaataacctttgccgcctcctctcctaatattattaaggctttgaataaaccaaatgacgggcattgatcatatttctgaattactcaagttcactaaggataaaccacactggtttatgatgatgaaaacagattattgtaatacaggtgcttttgaaatagctaagagtgtcatcacaggaatgcggtggcaatcttatgtagctcacagtttcccctattggttgagaagtctttttgataaggaattgacttatcaatagagtatt

SEQ ID NO: 174592 - DNA, 390 bp, Arabidopsis thaliana landsberg
tcatttcaatctactcactcagtttacactcacatagtttcatttccaaattcatttttaaaaatgatgctcgccaatcctcttccattcactcccttgaaatcactaaaaccttacaagaacgcttggcgtattcaggttaaattgcttcatgtttggaggcaatattctgtaaaggctggtgaatccatcgaaatgattttggttgatgaagttgtacgtattatagtttcaactttatattttcgtaaaccttatagtgtgttcaagcatcattttcctttactaattattatttaaaattagttttgtcatatagggtgataagatgtatgctgctgtgagaagagagcagatcaagaagtttaaaggtgcttaaccgagggtgtt

SEQ ID NO: 174593 - DNA, 623 bp, Arabidopsis thaliana landsberg; identical to SEQ ID NO: 71872

SEQ ID NO: 174594 - DNA, 552 bp, Arabidopsis thaliana landsberg
tatttataatttttaatattcaatgaatcattcttatgccaacgtaacgcttggccattacttgttttatctatacacgctagtaaaatgtagattttttttttttaattatagatattctgtgttagttaaaagccaaaagtattggctttgtcatttaattttcttaatttttaaaaagttgtaatttattcattaattttatatgtggtcttttaaatcgtgaattaacattgagtaatttttaaaatataaaaattcgttgaccagatcaaaatagacatgatgttatcagttgttaatgcaatctctaacactcatttacgattctgctagtcaactttcaaattgtgaccattttgaacatcaaggttattcaaaacataaaaacgttgactaccatttgaaacacgagaatccgttgactaagctaaaatagacatatcgttgttagtcattaagagaacatataacattggttatcatctgttagtatgtccaatacgagtttgttttgaggattatcgagaggaaatcaatattttttccaaa

SEQ ID NO: 174595 - DNA, 597 bp, Arabidopsis thaliana landsberg
  unsure (1)..(597): unsure at all n locations
catgagggagaagaaatatgttaaaagatatagataatatgggagttcgagactagaactttctatgataaatgcacaataagatattaagatcaatagccanagagactacatctggtattagtggctccattaccgctcatggaagggactcgcttgatgagaagtcatgaattttctttcttaaattgtaagattgatggaaccacgnnnnnnnnnnnnnnnnnnnnnnnnnnnnnnnnnnnnnnnnnnnnnnnnnnnnnnnnntacatgtttcgagtcatctctcccgacggatggaatgactggggaaatctaaccgagacaagtaaatatagtaactttcatttcaagtcatatactacataatctgaattatgctaaaatgagttttgttttcatttagactattgatgtatatagtgtaatactacaacgtccttaacgtctagatttttgaaagaaaataataacatatatttatatataatgtacgaaatttttacaattcatctttaatcatcttctcaactaataactttctcctacatatcaagtatgcgaaaataacaacaaatgtgtgttggctgttgacgc

SEQ ID NO: 174596 - DNA, 546 bp, Arabidopsis thaliana landsberg
agattaagctagctgggtatgagtgaaatagtaagaaaataaaataagaaaacagcaaattgattgggttgtaaacgattaggaaaaaaggtaggaacagggtattctcaagaagctattggttagtagatctaatgaacactaggttattatcgaacaattcttaaactcaaacactaattatggaataaccagtgggcgtgccgcgaaactccctatatctatagctaatagtgaccgtagaagccgagagactatcaacataaatttgcattcttaacgagttcaattgttcatcttagtagataggccgattcttattacacacctataaaccagactcatcaaataatagatccaactacagatacctatggcgggcatatctattgtttggattcaagatctagttaattaatctagatctagcattaagcacaattaaagatgaagaattctacagataacctagcaaggaggcaatctactaaaccataagaatccctaatgagaaatcctattcctaacaagcagattactcaaaca

SEQ ID NO: 174597 - DNA, 992 bp, Arabidopsis thaliana landsberg
cggcgaacgcaacatctggttcacggcggcggaggagaatatgacaacggcggcgtcatcgtctcagtcacaaccgccgcagatgcagtcgtctaagtttcatcaaccggagaaccacatccatataaataatggtttctcgagtggtgcttttgatttgcaaaccctagaatcctcttttggtggactttcttttgcagattattcaagtattcgtcagaacagtaatccgatactccccgcccatcaatacaagcaggtatttaacggtggtgatgggtacttgtttcctcctagttcttatcaccactatcaattaaaagacttacaaaggtttaaccagaatcaacagagattgtcatataagaacgatcatgttaatcgatcttatgtgtatgatactaatggtggtggtaatgggatgcttaacaatggtttcttgaatggagttccttgtgcttcaagaaacagtgtttcagattactacactaatagctttgggtatgaagttaacaattcttggaggagtaatgaaggttgtacatataatcaagatcaggcggcctcgtcgatggagaatgggaggggctcgttctttttcattgctacagaccgagtatggagcaaggaattggagaagagtatctttgacggtactaaagagacgattgatgtgattttcgatggtctcattgtcggtatttgtgagttgatggttgatccttttggtaatgatgttgttaagctgcttatcggaaaatgcagctctgaacagatcattatgattgttgatgttgtcactcggcacatttctaagtttgttaacatatgctttaatccgatcgggtacacacttctaatcattattctttaactttgagatatgattgtgcattgtttccttggatcttgattttctataattctttcttttggagatatcagaactttggcaatacaagttctaatctagtgctttatatagtagagaa

SEQ ID NO: 174598 - DNA, 407 bp, Arabidopsis thaliana landsberg
aagtaaaacgcggctcttcaaaaaacctaggcgaccttgaataggaagaggaatgtaagaataaccatcatgacagctctgatgaaaaccataatgagactcaggatcatatacagcctgctgataaaaatgtgaggggttttgttttcgatcaaggagcaacatcagctcatcgacagtcctggagacttggcaacaccaaactgggctgtagatgaaatacaggagtctgagaattggagtcatacagctgttttgaacagccccaggtcatttaggccaaagatgaaaccacaacatgatgatgagtccccaagagaagagacagaagcaactgagaaggctcctgcgcaagtctcttgaatcaaatgctggaaagagtacagttccagtataggcattctccc

SEQ ID NO: 174599 - DNA, 684 bp, Arabidopsis thaliana landsberg
atgacttccaacagaagcaacctcttcctccatcttctccttcttcatcttcctactcttatccaagctcttaacacagatggtgttgctttactctctttcaagtattccatcctcaatgatcctctcttagttctacgaaactggaactacgacgatgaaacaccgtgctcttggaccggtgttacatgcacagagcttgggattcccaacacccctgacatgtttagagttacaagtttggttcttcccaacaaacagcttcttggttctgtttctcccgacttgttttcaatcctacatctaagaatcttggatctctccgacaatttcttccatggatcactgccggattctgtgtccaacgccagtgagcttcgtattctgtcccttggtaacaacaaggtttctggtgaactaccccgtagtatcagcaacgtggctagtctgcagctcttgaatctctctgccaacgccttgaccggaaaaatccctcccaatctctcacttcccaagaatctgacagtcatttccttggcgaagaattcattttcaggcgatatttcaagccggtttgaagcagtaccgggctctagatattttcctcaaaatctttttagacgggaacctctttcctcccagattttcagcagggaaccaaggtcctccctttaacccttcaaa

SEQ ID NO: 174600 - DNA, 592 bp, Arabidopsis thaliana landsberg; identical to SEQ ID NO: 48795

SEQ ID NO: 174601 - DNA, 1043 bp, Arabidopsis thaliana landsberg
aggggttgctcggacctgactggaaacgagcgaacccaattgacatattggatgactaagattctacactgttcgtggctattagggggtatctggatgaagtgcatctgctagtgaagattatacgaggtggaaatgttcgaaacattaatagttaccgcagtaacatggatctaagcggtttgagttcgaaagaaatatcggataaatactgaaattgtgcagaaacaagagctgtatggggtaccgcgttaaccagaatgctgctgcgtaacctctcgggtaaacctcaaaaccacgttaatgataatatttaagttatcaaataagttggatatctgttaataatatttagatttcaggagacggtcaagatatagcaaccatgggggacaccaacgacgtcggcatacgtaaagagattgaataacacaacccgtatggaggtgtcatcataagggaaaacacggagattgcagcggagactagcgagacgccatcgaaagtaccacaaccaggggcaattacaagtttgaaaggcaaagagaaggttataaatgacgatgagagagaaaaagatcgtttattcgaggtgtggagaacaaatcaacaagaagcaatgttgcgtgaaatgtgttcaagagaaatgtcgctaaaagggagtcaaccgagtgaaacaaacggatgcgataaagagaagacagcgagagcactagacttcggaagtacatatcatgcaaacgacattgaaattgaaaatttgcatttgacccttgtaggggcagaatcgcaagctgttggcccacaaatagtcgcattgtcttcaagtgattcaaccttcgggatgccaacttcgatatcaacgagcgtttctttctgcagcgaagacctaatggatgatactgactctggcgacagcctgagcgtatcggtgataggtaagctggcgaataacatgtttggttgctcaggtgggtttaaacggacactaagacctgttgcttttccagttgcgtaccgtaagtgcccttactaaattccct

SEQ ID NO: 174602 - DNA, 799 bp, Arabidopsis thaliana landsberg
  unsure (1)..(799): unsure at all n locations
aacgatcattatctgagaatgctcaacgttaacgtcctgagacgagccccatgctctgttggaatctttgtctattgcaagcccatcgttgaatctcatatggctaagtcccacagcaaggtgcttttcattttattttgaaaactaattaattatccgtttgggtacgtgaaaatacaaatttcagaattttataaaatctaaaagaatatttttgcaacgtctaaatgaaattaaatgctgaaagaaaatcttttcattttcctttaccatttatgatgaacaaaagaaatggtactaatatattnnnnnnnnnnnnnnnnnnnnnnnnnnnnnnnnnnnnnnatgtttgatttttaacggtggaaaagacgatagagaagctttggcgataacaaatcgaatgagactgacagaaaaacgaacaaggctaacgatcataagattcattccaaaatcttctgaaatggataacgatgagtgggagcaacagcaatcgattaacctaaaggagtccgtgactagcatcgttgggtccaacatcaaagaaaatgatgccaaggtgacatatatcgataaggcggtttctgatggatctgagacctcaagaatcttacgagcaatggcaaatgattatgacttgtttatcgttggaagcggcagcggaataggaactgaggctactagcggaattagtgaatggacagagttcaatgaattgggacctattggagatttattagcatcacatgaatatccttcaagtgcatcagtgttggttgttcaaaaacaagtgtac

SEQ ID NO: 174603 - DNA, 640 bp, Arabidopsis thaliana landsberg
atgtcggtattcaggtcaggttcgggtcaaatttttcggattggagtttttcgggtttagaaattttggattttttttctttccatatttagaaattttggatatgttgggttatacgtacaattttgaattgggttcggtttgggttcactttgaatacgagtaattcgggtattggttaaaaacccatacataaccaaaattattttgggtttgagtgttacttacccaaacattgtccaaatatacccaaacatacataaaagtacccataaaaccccaaagatctaaaattataacaagtttttttcttaagacaataatataaaacaagaagtaaaccttgttttgagcttgttccagaactcaaatcattaaacaagtcacagattcaagttattagtgcatatatgtcctcatatgtatatatatatgttcgggtaataaaaagtacccacgggtatcagattcggttcgggtaatacccgatacccacagttatttgaaaacaaaacccgatcggataattagccggaaccgaaataaaacgggttcaagtattttgggtcgagttcggttcggttcttcgagttcgggtattatgcccaggcctaagaattacatcgggattctcacactc

SEQ ID NO: 174604 - DNA, 424 bp, Arabidopsis thaliana landsberg
agcgttggagttagcacatggaagacctccgttatctcacttcccgccgttgaaaagtctgctcatgaagatcgccaaaaggtttcattcttctgattacgagctcaattcgagcggaagcagcagcatgggtaaccatgagttctcaacagcttttagagaaatggttggtctgtgtctagagcaagctcctactaaaagaccatcggcagagaagttgttgcagcatccttttttctagaactgtaaaggactcgcctttgtggtcaagaacgtgttgctagagtgtcgaaagcaacgcacatgtgtatggagagtcagattttgatcaagagtgttggagatgaacatgaacaagaagtagacgcaaccttaatacaaatatagagcatatgtatgcagtgcctatacatgatgtgtttac

SEQ ID NO: 174605 - DNA, 1239 bp, Arabidopsis thaliana landsberg
  unsure (1)..(1239): unsure at all n locations
aaaactgacttattattgctgagttgaggtacaacaatcaatccgatttgaaaaagaagcattctgattggatacaaaagcttactcctgaacaaagaggtatatacgatcagattactaatgcagtattcaatgacttgggaggagttttttttgtttatggctttggaggaacagggaaaacatttatttggaaaacactagctgctgcagtaagatctaaaggacagatatgtcttaatgtcgcctcaagtggcatagcttctttgttgttagaaggaggtagaacagcacattctaggttttctatacctttgaatccagacgaattttcagtttgtaaaatcaaaccaaaatcagatttagctgatcttattaaagaagcatctctcattatttgggatgaagctccaatgatgagcaagttttgttttgaagcattagataaaagcttctctgatattatcaagcgtgtagacaataaggttttttatggaaaggtcatggtgttcggaggtgattttagacaagtgctaccagtaataaatggtgcagggagagcagaaactgttatgtcatctctaaatgctttatatatttgggatcactgcaaagtgttgaagttgactaagaatatgcggcttttaaacaatgatttaagtgttgatgaagctaaagaaatccaagaatttttcgattggttattggctgttggtgatggaagggtcaatgagcctaatgatggtgaggcgctaatagatatacctgaagagttgttgattcaagaagcagatattcctatagaagctattagtagagaaatatatggagatgcaactaaactgcacgaaatcaatgatccaaaattctttagaagggagctattctagctccaaaaaatgatgatgttaacacaatcaatcagtatatgctagagcatctcgatagtaagtttacatatactatattgattatttagtgcatcgttttatgttctgtattaatcattattttgctgaagatttaaatgttacttgatttggacaggtgaaganagaatctatctatcagctgatagtatagatccttcggattcggactcactaaagaatcctgttatcactccagatttaataaacagtattaaggtatcaggtatgccacaccaaagtagcgtttaaagtatggggctcctgataatgttacttagaaatttagatgctataggtggtaattgta

SEQ ID NO: 174606 - DNA, 518 bp, Arabidopsis thaliana landsberg
caccttggcaaagaatgggattcagactgctcttcatccgactccaacgatgaaggactggcagcctcggccttcaacaagtcttcgctcttccccaacgaacgccacacttgcctcatggccaaggagaagaaggtaagcgttcgagatacctctaagtatactacttctagtgatgatgattctagtgatgatgaagtagattactttagcttattcaaaggtttagatagagctaaggtagaaaagatcaatgaattaattgatgctctaaatgaaaaggatagattgttagaaaaacaagaggatattttatatgaagagcatgataaatttgttagtgtgcagaaatctcttgctttagagattaaaaggaatgaaatgctatcctctgaattttctgtttgtcatgaatctgtctctagtttaaagattctgaatgatgatttaaatgttaagctagaggaagctaataaatctagttcatgatttgaatgttagtatttgtaatagatgta

SEQ ID NO: 174607 - DNA, 825 bp, Arabidopsis thaliana landsberg
tgtttggagatgtgaaaaagaggaaggatgagttaattagtgagataacaaagatccaagaccagctggatagtgctcccacggatgctttgttagaatcagaggcttcccttttaaaggagttcgatgtagttctggaacaagaagagttgatttggttccagaagtctagagagaagtggatagcgctaggggcaggaataccagctacttccatacttctactgttattcgtcggagaagaaaccgcattgagatgcttaagaataatgaggatatatgggtgacagagactcgtgagttagaacaaatggcgatcgagtattacagacgcttgtattcccttgatgatgtggatgcagtggttgagaagttaccgcaggcaggttatgtcagtctaacccgcgaagattgctttcatctagataagcctttctccggagtagaagtggagaaggcgattagaaacatggggaagtacaagtctcctggcgccgatggtttttaacctgtgttctatcaacattgatgggaagtcgttggtgcatcaattgttaagttttctatggacttctttaattccggtgatcttccgctgcatacgaatgatgcacttgttgttcttattcccaaagtggttaaaccggagaagattactcaatttagaccgattagtttgtgtaatgtcttgtttaagactatcactaaaactatggtggagtggttgaagccggttatgagtaagttgatagggccagaccaatcgagctttattccgggaaggttaagtgcggataatatagtagttgttcagagatgcggttc

SEQ ID NO: 174608 - DNA, 205 bp, Arabidopsis thaliana landsberg
gtgcgacaggaataggaaaatagagaagacagatatagtgatgtggtacactgtcggattccaccatgtcccttgccaggaagattttccgacgatgcctactttgtttggtggctttgaactccgaccggcgaactttttcgagcaaaatcctgtcctcaagaccaaacccgtcaaagttaccaccgctcgaaagtgcactcct

SEQ ID NO: 174609 - DNA, 665 bp, Arabidopsis thaliana landsberg
ctacaagcaccgccactactactgtagagagacagagctccgggaggctgcggaggcctagagacttatacagcggcggcgaaatcagtgagattcaacaagtcgtgggtcggcttgttggcaatggttctagtgaaattgcttgtctttacacacaacaaggcaaaaaaggaactaaccaagacgccatgcttgtctgggaggttcgtgtttcactttttttttattagggttttagttcactgtgatgacatgttggattgtttgatgtttagaagcctttttgttatgctgttgctgctacagttacaatgctcttcttgttgctattgatgttcttcttgtgatgtattttagcttttttatatcttcttcttgtttaacttgttacagaatttctgttcgagaagcgatacagtgttatgtggtgtatttgatggacatggtccatttggtcatatggtttcaaagagagtccgagatatgttacctttcacattatcaactcagctgaaaacgacctcaggaacagaacaaagcagctccaagaatggcctcaactctgggcctacttgtgtagatgaagagcaatggtgtgagttacagctatgtgagaagaacgaaaagctattccccgagatgtatctccctcttaaaagggcctg

SEQ ID NO: 174610 - DNA, 1890 bp, Arabidopsis thaliana landsberg
tcttcatcatttcactcatccaccaaatcgaaaaaattgttacttccgctatcatcttcgtcttcgttatcttcaatacaatcatctattgatacttcgattcttcgattctttgattcatcatcgtttctgtcatcattcattgattcttttattcaacatcatctttggttcaagattacaacaatgtcgaacgatcaatacgataatccgttctttcttcatagttcggatcatgctgggttggttcttgtatcagatcgtctcaacactggagctgaatttcattcctggcgccgttcgatacggatggctctcaatctaaggcactaaaatcggcttcattgatggtacaattcttagaccttctcaggaacatagagattttggttcgtggtctaggtgtaacgacttgttagctacttggttaatgaattcagtatcgaaaaagggcaaagtttgttattcattaatattgctgaaggaatatggcagagtttgatagctcgtttcaagcaagatgatgctccgagagtctatgagattgagcagcgtcttagcttaatacaacaaggttctttagatgtgagctcttattatactgagttgatcacactgtgggaagagtacaggaactatgtggaattaccagtgtgtacttgtggtaaatgtgaatgcaatgcggctgtgttgtgggagagattacagcataggagccgagttattaaattcttgatgggcttaaatgagtcatatgattctacacgaagcacattcttatgttgaagccaattccatcaatcgaagaggctttcaatatggttgctcaagatgaaagacagagaagtgttaagccattgaataaatcagagggtgttgtgtttcaagcttcaggacctcctgtaactgatgtgtatactcaggagaattatgctaatgcaatgcagagtggttatcgtccaaggcagcaaagacctgtgtgtactcattgtggacaaacaggacatgttgtgcaaaaatgtttcaagatcattggttatcctccacgctatataccgggttttaaaagcatttcagctggatatcattcacagcgacctgctaattcagctacttcatttcagcctagaagaccagatcagaatcagaaatctcatgttatggcaaatgttatgcaaatgccttatgttccaccacctgcagttaatcctatgagcttggatgtgagtcaaatgagttctgatcaagtgcagactctacttcagcaactcaccaatcatgcaaaagtttcagcttcagagccttcagttccatcttcttcagtctcttccattacagatcacaatgctatggcaattcacaatataccatcctcttctacatcatcatcatcacttccatctatcacagagaatggtataatgtcggttcaatcaacttcgggtacaatctcttttccatcttcttctcttcgttatgaaaatcaaaaactcacatttcaacatcaatgtctttcttctttacacacaaatcttcctcatggttcttggattattgacagtggtgctactactcatgtgtgttctgacctaggattattcaatgagacagttccagtagctggagtaacagtctctttacctaatgacactagggttgctatcacacacactggcacaattcatctatcatcatcacttacattgcataatgtgttgcatgttccatcttttaaattcaatcttatttctgttagtagtcttttgaaatcaagtcattgttctgcacatttttttgctgattcatgttttcccaggaatttttccccgcttgacgattggtagaaaattttactcacaaaatcacattttacaacttgaacatccatga

SEQ ID NO: 174611 - DNA, 346 bp, Arabidopsis thaliana landsberg
tgaccccaattttgagatcatgcaatgtacctctacattcaaaaccgattcctccaagatggattgatatgcagcacctcatcaattccaagagtttttggtcgcagcagaagaatggcctatataagtataggttcgatcactctgtaggacaatctatttttctcctcccaaatcccgcttccacttcgatcaaagatggtggcaacattgacttttgcccaccagtagagaacctctatacttcaggtgatgaagccgtgccgatggatggagtgagcgatgatgaggctccaattcatcattccgataatgagacacaacctatggacgagtcttacgcaac

SEQ ID NO: 174612 - DNA, 613 bp, Arabidopsis thaliana landsberg
atatcaaggccaccaacatcccttattcctaccttggtacacagaggaaaagacaccatgtcaagtgtgcaaatacaaaagctacaactcaaagttaatttgcatggaatgcgattattctatatgtctccgttgtgctaccttcccatacaaggcaaggtataagcatgacagtcattttctcacaatctgtgatgggaaagaggcaaatgatcaaccagactggtgtgaggtgtgcgaatgcaaaatagaagatgtaaagaagcctggatataataagaatatgcaaaatgtggaaaaacgattttataaatgcaatgactgctgcaccactcttcacatagattgtttacatgggggagagatgtacatcaaacctcgggaaacagaacgagatcatctcacttttcacacttttagagacatggaaaggatatttattagagtccatctcaacagttctctctcccgacccgtttgcagtagatgcaatcgtcgttgtccattcccaatatttttcaaagggttaagactaatctattgttctctggattgtgttagaaatctgccacgtttttcccttttagtttgaagtattttgatattttggcat

SEQ ID NO: 174613 - DNA, 765 bp, Arabidopsis thaliana landsberg
gaatctttgtttatggtcatggagttgtgttctagttctgttcattaagcttcaagtcactttcttataccatatagttgatgaaagaatctactatagaacacctcaagtagattaatcaatttgatgtttgagtttgcttgttatcggttaattttgcgatgtttgttttcttaagttcctagaatctgtatgttttgattgtagcagatctgacctcaataattttctatcatgtgggacaagtaaaatgtgccattattgaccatgaatcacaagtttaatcttctttcacaagtattcttgagaaatgacaatctttcttctgtttttacagcgtcttcttgaagttgtctctcaacactgttaccagatagcgattgatcaaaacggatgctgcttgcttcagcaatgttttgacaaggaacgtgttccgaatcatgagataaggcaacgtttgatttcggaagtaatcgaacatgcgttgaaactctgcttgaactgtcatgggtaaacatgatatgaatgatatctacacaactcttctttctcatatatgatccactttattttttactcacgagtatgttctccttcagaaactatgtggttcaatatgtcttggagctcgataatcaacatgtaacagatgagctcgcgaaaaagctaattaggaactatgcgcatctagcccgcaacaaatatggaagtcatgttgtgcagaagttgttgaaactacggggatcctcatagagtcgacctgca

SEQ ID NO: 174614 - DNA, 512 bp, Arabidopsis thaliana landsberg
gcctggtgaccacgttgggcgacagggtgtcaactgacctgcgcacacgggtgtattcacacctgttggtgcagcgcccgaagttttttaaaaacctgaaagttggcgaagtgctttccagactgaccgcagacaccacgctgattcaaaccctgattggcagcagtatgtcatttgcactgcgcaacggcctgaccacgctgggtggcttggtgatgctcatcttaaccagccccaaactgtctggtgcagtgctcattttggtggtggtcgtgctggtgccggtcattgtgcttgcccgtcgggttcggtcattgtcaagaaccagccaagacaaactggccgacagcagcgccattgctcaggaagtgctgaacaacatcaccattgtgcaagcattcaaccaagagcaccggcaggctgacaagttttcactggccagtgaacaaaaatacaacgcagcgaaacgcagaaccgtgaaccgatcaggcctgatgtttgtggccatcggc

SEQ ID NO: 174615 - DNA, 320 bp, Arabidopsis thaliana landsberg; identical to SEQ ID NO: 63360

SEQ ID NO: 174616 - DNA, 135 bp, Arabidopsis thaliana landsberg
tctatcttgcaattatgtgtttgcagagagttatatgtttcgttcggggggctcctgatgttgcttcagggagaacgggctcatattactcacttcgaacttgaccataggctctttctactcatgacgaagcta

SEQ ID NO: 174617 - DNA, 369 bp, Arabidopsis thaliana landsberg
gcatgccaaaaagggtttcctgtcgtgatgatgatcatcactgcttggctgttctatgcagcacctaatatccatggatggggaaaagatggtcatgcaatcatgtgtaaaagcgctcaggtcttgatcgtttcatctactttacatttcagactataaactaagtatggaataacttactatattaaaggagacaattagtctccgtgggctgaaacagatataaaggccgagaaagagctgttacctgactctgctgaaagagacctctcaagcttgtgtctttgggcctgatcgtgtcaagttcagataccactgggcgtgcactgtttattacagctacacttctgaggcatgctcataccaata

SEQ ID NO: 174618 - DNA, 1942 bp, Arabidopsis thaliana landsberg
gtggctcccggaagcgtaagacgacgccgaacgtcacttagagagccggcgccggcggatcaagacctgcaaatcttcctccccaatacaacttcactccggcgccggcggttcaagttcctgcgacggagtcagctcaacaacatggaccttcaacgtctgcacccaacgtccgcaactatccaccgcctctgcaactcttccagaactcaacgactcaaccacaacatcaagctcctccgcctctatctgaagaggtccacttattcagcttccattcttcgtgatacataatttattctacctaaagaaaatcctcttaatcgcggatttcattgcttattcttaccatctcaagtataatgtgctggaatctctgaatatgtgagggtctttgctaaatcatcgtggctattcaaatacaaccaagcagtaaactgataatcttcatttgcttttttttttccaaaacatcttatttatctttatcctcatcgaaacaacacgggtgatttccttctttgtggaaagaaagcttatgcaccagtgtatttctaaattgaattggaaatttaaaaatcctctatattgcttttgaaacagatacaaatctgcaaaggattacaaaaacaaagaaattttaatagaaaacatccttgttataaattatataacaaattgtttcttgcttatataaatataaacaaacctggaatcaaagtaatccttaatttcattcttctttggcttatcttatttaggaatgttctctgtatttgaagtttgactcttgtttatacgctcaacaaccacaacaacacgatcaggtcttttattaatgtacgtgagtaagtatttgatagaacctgtttgattacaccattccatattgatatgagctcgatatcgcaacgatagcttcgcattggaaggcacaacatacctattgtcacacttaaaaccacacttttcaacaaagtctgacgtctgcgtcctcctataaatcggaaaaccatctttgcctactttagtcaattttgcataaggcttaggatacaattttgaacactttccatctaccatatatggggaattcgtaaacgctgcaccacaaggtccgtggatcattgactctttgatgacctcataaagctccagatttttctctttgttgggtatttcagcacaaatgatcctgttaatatcatcagaagacggtagcttactcctagatgccatgaataaaagtatatgagcatgtggaagacctcttttttgaaactcaacgttgtagatagctgaatcaaaaacattaacatctttacattcaaagatattttaaacatatatatatatatatatatatactactaaaataaatactataataattaacttaccagcaacagttttgcctagaagatgtttttcagttaaatcaaacattagagaatctagcttaatcttgaagatacaacatataatatttggtcgatcatcaggattcaaaccacgctcttcataatacctagtgatctctggctatttaggattacacgtaaaagtgatgaaaagatctgggaaaccatagtgcttacatatggccattacatcgtaatattgttgtaccatatatcgagggccatcggtgaatgaggaaggaataagcaaaggtcttccctgttcattcattttcttgtttccagcagcaaccgcttctttgatgttactgaatttctcacaacgtagttttgattgattgaatttaatataagacaacctattagcttcagttgctgaatatccatcaaccaaaaactgctgaaacaatctcctacacagaagaagagtatggctttcatgctccctttcctgaatccgaaaagcaaaccattgtctcatactgattgacttaaacttgctggttttgcttttgccagta

SEQ ID NO: 174619 - DNA, 504 bp, Arabidopsis thaliana landsberg
gcgccaatatctatatacttcttcctctggcgctggtcgttgcgatcctgctcggttcacagggcgtcgtgcagacctttgatgcctatgtgacaggacatacgcttcagggcgttgatcagacgattgccgtcggtccggcggcttcccaggtggcgattaaacaactcggcaccaatggcggcggcttcttcaatgtcaattcggcgcatccgctggaaaacccgacgcccctggccaacttcatcgaagtcctgtcgatcctgctgatcccggtggctttgtgttacaccttcggcgtcatggtcaaggacaagcgtcagggctggtcgatactggcggccatgacaatcattttcgtgccgctccttattttctgcgccgccatggaacaaggcggcaatccgaacttccccgcactgcatatcgatcagatgccaagccacaatcaggccggcggcaatatggaaggcaaggaaacacgtttcggcatgaccttctccg

SEQ ID NO: 174620 - DNA, 288 bp, Arabidopsis thaliana landsberg
ggctcattttcattcacgactgcgtctagcagtgagcgatgctcccgacatagatcgagtgatcgatttttaggggcaccttgttcacggataggagcgcccattatcgcatctaagacgtggggagactccgtttcccggagtacgacggaacgagcgacccaatggctcatctcagatccttatgttttgctataacacgagcattcctgacggacgaagaaaacgaaccaagtcattgccatttcttcgcagaaaacctcgggatcacgccctcgaatggtttgc

SEQ ID NO: 174621 - DNA, 888 bp, Arabidopsis thaliana landsberg; identical to SEQ ID NO: 14014
  unsure (1)..(888): unsure at all n locations

SEQ ID NO: 174622 - DNA, 291 bp, Arabidopsis thaliana landsberg; identical to SEQ ID NO: 54764

SEQ ID NO: 174623 - DNA, 488 bp, Arabidopsis thaliana landsberg
agctcacgtaacgtggccgtgatcggagccggagccgccgggcttgttgcggctcgagagcttcgtcgtgaaggtcacaccgtcaccatctttgagcgtcagaaacaagtaggaggactttgggtttacactccaaacgttgagccagacttactaagcatcgaccctgatcgaaccgtcgtccactcgagcgtctaccaatccctccgcaccaatcttccacgagagtgtatgggttacagtgacttcccgttcgtgacccgtcccgatgatgagtccagggacccgagacggtacccggatcacagagaagtcatgaggtatcttcaagacttcgccaaagagttcaagatcgaagagatgatccgattcgagacggaggtttttcgtgtggagccgacggcggagaacagttgtaaatggagagttcaatttaggagctcaagtggtgtctccggcgaagatatattcgacgcagtcgtcatttg

SEQ ID NO: 174624 - DNA, 299 bp, Arabidopsis thaliana landsberg
gcaaatgaataatgaggaagcgttggtacaagcggtgtctcaacatcctgtttccatggggatagaggggacaggagctgcgtttaggcactactcggcagggatattcaacggagaatgtgggacggattttgcatcatgcggttacaattgttggttatgaaatgagtgaagaaggaagtaagtattggatggtgaagaattcttggggggaaaatggtttcatgaggatcaagagagacgtggatgcaccccaagaaatgtgtggtttggccattcatgctttctatccacgtgct

SEQ ID NO: 174625 - DNA, 329 bp, Arabidopsis thaliana landsberg
agtgaggcgtgggattgacaaggacgtcatcgagtcctttccggctttcctatattcagaggttaaagcgttcaagataggcaacggcggagttgaatgtgcaatttgtctatgcgagtttgaagacgaagagtcgctacgttggatgcctccttgtagccatactttccatgctaattgcattgacgaatggctctcttctcggtccacatgtcccgtctgccgtgcaaatttgtctatgaagtccggtgacagctttccacatccgagtatggaaagtaaaacgggaaatgcacagagaggtgttcaagaatcccccgatgagagaa

SEQ ID NO: 174626 - DNA, 693 bp, Arabidopsis thaliana landsberg
tctgtgagtttttccttctctcttttaccatgctagcttgtttgtgttaagcttattctgatgcattgcttttctttttaggttaatgccagtggtttgttctgtggcatggctgagatgactggtccagtttcttttgataaagacatggatttttggcagcaagacaaatggagtggaagctttcccgtcaaatggcacatcataaaagatgttcccaatagctatttcaggcacatcatactacagagcaatgagaataagccggtcaccaacagtcgagacacacaagaggttaattttcctactagaccacgctttgaagattttcacattcagaatttgctaatatatcattttcttctgcagataatgctgaaacaaggtctggaagtgctaaaaatatttaaagatcatatggaaaggacttcattgctagatgattttgtgtactacgaaagccgacagagagtcatgcaggatgagagaaccaggctgccgtacaggacctttcttaacgatttaccattacccaggccagatctctctgatagaaacaagaaaacccccttggaatccttcaagaaaccttcagtaatctctgcaaaaaccgaggagcttccttcaaagtcagaggggaatgaggagaccactgtaaaagaaggtaatgaagaagatacttcttccactcag

SEQ ID NO: 174627 - DNA, 364 bp, Arabidopsis thaliana landsberg
tctgcgaacaaatatgggctcgtctttatgtgttgccgtgaggaaaaaggaaaagcagaagcagaagaagaccgtggtgttcttaccagagatccctgaagaaatgttgatcgatatcctaatcagattgccggcgaaatctctgatgagattcaagtgcgtctcaaagctctggctttcccttatcacctctcgatacttcaccaaccgtttctttaaaccctcatcaccaagttgtttgttcgcgtatcttgtggacagggaaaatcagagcaaatacctgttgctccaatcatcatcgtcatcgaggcatgatcactcggacacatctgtctctgtgattgaccaacattcgaccataccc

SEQ ID NO: 174628 - DNA, 1181 bp, Arabidopsis thaliana landsberg
tgtcacacatgatttcctaatataacttttgctggaatataactttgtctttgactttgatgcttgataattatatcgaattacgtttttgaagagtgtgtctttatgattgggatccagtactcaattctttgtcatgacaaatcttgtaattgtttaggctgtcttgtctccatcctcttttatttcaaagtgtgatataaccagagctgaccaaagtgtaggtcgaaacctctacaaatcatacaaattaaagactaaaacaaatcattcgaaaatattgttaccgacgaagaatttgtagagctcacagttatgacgaaaatcgttgataaccttacacagaataacatacaatatttacactaagtcaggatacttatatagataaggtcttgcacaggttcaatatgcatgattctaagaaaggttttataccaatgtctcatggcataactcttagcaagactcagcgtcctttgacgcatgatgagcgatagcggatgagtaagattccatatgcttctgctataggatctatcatgtatgctatgctctgcactcgcccagatgttgcatgtgctttgagcatgacgagcagataccaatctgatccaggtgaaagtcactggatagtagtcaagaacatccttaagtacttgagaagaactaaggataagtttttggtctatggaggaagtgaggaacttgttgtgagtggttatactgatgccagctttcagacagacaaagatgatttccgatctcaatcaggatttgtcttttgtctcaacggaggagcactgagttggaagagttccaaacagagcactgtggcagactctacaactgaagctgctgcttcagaagcagctaaggaggctgtttggattaggaagttcattactgaacttgatgtggttcctagtatttctggcctcattgatctttactgtgataacaatggtgccatcgcgcaagcaaaagaacctagatcacaccagaaattcaaacacatacaaaggcgatatcaccttattcgtgataccattgatagaggtgatgtgaagattagcagactttcagcggatgcaaatgttgttgattcgttaacaaaacctcttccgcagccgaagcataatagtcatactgttgcgattgacattagatttataaagatg

SEQ ID NO: 174629 - DNA, 327 bp, Arabidopsis thaliana landsberg; identical to SEQ ID NO: 44432

SEQ ID NO: 174630 - DNA, 571 bp, Arabidopsis thaliana landsberg; identical to SEQ ID NO: 77499

SEQ ID NO: 174631 - DNA, 582 bp, Arabidopsis thaliana landsberg
  unsure (1)..(582): unsure at all n locations
tctcatgggatctggaagtatcagatcttggcgaaacgaaggattatggaaccggtggtgaaaagtcatttcaggatccaaaacttttggcatctanaattgaaatggaactgtataagctatttggtggtgtgaacanaaagtacagagagaggggaaggtccctcttattcaacttgaaggataagaacaatcctgagctaagagaaagagttatgtcggaagaaatttctgctgagaggttgtgttctatgacagccgaagaattggcttctaaggagctttctcagtggcgtcaagccaaagctgaagagatggcaaagatggttgtcctgcaggatacagatattgatgtcagaagtctggtgaggaaaacacacaagggtgaattccaggttgaaattgaaccagttgacaggggcacagtagatgtctctggtggcatcatgtcacgtagcaaacgtcgacccagagccaaatctcattctgtcaaaaccgctctcaaagatgaggcagcaaaagctgacaatgaaaaatcacgctcaactcctccctcaactgaagagatagatcccaggcaag

SEQ ID NO: 174632 - DNA, 500 bp, Arabidopsis thaliana landsberg; identical to SEQ ID NO: 77161

SEQ ID NO: 174633 - DNA, 1204 bp, Arabidopsis thaliana landsberg
tctgatagtgtttgttccaagaaggatgcagcaaagttcaagctaaagtcccacgagtttctccatacttccaggcatcaactatttcacagtgtgattctgacattgtttcttcttctcaaagtggaagaaattatcggaaaggaagcagcaaacgtcaggttaaagtcagaagagtttcgccatatttccaggaatcaactgtttcagaacagccaaaccaagctcctaaaggtttgcgtaactattttaaggttgtgaaagtttcaagatatttccatgctgatggaatccaagtcaatgaatcacaaaaggagaaatcaagaaatgtgaggaaaactcctattgtgagccctgtactctcgctttctcaaaagaccgatgatgtatacctgcgaaaaacgccggataacacatgggtgcctccacgatctccatgtaatctgcttcaagaagatcattggcatgatccatggcgggtgctggtcatatgtatgcttctcaacaaaacatctggtgcacaggtttttcctcatttctatctctttttattccatatctttggtgaacataagtaattagcatttgagaccaattagtttaagtggatgtgtttagtgttgccattgcttgttgcatattttctcagttagttacaggaattattactcgaaaatcattcttgagggaagtccaaaatttgttaggaagtaagaagttagacctctgtgcgcttgaatctttcaattttaactgttgcagaagaagtagctgcagtttttggtttgataagtaattaattatcaatgatttgaattgcttggtcttgttgaatatggtagaagaaaaggctttgtaaatttattttaaaaggtgattgcagacgcggggagtgatatcagacttgtttggattgtgtactgatgcaaagactgcaacagaagttaaagaagaggagatagagaatctaataaaacctcttggattacaaaagaagagaaccaaaatgattcaacggttgtctctagagtatcttcaagagagctggactcatgtcactcaactgcatggcgttggaaagtatgcagcagatgcgtatgcgatattctgtaacgggaattgggatcgcgtgaagcctaatgatcatatgctaaactattactgggactacctcaggattcggtataaattatgaatgagaagg

SEQ ID NO: 174634 - DNA, 677 bp, Arabidopsis thaliana landsberg
tttcgatgtgacaagcttggtcactatgcctctaaatgcccagacagactacttaaactgcaagaagctcaagagaatgcagtgaatgataacaaagatacacaaaacgcagacacactcatgatgcacgaggttgtgtacttaaatgaaaagaactgtatgcctagcaagtttgaaacaaacatagaaggagatgaatgttggtaccttgataatggagcaagtaaccacatgactggtgataagagatactttgacaatcttaatgagtcaattacaggaaaagtaagatttggagatgattcaagaattgatataaaaggaaaagtacaatagcttttacagatatggatgggaagtcaaggatcatgaatgatgtttattacatacctgacttgaagagcaacataatcagtcttggacaagctacagaatcaggctgtgatataagaatgaaaggacaacacttgataatgcttgatcaatatggaaaacttctagtgaaagctgagagatcaaagaatcgattgtacaaaatcaagatgggattgagagatggagccgtttgtacttatctaccataagcgaatcaaatctgtggcatgcaagaatgggtcatactaactttgctacactaaaatctatgattgacaaagaattagtcaaggagttccaga

SEQ ID NO: 174635 - DNA, 131 bp, Arabidopsis thaliana landsberg
  unsure (1)..(131): unsure at all n locations
cgcatttcggcatgggaatggtcggcctgatcgaagtggcgnacagtacggccaacctcgacgccgccaagcaggccaagatgccgccgctcgccaccaaacggatgacggccttgctggatcaggcggcc

SEQ ID NO: 174636 - DNA, 505 bp, Arabidopsis thaliana landsberg
atggcggttaagcacggcgtcgacggcgacggcagcgaaatcgaatcgagaactctggcggtagatcgaaaaagcggtttctgcgaatcaacatcgatattctacagcaaacgtgagccaatggctctcccgccaaaccaatttctcgacgtcacgtctttcattgcatcacagcctcatcgcggcaaaaccgtattcgtcgacgccgtaaccggtcgtcgactaagcttccctgagctctggctcggtgtcgaaagagtcgcgggttgtctttacgcattaggtgtacgcaaaggaaatgtcgtcattatactctttgcaaactcaatcctcttgccgatcgtctccctctccgtaatgtcactcggcgcaatcataaccaccgctaatccgatcaacacgttcgacgaaatctccaaacagataggcgattcgcgtcctgttctcgccttcaccacatgcaaactcgtgtccaaacttcgcgccgcgtcgaattttaatctcc

SEQ ID NO: 174637 - DNA, 136 bp, Arabidopsis thaliana landsberg
ttttccctgactttgtccgtgtcaacaaacaattcgaaatgcctcgacttttttagaacaggtccgggtcaagtatgcaatgactcgaagaacttatttttacactatttcggaaacccaacgtctccctcgtaat

SEQ ID NO: 174638 - DNA, 599 bp, Arabidopsis thaliana landsberg; identical to SEQ ID NO: 21147

SEQ ID NO: 174639 - DNA, 574 bp, Arabidopsis thaliana landsberg
gaattgaaatttagctgcatatgtagacatgatgagttgatgattgatattcctgtatattttggactcgtacttgtgcagatagataaagcagagatggtggtgagatgatgattttcaagaagatgagtgtccttctaactgaaaaggattttgttgatgccatcgtatctgtttctctcaaggaccttacgagatcactctttgtcaggttcgaggccaaggcttgccctaagtttgaccttatccataagacttccgtcgagacggttaggtgcgtagggaaaacctttatgcatatgctctctaaggtttctagagagtttcctccccgcaatcgaactcatcccggtggcctcctctatcagcgatttgatcctactcacttgtctcttgctcgccaacaagttgctatatgcaaggaaactgattcacagtatccgcatgagattgtgattcactggacaagtgcaagcgcctgaaagtggatgctcttggttacatgtttactattgcaatgagatgcgcccctagtttggcttatctcgaaaagttcaggcagtacatggctcag

SEQ ID NO: 174640 - DNA, 475 bp, Arabidopsis thaliana landsberg
  unsure (1)..(475): unsure at all n locations
aaaaaaaaagatcttcatttccagtttattgctatgtttggacaataatgatatgctatgtcacatttactatnnnnnnnnnnnnnnnnnnnnnnagaaaaaataaagtatcatgcatggtactatcttttgggtccagtacttaactgaacatctatataaatgaatgttgttgtacaaacttgaggcaaggaggtttcatttattcaaacctgaatacggagtgccgtaatttcaacccacatcggtgttctcaacgctgacaaccggatacattttcgatggagaacagtgtgtgtttggaattgacatcttcgttgctcaaaccttgaatgaatgggaagttttctcctttgaagaaaacatcaaagatcccatttacacatggaaactcaacagattttcaactctctatagtgactcttacacatccgcccctttttcttctggaggaagtagctggtgaatctctctc

SEQ ID NO: 174641 - DNA, 530 bp, Arabidopsis thaliana landsberg
ttgatgcacgtagataaatataattctagattctgtgcccttatgacttaccatataactgctgaggctgttgatccatccaacgattcacgtttcactttccagacacgtgttacgagagctacatgtcagaaagatgaagacctgaggatactgactgaagtctgtagaattaaaccaaagatttaaggtgaattgctttatggttttgattagttgattgttctttttgttatcataatgttgctgatgctggaaaatgttgtaaaaaggtactggagacaaaacaaagcgatggaatgacgaagctattgatggtttctacaaaggctatctacctaagtggatatcggatgatattttgatgccatgcagtgagtaagatcagttttatgaggtgcaagaatcagagatccgagaacacaactggcttaatctatacactgaaatcgcattatactcgatgtgggaaggagacatgaggctcgagtctgtgccgctgcagataatgaaggtcattgtagagactc

SEQ ID NO: 174642 - DNA, 485 bp, Arabidopsis thaliana landsberg
gtcattttccaaaggggggaaagaggcaaggtcaaaaggggttttttttcccccggattttgccaagaccggtcccctgggggggggtttcctggaaatgaaaaagggccagggggaaaattgttaatccattaaagggggggcctaattaaataaaagggcccttgggtcccttaaaaaaggcaaagtttctccccccgttttcccgggccggggtgaaattttttcctttgacattcaaagcccggggcaaaaatcccaatggggtggcgtccccaggggcccttccaaaggtttgttttaaataaacagtggggttccccttgtccgggcccgtttttagatgagtgtttgacgccccggggaaggtcccaaaaaaaccggttcccggccgttccccggcagggaaaagaagagcccccctccccccgggaaagggtcgaacgggccccggtcaaccgcgggggttggaaatgaagcccccc

SEQ ID NO: 174643 - DNA, 513 bp, Arabidopsis thaliana landsberg
tcccgaaagtaaatattatgccaccgtcaagagcgcttgaaaagtctgcacacgtgttgagcgaaggtgaaaaggtgactctgctgattggggcgggcgccctgaatgcacccgaacaggtaaaacaagtggcagagctcttgggatgcggcgtggccaaagccctgttaggcagagccgccctgccggatgacctcccatatgtgaccggcgctatcggcctgttgggaaccgacccaagctggcaaatgatgactgattgcgataccctgctgatggtgggcagcagctttccttattcggaattcttcccgaaaacaggccaggcacggggtgttcagatagatattgatggtaagatgttaagcctgcggtacccgatggaaataaatttattaggcgtcagcaaaggaacgctgcgcgcgttgatcccttacctgaagcaaaaagaagatcgctcctggcaggaaaaaatagaaaaagaaatcgaagacggtggaaagtataaaccag

SEQ ID NO: 174644 - DNA, 402 bp, Arabidopsis thaliana landsberg
atgtctttgacccgaataacggtgatgcttgcttggttttctgctttgttcttggttgctaaccgccgagaaaggctccttggtaagatccccgatggagcggatttgatggtgttggaatggaggttcttgatggcgttaatcacagcctgcaatgcattggattgtttcctctttggtatcattgggaaagggttgagaggatgccgtctgggaatcgatttgaacccgtttgaggaacatgagttggaatctcactagagacagtctttgagcattctcgaccttagctccatcctgaaacactctttggctcaggtacgcagctgaccttcaagtccactgaactgacgataagaaaaagtcataacaaaaagaaaatatcttaaagacgggagtggg

SEQ ID NO: 174645 - DNA, 239 bp, Arabidopsis thaliana landsberg
cgatgattgatccgggaatcctctaaggagaatttcaatatgaatttcatttacttgcagattactccaccagccaccgactctatttcgagcttaagttttagtccaaaggccgatatacttgtggcaacttcatgggattgtcaggttctctcttctttcttctttactctgctttaacaatttaacatgatcggtgtaatacaccaaattataatgcactcaaatcaaatcttggc

SEQ ID NO: 174646 - DNA, 588 bp, Arabidopsis thaliana landsberg
gttgagtcattgtgggttttgtttgattgagaatgcgccagtgttagtgaggcaaaaattagaaatcttttttatatttacaaaaagaagaattgtgggatccctcaagtcagccaaacgtctttccttggacttatcacccgtgcaggtaactttgcttatcacaattgtgttatttggtttcacaatgtttatgttctaacagaaatatgatctttatgcatagattaagtgtcctattgatagtatcttctatcagctggtacatctagagatctatacatgtaaagaggagtggtggaatctacttaagctcatgcttgatagctcgcctaaattacaagtccttaagcttattggtgtaagacatttcattatcagtcagctatagctacttttggtggtctctcttttggggtttttgttaattcccttttgcctctttggtctcagaaaaatttggattttaaaaaagttggtatggtcggcggtaaatggaatgaacccacgaatgttcctgaatgtttgttgtctcaacataagatgtttgtgtggacaagttaccattgggaaagccaagtagagaaa

SEQ ID NO: 174647 - DNA, 510 bp, Arabidopsis thaliana landsberg
  unsure (1)..(510): unsure at all n locations
agccgaaaagccgcgtcggcctgctattcatcggcttcacggcgctttacggcgtcatcggcggccgtctcgtcgaatatgcgatgaaggatcccgaggtcgtttcctcgatcctgccgcccgaccggctgatggcctcgcgccctgatattctcgaccgcaacggcgaggtgctggcgaccgacatccgcacggtgtcgctgtttgccgagccgaacaagatcgtcgatgccgatgaggcgatcgaaaagctggcgaccgtattgccggatctcgacgtcaagggcacctatcgcaagctttcggtgaagagctcgcatttcgcctggctgcgccgccagctgacgccgaagcagcagagccagatcctggcgctcggcattcccggcgtcggcttccgtccggaaaagcgccgcttctatccgggtggtccgacggcctagnnnnnnnnnnnnnnnnnnnnnnnnnnnnnnnnnnnnntctccggcatggagaaatatatgacgatcc

SEQ ID NO: 174648 - DNA, 595 bp, Arabidopsis thaliana landsberg; identical to SEQ ID NO: 14438

SEQ ID NO: 174649 - DNA, 1105 bp, Arabidopsis thaliana landsberg
  unsure (1)..(1105): unsure at all n locations
ttttttgtaaaccgtaaaatcataattcaattaaggtgggataaaaatatcatgttcattaaaaagtttgtggcataaatcagaaaaaaaaaaaagaaaaaaaaaagaacttgagaaatagcaaaaaccaaaaaaaatatatactgaaatattataatcncgaagtatagatagattaatcagattagtgtaaagtgcgagacctttgtgcaatattgaagctttgcaacaaagttatgaatagagagataatatttaaatatatatgtaaaaacttttaacctcttttgattcatcttttactttgttgttgtgattcttggttggagggccaaagcttgagctaaaaaaccttttaacataattcataagcagcactctttaagctgaaacatcaacctttgttctatcttttcttttcctttctctttattccttactttgttttattgtctttttatgaatctcttttcttaacatttttttctctcattgtcgggggtattaattattacgttacgttctattattatcctttacatcgaatagcaataatgaacgttatttgatacttgcatacatatatatgtgtgtgcattacttatggggttttggtttgggttgaagatggaaatgttcagcaatgaacctcaaacaagtgaagggaagaggcataacttcttgatggcaacaaaagcaggagaaaatgcttccaagaaaccgcgcgtggaatcacgctcctcttgcccacccttcaaggttattacttttgtttttaaaaaaatacatgcaattaattataaatgttttttttggagaaattaaataaagcctgaataaaatttagtagttaagaagaaaaaaaaaatgaaagaaatttttctaattggaggatattaattttaaaaaatatatatagtcaaatgttaagataatccattgaatgatcattgtagtgtttatacgttgtgaaattgaaaaacaggtgaggaaagaaaagttaggagacagaatagcagctctgcagcagttggtttcccctttgggaaggtaattaattagcaacaattagttttcccaatttattccttacttcaatatttca

SEQ ID NO: 174650 - DNA, 382 bp, Arabidopsis thaliana landsberg
  unsure (1)..(382): unsure at all n locations
tgttgcgctttctcttggggggtttcggtttctttttgtttcggcgcttgttttccttgtgtttttcccccttggtgtttggtctcccgctgcntggtgtgtgttcctggctcgttgggtgtggnccccgtctgcggcttgtctgntgtttcttcctgtttggtttcgcttgcgggtttttcctgtcttctttttcccttctgttccgtttttggcgtttgcgtcttgtgttggtccggtttttctcgttgcttttgtcttgttcntgtctcccgctccggcttgtgtctgcgttcgggtcctgttttttgttccccctcctttccggccttgttctggggttctaaaaacctctggttaggttgtctctgttgcttttgtt

SEQ ID NO: 174651 - DNA, 651 bp, Arabidopsis thaliana landsberg
aaattacgttgaagccctcccgtgcatgtagggtgttgttgttcactgcatggaaggaaactaatgctggtaattctttgttgaggatgtactagaagctggtttaccacctcagattgagcggcctatcgatctacgtaagtctagctatgttctcttccttttgctaacctcatggctcaatcatttctataagcaatctctcatgatacatccatattgcatctgcagaggaagataaatatgtcgtgttattgtcgggcctttgtattggaagcaaatcggctaatcccctgcagtttcagcttcttgttgaccatataactgggcatctcggagatgaggaggttcaaatctcttaacttgcaggttgttcaacatatttctttccttaatttatactttatggtttgaacaggaacaaggccttgcagcacagatagttcatgtagtaattgctggaaactcttttgaatttccccgcaaactcattaatggccaggtacttataacttttgttgctgatatattctcagatacagttccagtaattatctgccccagttatgtcttatgatctttattggttgatatttgtagaacttggcctcgaaagatcaatcgacactgtatgagcccagcaaaagctta

SEQ ID NO: 174652 - DNA, 967 bp, Arabidopsis thaliana landsberg
tgaaacatcctctcatggagaggtaaacgccatgaccatctagttttctgtagactcgataagtctatgtcaaatagcagctgggctgaagagtatccctcaggaagaagtgagtaccttctttttgaagcttcagactacagacccctagttacttactttgacctgcaaaagaaaagaaagaaagggctcttcaggtatgataggcgccacaagaaaaataagaaaatatcaaaactagtggtcaaacattggaaaggcagtgtttttgaggaggtagataccaaaatcagaagatgcagaagggccattattgagtggaataaagagaaacaagtgaacagccaaaagaaaatcaaggatcaccaatcttagctagaaacagcaatgattgaccctacctcatctatagaaacgatcaataaaatcagctttgacctgagttatgcttacagagaagaagaagagttctggaaacaacgaagtcggcaactgtggctaactctaggcgacagaaacactggctatttccatgctatcactaaaagcatgttagctattaacaaattctctgtcattgaaaatgaggaaggtataagtgtctttgaggaggacaagatacttggagttatcctagactattaccagcagctattcacaaagcaagatactcatgatgaaacttgcaggtccatagttcaagaagcattatcaccgtgcatttcagaggctacaaataacagattgatagaaataccttcagaagaagagatcagaatagcgagcttctccattcatctagacaaggtgccaggtccagacggtttctcacccagcttcttccaagcaaactggaacacagtcaaggagcagattgttaaagagatccaagagttcttctcctctggtctcctgccctgcaacataaacaatacacatgtcagactgattccaaaaatcaaaagac

SEQ ID NO: 174653 - DNA, 274 bp, Arabidopsis thaliana landsberg
atgcagctgaaggttagcgcgtaggtccataaacggcgattctgcatctgacgcgctttggctccgatatcgattttcttaggacgtgttggaccgcgacgagcgatggagagagatcggaggaaggttaaggatgataatcgcgatggatctggtgaggcggtggtcaatgagtgaaaaatcgggcaaggtggtgattcgaatgacgatgagatttgaggatttcgttgaattgatcggaggatttgagaacttcgacggaacaataacctag

SEQ ID NO: 174654 - DNA, 362 bp, Arabidopsis thaliana landsberg
atgtctaacgtaagtatctcttattctcttttgtgattaactaatattaaaactagtagtagaccgaatgaaacaaaactgttagttttatcaaattattcgttatgattatttatgcaagacatatttttttgtagtttgataattcgttcgttaacaaatttttaatttaaatttggtttctaatatgttcatataactattcttattagggaacaattcatagatttttcaaaagaaagcatgaatcaacgtcacaagatattccagaaaatattccggaagctattccagaagatttgcctttggatcctggcgatagaaaacatattttggattatcatcctaatgaaagagatgag

SEQ ID NO: 174655 - DNA, 163 bp, Arabidopsis thaliana landsberg
atgtcgacggaggatgagaagttattgaaggaggcgaaaaaacttccttgggaggatcggcttgggcataagaattggaaagttaggaacgaagctaacgtcgatttagcttctgtttttgattcgattactgatcctaaggaccctcgtcttcgcgattttg

SEQ ID NO: 174656 - DNA, 294 bp, Arabidopsis thaliana landsberg
atgctcggggccttcaccgatgtcacggcgcggcgggcgatcgatgcggccgagctggtcgacggcaagatcgccaacgggctcgaccccgggccgctggcgggcgtgccctatgcggtgaagaacctctacgacatcaaggacgtggtgacgcgggcgggctcgaagatcaaccgcgacaacccggcggcgcgacgcgatgcgacgctggtggggaagctcgatgccgccggcggcgtgctggtgggcgcgctcaacatggacgaatacgcctacggcttcgtcggcgagaac

SEQ ID NO: 174657 - DNA, 197 bp, Arabidopsis thaliana landsberg
acgagggagaaaaaacagtggatgcttcggagaagaaaaagaagagaaagacagaggagaaggaggaggagaaggaagaggagaaatcaaagaaaaagaaaaagaaaagcaaagcagtagaaggagaggaattgacagcaacagataatggccatagcaagaagaagaagaaaactaagtcacaagatgatgaataa

SEQ ID NO: 174658 - DNA, 734 bp, Arabidopsis thaliana landsberg
atgcttttagcaaatgaagatacaaccggtacagctcgtgaacagaagaacatcttggaaaacactcatgatttttcttctgatggaaaatccagcgacttaagaaaacgtgaagtattatcagccagtgacgctataaaagaggcgttggctctatatgaatctctcggagaaatacgcaaacaagaagctgcattcgcttaccttcaactagcacggtatcacaaagactgctgcttgggatttcttgagacagagcgtcaaggaagtcctcgtaaacccgagagtaatgtcattcagagagccaaacagtatgctttgttggcagataggaattggcagaaatcgatggatttctacggtcctgagaatcttccttcgatgttccttacgatcctaattgagagatcagctctttcctcaaccgtttcaaacttctggcaattaaactttgtaagtgcttgatcccctcttggctatagcttgattcgttctctatgatttcaaggtctggcactaaacttctatttttttccttcagatgcttgaatcagctttgtctcgtctactcgaaggccgtcacatctccaaaacatatgcagaatccttaagaaccgaggacccgaagctatacaccaaattcatggcccaattgcagatggttctaaagcgaatgctggccttatccttaccatcggaaggagccaacaagtctcagacatgtggaagatccg

SEQ ID NO: 174659 - DNA, 105 bp, Arabidopsis thaliana landsberg
ttgcctgaacgacgatggccttcagctgaagtcctcgatcgaacatctggcgagcgtgaccgacgagctaaggctgaggcgaagctcgacgacgaggtcgaacag

SEQ ID NO: 174660 - DNA, 1002 bp, Arabidopsis thaliana landsberg
atggattggttctcatggctgtcaaaaaccgaccttgatccgaccctaagctacgagtacggactcatattcgcccaaaagaagctccagagtgaagacatcgcccttttcaaccacaactttctccggcgacttggtgttactgtgaccaaacaccgcgtagagattctcaaactctcaaagagagaaacacaagcactcagctcctataaccatcgtcccttctcggccaaactcatatctgtcgtcatcaaggcaaccaaaagtgtcggcaatcgcttaaccaagtggctttctctcggaggaaccgccgtagttgaaccgctcaaggagaagcagtcgccgccgcctgcctactgtaccggagcctttttgactggtaggtcaagataatgcaccaaatcactatacttattgcaacgagattttctttatagatacttaatcccagcacagctaatatgttcttgtacgataacaaaattgcatttatgaatgacgcaagaagtctaagttttgtaaatccataagtacttttttttttaaagtaatgtttggataattagggtttgtagttgaagtggtgttagttaaaacgtttttgttgacaaaattagttaacaactttcaggtaataacaataaagtcaatgctgaaaaagctgtggtacaagtggagagattacctgtgataaagaggaaaaggattgcgaaatctggaccgttggatcgaaaccatggaatacaagagaaaatgacgttagtaagcaaccgaagcatgaacctatctggaccgttggatagaagtgtccaagaaagactcattttagcttatagaagccctattgtgtcgggacagttagatggaaacttaaacgaacgattgagattatcagggccgttgaaaggaagaccaccaagcccaagtgtgtatgtggagtacaataaaagggatgatgacacacgatgggatgctatgtttcataacttgaagcctacgtag

SEQ ID NO: 174661 - DNA, 280 bp, Arabidopsis thaliana landsberg
cgacttcggctacggcttcatcacccgcttcgaggcgctgacgggccgcaacaaggccggcaagcagatcatctcgctcagcgacaaggcgaaggtgctggcgccgcaactcagtgccgacccggcgcgcgaccgcatcgtggtggtcaccaccgaaggccacctgctgatgttctcggtagccgaactgccggagctcgacaagggcaagggcaacaagctgatcgagattccgaagaagcagctggccgaaggcgagcgcgtggccggcgtggccgtg

SEQ ID NO: 174662 - DNA, 428 bp, Arabidopsis thaliana landsberg
atgcccgtatgccggaaacgcatattgtttcgtgacggcacaggatcggcctgtgccgttgacagcctgccggctttcgctactttcgccgtaggaaaactcgccggacgctggatggccaccctcataccgacccgcaacagctgcctgccgcgcatgaccagcggcgagaaacgcgtctcggaacgactcgaacagaagctcgaggacgactacctgatctggtacgacgtgcccgtcggcctgaagcagcgccatccggatttcgtcatcgtgcacccgcgccgcggactgctggtgctggaggtgaaggactggaaggccgagaccatccagcaggccgacagcacccagttcaccctgatcaccgaccgcggcacggtgaaggagaacaacccgctgctgcaggcgcgcgccttcgcctggag

SEQ ID NO: 174663 - DNA, 141 bp, Arabidopsis thaliana landsberg
gtgactggttgggtggtagagtaccaagaaaacttgattgcacttggtgttgatgattcactagctcaagtgtgttctgagagcggttcaatggatcctctaatgaatgcatatgttgaaagaatgcaagctacaacgaag

SEQ ID NO: 174664 - DNA, 909 bp, Arabidopsis thaliana landsberg
atggaagacgaacatcaagatctccataaacccattaatggagctttgcgaaacctcaagattactcagtcacagaaagaaacagaaaagtctacgaaccaacagcaagatgttacttgttactacggtctaagggaaaactcgaagaaaaaaacccaggaatctccggagccaatgaagaagattttgtttcgatgcgaagaatgtggaaaagggtttcggtacgagaaatattttaagaatcatcgctcgatgatgcatttatcgccgaacgagaaggtttgtgaagaatccttgatgactctgtctcgtagccttgagtttgtgaagaagaagaaaagatcgagacttgctaggtctgggaagacttcatttactacgtttcttgaaccgagttctatttttgatgcgactgatgaagaattagaagtggcggattgtttgattctattgtctgagagtgctcccaaggttgtaggcggactgaaaattcttactgaggcagtacgtgttactcctgaaagacctgaaagtagctatgatttgggttgtttgctcaacaagaaaccgagaaaaggtggtgaattggaatctggggttttaagttatgagcaaagacttatggaagaagggtttagtagttatggagcatcgaaagaaccagctagcttcttgagagacgataacagattggatcagcagaaacggagaaaagatggtgaatttgaatccggacttttgagtaatgagcaaagactgctagaagaagagattactactcctgtgacattcaaaggtccagcgagttccttgagacacaagtgtgctttggatcgaaatggaggtgaatttggtcctgagtttttgagtaatgagcaaacactgatggaagaaacatggaaagaacca

SEQ ID NO: 174665 - DNA, 599 bp, Arabidopsis thaliana landsberg
atgtgccaggcctgccaaggcaatggcgaaatcgtcaccaattgggatacttacctgcccggcgatgacgacgagaaatcaaccgccacctgccccgattgcgatggtgacgggaaagtcactgccaatccgtcgcagggggcagaagcccccgcccttgcggtattggaagcccatttcgaacgcccgttgaaggaatgggaaataacagcgtttcgcgcagccctcatcgccgccataggcgcaggcgggcaggcggtggcagtgaagccgctggaatggtcgatgacaatggagccggacgaagacggcgacgagacgcacacagccggaaccccgttcggaagttacaccgtcgagcgtcgtgatggttgctggcaatggcggtattgctttgacgaatattacgacgaggacgaagcgtcttgcgacggtcttgaagacgggaaatccgcagcggaagcgcattggcaggaccgctgttccgatctagtagccgccctctcccaaccccatcccgccgatgagcgggtggaggaggcgctgcgggagtgcgcggacaaattgaatatcgcgcgcatcgacagcaaggacgaagc

SEQ ID NO: 174666 - DNA, 67 bp, Arabidopsis thaliana landsberg
atgaccgagttacgagaaaaaattgttactatcaccaacgtcctctatcataaagggatttttcgag

SEQ ID NO: 174667 - DNA, 147 bp, Arabidopsis thaliana landsberg
gtcgggttgtcgatgaggatattgaagtagaggcggtagttgaagaagtaggcaccgaccagccattggaacggaccatcaccggtcgactgcagtcgcacttcctgcgagaacgacttggaattgtcggtgatgatgtcctgttcg

SEQ ID NO: 174668 - DNA, 166 bp, Arabidopsis thaliana landsberg
ggagaggaagaggagtcggaaaatcgtcgagattctacccgcgacgacaattgtcgttcacaaggtaactcatcacggcactatgcggctgcgataaaagcgccgcggcagattggtcgaaccattgtcgatgaactgaataacgccgtttgtcgtcgaaagactg

SEQ ID NO: 174669 - DNA, 415 bp, Arabidopsis thaliana landsberg
atgaatgaagattttgaagttgcgaaagcaaagcaagaaataagcgaatggacaagttcaagattgcaaaagaatgtggatgagcttcgtgaatccaaagagagatgttatgagaaatccttggattgcgcaaagaaactgaaagacagttttgcaaaggtgggtgcatacacatcggagcaaaaatttattcgagatgatcccaaaggacttgttgaatggatcggcaaagaagctgaagtttttgaagaaatacttactgaccgtggggatttttgcgtcttcgccggtgcccgaggggttgcagcagttttggagaaaactggctgtgaacatgttaaagttgtagcccatgcagaagataccttctccatagacgatacaaaggaaccttcagccgaagctactctgatgg

SEQ ID NO: 174670 - DNA, 283 bp, Arabidopsis thaliana landsberg
gccggagacagatgaaggacgacaagaaggatctcggctaggatctatcggtaaagatagcgaaactgctgatagtttcatatccgataaagagattcttgagatatctaccgatagtaaaagttccaaaaccaatggtgaaaatacaacgagtagtaaagatgaggaaaatgaatggaaagatgatggacaagagaaaggagacgagctaaaacattcacctgaatctccgagttttcgaatttattgtgttttccctagaaatcctaatgatgacagttaa

SEQ ID NO: 174671 - DNA, 138 bp, Arabidopsis thaliana landsberg
atgttagcatgtgtgagtgagtattttgaggagaagctgacagacaacgcaacatcagattctgaatctgataatgaagacctagtctccagcgggtataatactgttttggattctaaatccgccggcgaagcgctc

SEQ ID NO: 174672 - DNA, 471 bp, Arabidopsis thaliana landsberg
atgcacactgccgcctcggcctcgacggtgggcagcacgcaaggcgatgtcacgattgccgccggcaaccactacacccaatccggcagcgacgtcctcgccccgcggggcaacatcggcatcgacgccaaacacgtcgacatcaccgaggcccgcaacagcggcgacagcaccatcgagacgaaattcaagcaaagcgggctgacggtcgccctttccagtccggtgatcagtgctgtgcagaccgcccgacaaatgaaacaggccgccaaccagacatccagtggccggatgcaggcattggccgcagccagcacagccctgtcgggcatggaggcgtatgacgcgatccggtcaggccagggcacgaccatcaacggcaagcccgatcagatccggaccggcacggatgccaacggcagccccacttcacgggacgccaacgccgtcgaccgggcaggcggcatcaac

SEQ ID NO: 174673 - DNA, 303 bp, Arabidopsis thaliana landsberg
atggctgctccacttcatgatcgacttggtgttgacattggtgaggaagatgaagaaaatgtaaacatgaaagagagaaggaatgttttgcttatgggagatcatttgggggatttaaggatgtctgatggactggattatgagactcggatatctattgggtttctgtgagtttttctcttcttctattttgcctcctctctgtttcggtctcctcataactactaatcttatttctacaggaacgataacattgagaagagtcttgagagctaccgcgagtcatttgatcttgtttatctt

SEQ ID NO: 174674 - DNA, 341 bp, Arabidopsis thaliana landsberg
ctttaactaaacaattagatgaactccgaaggctagaaaaggaggcaaatgaacgagggagtgtcgactattctcaactactgaaacaactgaaacaaagtgaagagctccttgctgaaatcaaccgatttaaagtagcaactggtcaggggatgaaaaatcccaaccagttcgagggttcaaccatgcatcaatcggaccaaaacgtgttccagccgcaactcaacacctatgagttcaatcagcaccagcaattggacccaaacatattcaaagagcaatgcaatgtcaacgagtttaatcatgagcaaccaaaccatgaattttatggacataactaa

SEQ ID NO: 174675 - DNA, 244 bp, Arabidopsis thaliana landsberg
atggatttagaagagagacgcatagaggaagaagaagagaaacgagatgtgaaacaaatgaatagatcggttgatgaaccactgttgttgttgctactactgttaatacttgaagaccggtggggtctctcagtttccgccatttttttttcttttttacagtgagaagaaggagaagaagaagaagaagaagaagaagagtgtagtagtaaccatagccattggagagatattgagagtgtaa

SEQ ID NO: 174676 - DNA, 607 bp, Arabidopsis thaliana landsberg
atggcgagtagtggaaagaagaaagatggagctgctgaaggcgctcttgtagaggtcaatggagtgacggaaatcactcagacccgtgataatttcgaagcagctgaaggcgcttcaaggaagacaatcaattcatatgatttgtcttcaggtgataatcccggagccttgatctcccatgtgttattaaagcctgacaattatgataattgttcaagcgagttgcgaacagccttaagggcgagaaagaagttgggtttcgttgatgtggtcaattctgcggtgaattctcctcaaccgcgtggtcgaggtgatggtatgtaccgagatttgatatgttccaattgtggtcgacagggacatgacaaagagaagtgttaccagctgattggttacccagagagttggaaccagagtggtcaaagttctggtgaatcaagtagcagtcgaggtggatcacgaggtatccttcaatcaagagctcatattgttcagggagacaaccaaaaggttgtgagtgggtctggtgtgtttaacgatgaacaattgaaggtgttgcaaaccatgttcgtagcaagaaacgttagtacaactgacgcagtgactg

SEQ ID NO: 174677 - DNA, 381 bp, Arabidopsis thaliana landsberg
  unsure (1)..(381): unsure at all n locations
atattggtgtaatcaaccgccgcattcgcccaagacggcacgcagaccgcggcgccaaaaccgccggcgatcagggtcgcgcgcgatatcacgacgtggagcatttcgtatttcagctggcaagagcaggtgactctgcatcgtggggccgcgaccgatcatgcgctggcgaactnnnnnnnnnnnnnnnnnnnnnnnnnnnnnnnnnattactttaaagcgcgccacgggtacgtgtatgagggcaccgtgctgttcggccaagccgccgccggcggtccgcagacggaaattccctacgtcgtttcgaacgtgaaatggacggcgctgcaggcgacgttgcgttacactaaccgctggaccgcgcaggcgtcggcttcg

SEQ ID NO: 174678 - DNA, 461 bp, Arabidopsis thaliana landsberg
ccaccgccggcggccaaccacctccggcggcggacgaccacctacaccgccggacaaccacctccgacgacggacaaccacaaccaccgacgccggaaaaccgacgccgccggaagcaccaccataacgaccatcgccggcaaccaccgccgatgccggaaaaccgccgccgccaccgccggacaaccaccgtcaccatcgccggacaaccagacaaccaccgtcgccggacaaccactgtcaccatcgctggacaaccatccctgcccaaccaccgtcgccgtcgccggataaccgccgccgccggaactaccaccataaccaccatcgccggacaaccacctctaccggaatcaccaccgccggaatcactaccgccgccgtcgccggaatcaccatcgccgccgtcgccggaaccaccaccgccatcttcgctggaaccaccaccaccaccaccttag

SEQ ID NO: 174679 - DNA, 174 bp, Arabidopsis thaliana landsberg
actctagagaaaagccacattcatcgtcgtcatcttcagagtaatatcattaatgaacaacaagaagaggaaaatatgcaaaaaacacaaacgaacaaaagagcaacaaacaaaaacaaaatcgtcacaagaagtcgaaagacgaatctaattcactattttatacttgattaa

SEQ ID NO: 174680 - DNA, 185 bp, Arabidopsis thaliana landsberg
atggtgaaacacaagtttggtatcgtatcgaagaagcaacttcaggtactttatcaatagtttgatggaatttatacactctgctattctattagatgataccaaacttggagatcgaagacaaccctccatatgaaagagccccgaaagaagaaaacggcgaatgcgtggagaagaaagcataa

SEQ ID NO: 174681 - DNA, 132 bp, Arabidopsis thaliana landsberg
atgtggaataatgcggtggcctcgctgctgcgattcggagaagggggccccggaatttgtcaccggagcacggtcttcaccacgggcgcgcctaccatcgtggccggagttcgtctgcgcagcaaagacctg

SEQ ID NO: 174682 - DNA, 164 bp, Arabidopsis thaliana landsberg
tgcgagtgtttcgcgagatactttgttcctcgcaaaatttccgaggaattaactaccgcttccactttgcgacgcgcgttttgcgaggaaccggttttcctcgcaattccctcggtatacttgttttgcgagggattcgctatagattcttccgtcgcaaatga

SEQ ID NO: 174683 - DNA, 487 bp, Arabidopsis thaliana landsberg
atgaccgtctcgtgggccgccgccgaggcccacgcctgcgccgggaagctcgccgcgatccgcgagatcatccgccgcgagggtcatggagagccctcgggtacctcggctcatgatcttccgcggcagtgggacatcggggtcgctcacgaggttgccgcggcgctgggcctgtcgtggcaggcggccgagccgctcgtcgggttcgcctacgacctggaggcgaggctcccccgagtggggaagctgctcgattcaggtgtcctgagctggcagaagagcaagatcgtggccgacgagttctccgtgctggacgacgagaccgtccgcctcgccgagatcaagctgctcaagcgaatcctcaccggggacgggcggctccgtgacgacatgacgcccgcccggctgcgccgcctgtgcaagcagatcgtcgccggacaagacaaagacggctccacgaaacggcgcgaggcggccgagcgggacg

SEQ ID NO: 174684 - DNA, 143 bp, Arabidopsis thaliana landsberg
actgtaaccttgctgacggagagtacgtcctcgtgccggagcaaggagctgctcaggaggtagccccggatccagcaccagagcctgcaccagaggacctgcctgccactgctttggaaggcaagccccggttttatgcataa

SEQ ID NO: 174685 - DNA, 389 bp, Arabidopsis thaliana landsberg
atgcgcatcggcggagccgaccgggtcgacgtcaacatcgtcgcgctgaactcccacgacggcaccagcgcgttccgcctgctcgtcacccccgtgcgcgtggtctgcgcgaacacccaagccgccgccctggccaaccacacggcgtcgatcagcatccgccacaccgcatcggccaaggcccgcgtcgccgccgcacgcgacgccctcgggctcaccttccgctacgtcgaagccttccaggacgaagccgaacaactgatcgcccagaccatgaccgatcaggcgttccacgccctgaccgcgaatctgttccccgcaccggaccgcgaccccggcccccgcacccagaacgcgcacaagaaccgcgaaaacatcctgaacaggct

SEQ ID NO: 174686 - DNA, 525 bp, Arabidopsis thaliana landsberg
atgtccagggataatggaaggaaccagagtttaaaagctaggaacggggtttcggtgaaaggaggtggagggaagacaactcgggtggtgaaaactgtgagttttgataagaatgggaatgtatgtaaggtttatggagatacacatgacctaacttctagtgcagaggatgatgattcagttgacgttggagaggaaaccctcgtgatgtgtagggatgagggaaagaggcgtagttcgaaaactgggagcagggttttggtgaaaggaagtggaggaaaaacaaaccgtgtggtgaaaactgtgagctttgatgagaatgggaacgtatataaggtttatggagatacgccagagtcaagtattataagtgaggaagatgactcgacaagcggatcaaacgatggaaatggagaagagaaagggaatgtgaatgaggttgaggaaatcaaatacgttcccaaggaaaacgagagctttgaagatgaagaagaagaagaaaaagaaactgattctgaaaatgaa

SEQ ID NO: 174687 - DNA, 627 bp, Arabidopsis thaliana landsberg
atggtggccgtagctgagaatcagaaaacgaagaacagtctcaagttcctctgcagttacggcggaagaatcctccctcgttctatcgatggaaagctccgttacgtcggcggtttcaccagagtactctccgttcatcactctatctctttcacaggtccgtttcaatctttttccccccattccaatttcatctaacttttccaattcatcgaaattgatttttctacttctccttcagaattgacgatgaagttggaggaattttgtggatactccgttgaattgaagtgtcaattaccaaatggagatctcgagacactaatctccgtcaaatcggacgaagatctggtgaatatcgttgaagaatatgatcgtgtttacggaggcaagatccgtgcgattttgtcgcctcctaagcagatgtcaccacgatctagcggcggcggtggagatctatcgccgaaatcgccgttctccgtcgtggcttctccatctccgcctcggtattgtgtggctccgccgacggagaatcttctcagtagattccgtatgagaactggagaatactctcgttgctgtaactgccgtgttccaaacagagactccaagcttatctggcaataa

SEQ ID NO: 174688 - DNA, 354 bp, Arabidopsis thaliana landsberg
gaacgattgcatggcccactggtcattgaccgggacgggcacgagcccttccgctacgaccgagactacgtggtgatgctgtcggactggaccgatctgagcggcgaagcgctgttcgcgcggctgaagaagatggcgggctacgacaattactaccagcgcacggccggcgatttcattcgcgacgcgaagaaggacgggctcgaagccaccgtcgccgatcggctcatgtggggtgcgatgcggatgacgccgaccgatctcttcgacgtcaatgcgaacacctacacctacctgatgaacggcacgaccgcgctcggcaactggaccggcctgttccggcccggcgagaaa

SEQ ID NO: 174689 - DNA, 174 bp, Arabidopsis thaliana landsberg
gtatttgatcacgacaagaagaatgtgaccattctggttcaacgagcactgttatacgagagcatggagaaatacaaactcggagctgaagacctaaggatggttctaaagattgatcccgggaatagaatcgctagaagtactgttcaccgcctaaccaaaatggctggttga

SEQ ID NO: 174690 - DNA, 320 bp, Arabidopsis thaliana landsberg
atggcagaaaccgccgatacaatcaacaccaccgtctcaacgccgcagccacaattagaaagcagatcagacgagacaagttgcctccaaaaacacagatctgacgcaacatcagaggtgacgaaagaagagaaatctggaggaatcttgttcagcgtttggccaccgtgtcagaaaagtcgcgactacgtggtgaatagtatgatcaagaccttatccacagactcgatcctctcctacaaatacggaacgattaaacctgaggaagcctccgccgtctcgaaatctatagaggaaaaggcttacgacatcgcatcaag

SEQ ID NO: 174691 - DNA, 120 bp, Arabidopsis thaliana landsberg
cgggtgcgggtgcggttgcgggagtttgcggaaacgggtggttgctgtttcaagcgtttcatgcgttttgaacgactggttgagcgtttgataatgaatgagtttgcgggagttttatga

SEQ ID NO: 174692 - DNA, 554 bp, Arabidopsis thaliana landsberg
atgtatccagacgacatcgtcgaggaggaccccatcaccagcatcttgtccaccacgctgcatcggtataccgccggcatgctcggcagcatcccgccgatcgaccaggacgtgaagatgctgacaacgatccaagggaccgtgccgccagccggcgcgatcctgcccgactgtcgcttcgtgccgcgctgcggcttcgcccgcccgccatgcacactgcggatgccggacctcatggcgttccaacacggacaccgcgcccgtagcatcccccacaccggctacaccgtctagaccatcgtacgatgacccacgcgttgctcaacgtgaaggggttaaccaagcatttcgcgctgcgcggcagccgccaggtggtgcgcgcggtggacgatatcagcttcagcatcgccgccggccaaacgctcggtctggtcggcgaatccggctccgacaaaaccaccaccggccggctggtggtccgtctgatcgagccgaaaggcgaaaccatccgcttcaacgggcaggacctgctgtcgcttgaccgacggcgctga

SEQ ID NO: 174693 - DNA, 354 bp, Arabidopsis thaliana landsberg
gcggtgcttgacgtgatccgcgaggaaggcctgcaacagcgctcggaacagctcggcaactacctgcgcgaaggcttccagcgcctggcccggcgccacgagctgatcggcaacgtgcgcggcgccgggctgttcctcggcgtcgagctggtcgccgaccgcgccagcaaggccccggccgccgcgcagacgcgccgagtggtcaacgccatgcgcgagcgcggcgtgctgatcagcgccgccggcccgcaggagaacatcctcaagatccgcccgctgctggccttcgaacaggaacacgccgacctgataatagacaccctggacgccgccctggccgaaaccgccggctga

SEQ ID NO: 174694 - DNA, 102 bp, Arabidopsis thaliana landsberg
gaagtattacaagcaactcggaatcagctggagagagagctttctttggatgatattcatcggattcaagatcttcctgcctacaatctcttgttccaatag

SEQ ID NO: 174695 - DNA, 496 bp, Arabidopsis thaliana landsberg
atgactacgcccagcttcgtcaccggcgccaccgagccgcccctgcgcaccgaaaccatcggccaggcgctcgaatatgcggcccgcacctggcccgaccaagaggccctggtttcggtgcaccagggcgtgcgcctgacttacgcgcaactgaatgagcgtgccgaccgcattggcgccgggctgctggcgctggggctgaagcgcggcgaccgcgtgggcatctggtcgcccaacaaggccgagtgggcgctgattcagttcgccaccgccaaggccggcatgatcctggtcaacatcaaccccgcctaccgcagcagcgaactcgaatacaccttgaacaaggtgcagatcagcgccctggtcgcggccgagagcttcaagtccagcgactacgtggccatcgtcgagacgctgctgcccgagatggcccgccacagcgggccgctgcaggccgccgcagacaagcatctgcggcacctgatcaagataggcg

SEQ ID NO: 174696 - DNA, 1389 bp, Arabidopsis thaliana landsberg
atgggaaaccaaacaagcaaaaagtcacaagagacatcggtttttagcgtgcactacacaacggagctgagatcctacgcggctgcgtgcaaagcagacacggagcttcaatctttcgacacgtgtttgcaagcacggacgagtcacgtgataagcacgctagctacgggggttgaggttcgagcgctctcgttcgattccttgaaagaagtgacgcaatgcttgttggagatgaaccaagaagtggtgaaagtgatattggattgcaagaaagacatttggaagaatcaagaaatgtttgagcttgtcgaagattactttgagaatagcttgaagacacttgatttctgtgctgctttggagaaaggcttgagacgagctcgtgatagtcatcttttgattcttgttgctcttcaacagtttgaagatgagagccttgtccaaggtatgacttttatttctttcttgattttcatggttttaattagggatgggagttatacccaacaaaataaatttatagggatgggagaaataaagtttcatcttgtcttgttttatgaaaatgcatttttcagttgaaatttctaatttcaaatcctgttttaaaataggagtaatattaatcattagtagtaacgaggcattatatataattcatcctaattatttaattttttgactttaacactcttttttgggttggcaggtgggaacggatacaagaagacacttgaagagctaaagaatttcaaagacgcagagagtcctttcaacgaagacttcttcaaaatgttccaatctgtttacaaacagcagatgctgatgctcgagaagcttcagcatcgtaaaaacaagcttgacaagaagcttaaatgcatccacacatggagaaaactctccagcatcatcttcgtggctacctttgccactgtgctcatctgctctgttgtggctgcagccatggcagctcctcctgtggctgcggctctcgctgcagctacagccgtgcctctaggctcaatggggaaatggattgactcgctgtggaagaattatgagaatgcactcaaagggcaaaaagaggtgatcagttcgatgcaggcaggaacatttgtggcggttaaagatttggataatatccgagttttgatcgaacggttggagattgagatcacggggatggtgaagagtgcggagttcgctgtggaacataacgcggtcaagattgggatcgatgatataaagaagaagcttgaggtgtttaagaagaatgttgaagaactggggactcaagcagatttgtgtagcagagatataagaagggcaaggactgtgattcttcagaggatcatcaagcaccctaataatgctagtagtagcacttga

SEQ ID NO: 174697 - DNA, 489 bp, Arabidopsis thaliana landsberg
atgctctacgtggaggacatcggcgaggtggtggacggtttgcccgtttacccgtcctttgtcagccgcctggccttcgggccgtcggacgcgcgcgccgcggccgatgccacgcgcggcgagctggcggcggtgaccatcgcggtggccaagaaacccaacgtcaacgcggtggtggtggccgattcgatccttgcgatgatcgagcagatgcgcgcgcagtacgtgccggccggcgtggaggtggtggccacccgcaacgacggtgtggaagccgaccacacggtggacaagctgctgttcgacctggcggtggcggtcagcgcggtgatgctggtgctgatccccttcctgggcctgcggcaggcgctgatcgtgtgcatctcggtgccgctggtgctgagcctgacggtggcggtggactacgtcaccggcgtgaccatcaaccgcatttcgttgttcgcgctgatcctggcgctgggcatgctg

SEQ ID NO: 174698 - DNA, 267 bp, Arabidopsis thaliana landsberg
ggcggcgagaagcgaacaggcgcccgccacccgaacgccgacccacagaaggagcagaggcgcccaaaggcacgggtcgatggcgaagaccgcacagcggaagcgtgcggcggaccgccccgaagaataaataccacccaccggcggaaagaaaacaaggcaaacgaccgaacagcgcaacaaacaataggcagccgggacgtaaccgtgaagccaaacaagcacgccaaacgccgacataagactggagaaaaacggaaaccctaa

SEQ ID NO: 174699 - DNA, 171 bp, Arabidopsis thaliana landsberg
gaactggatgataaaaagactattgttgttagcggccaccatgggaatcttcacatcgatggcttgagattgatcatcgatgaaggtggtgcatataccgatacacctttggctgcaattgttcttccttctaagaagattatccgcgacaccgataatttttccaattaa

SEQ ID NO: 174700 - DNA, 300 bp, Arabidopsis thaliana landsberg
gccggcgaggacacccgcaacgtggcgcgcatgtcggcgctgctgtccgggctgccgaccgaggtgcccggcgtcaccgtcaaccgactgtgcgcgtcgggactgaaggcgatcggccaggccgcgcgggcgatcgcttgcggcgagtccgacctggtgatcgccggcggcgtggagagcatgacccgcgcgccctacgtgctgggcaaggccgacggtccattcacgcgcaaccagcagctggaagacaccacgctgggctggcgcctgatcaacccgcgcatgcgcgccggctacggc

SEQ ID NO: 174701 - DNA, 94 bp, Arabidopsis thaliana landsberg
atgtgtgaagaagacataagagaagaagaagaaggaatcataccggagatagagacagagctagtagatggacagagaacaatgaccgaaccgg

SEQ ID NO: 174702 - DNA, 363 bp, Arabidopsis thaliana landsberg
atggctgcgatcagtgtcgaaccttgcacctttgccctgtttggcgccctcggcgacctggcattgcgcaagctgtttcctgcgctctaccagctcgaccgggccaacctgttgcacccggaaacccgcctgctggcgctggcccgcgaggccggtagcgcgcagggccacctggacagcatcgaagcgcacctgcgccggcatgtgcccgaggccgatatcgagcccgccgcgctgggccgcttcctcgccaggctgagctaccagcacctggacttcctccagcccgagggctaccaggccctggccgagcagatgccgggcgagctgccgctgatcgcctacttcgccaccgctgcggcg

SEQ ID NO: 174703 - DNA, 313 bp, Arabidopsis thaliana landsberg
atgctggagatctcgaccctgccatgggtcagcggcttaagttggatcacggacgacggacatggcacatatgtctacaagggcagccaccgggcggatttcgagttccagagcttccatttgtcgctatataccaaatggccgcagacgccggcgttgacgatacacgtcaagctgctgacgcagatcgtcggggaattctatgaggcgaagcgacgcgaggaaccgatgcgtcaatcggcttacatgcaagcggtctccgagactggggcgcgcctgacacaagatatcaagaacctgatccagtcgatga

SEQ ID NO: 174704 - DNA, 147 bp, Arabidopsis thaliana landsberg
ttgatggatgagaccaaatggtataattttgatgacagccgtgtttcagctgtaaatgaatccgagatcaagacttcggctgcttacgttttgttctatcaaagagtgaaaagtgattcagagacatcggatatgaaaatggattag

SEQ ID NO: 174705 - DNA, 432 bp, Arabidopsis thaliana landsberg
accgatgtgaaacttatccataaaatagaagaggaagttggaaaaaagatggaaccatacaacaaaaaagtaatcactgacagtttagaagtcacaaaggtaagattcgctgcgttatacatcaaagttctgatcaaatactgagtcataccagctgcttcgccatggtgtctaggttctagtacacctgggtatttaagaagagtaagatcagttattggctgcgagttatatcctgacatgtttaactgatccaaacttcgaaatctatatctgcaggtctcaaaagccaaaagagtggcaatgatgaagatgctagataatggattcgaagacaaggttaaagaccggaggaaattgaaacggaaaacacttgcggataaagggttgcttaagaaacggagcaaaaggcagaaatcaacagaaaattga

SEQ ID NO: 174706 - DNA, 397 bp, Arabidopsis thaliana landsberg
atgcctcaactccaccagacgatcctggcggcgctcgcgctcgccatcctgggcgggctcgcgttcgctctggtcatggccaccgtgccggacgggaacctgcagctcctcgggaccatcgtcggcgccatcgcctcggcgctggtgatcggcggggccgccgtggtgcgggacaagaagccgccgggggatcagccgtgacccccgccgaagacgccctgcacgccgggatcatcgtcctgctcctggtggggatcgcgctgcccctggcgctgaccgccctgatcctgaccctggacaagcggcggtgagcccggacgagcggttcgcccgctgcgtggcgctggtgctgagcagcgacattgagggcggcttcgtccagaacagccgccgatag

SEQ ID NO: 174707 - DNA, 179 bp, Arabidopsis thaliana landsberg
tgtttttggaaaaaccttatgctataatccaagcagcaattcgaatttatggacaatttttggcgccactcataaaccatgtaatggcaagctacctgaagcttctaagcaatatggccgaattcttcttattggtcgtcaaaattatcatcaaaattcgaaacctcttcttcaaatag

SEQ ID NO: 174708 - DNA, 128 bp, Arabidopsis thaliana landsberg
gtgctacccccatagccataaacgaactaatttctgaagagggtctcactggtgaccagatccgtagccacttacaagtcttgcgggatcgtcaaaaggctattgcagacaaattagccttggagtga

SEQ ID NO: 174709 - DNA, 308 bp, Arabidopsis thaliana landsberg
gaagacggtggcagattctaattcgccgttgcaagagaaagcgcttgatgcattgattgcgtttttgcgagcagccgattcagatgctggaaggtatggtgttgtttatttttattgctttagaaatgggcagagtggagtgttcgtttgcatgtgaataattagtttgtttctgcttttgaaggtatgcaaaggaagtttgcgatgctattgcgctcaaatgccttacgggtcggaagaatactgtggacaaggcgcaggctgctttcttgctttgggtagaattagaggccgtcgatgtttttctg

SEQ ID NO: 174710 - DNA, 170 bp, Arabidopsis thaliana landsberg
gttctgaccggatcgacgagataaaccgggttacaacccggttgcaatttggatcaaagctaaaaagagatggcttcggttgtgtcatggacgacgatggtgatcggagaggggctttggtggtgttggggccgaaggttgaggtcgaagaaggttctgtccgtttttaa

SEQ ID NO: 174711 - DNA, 282 bp, Arabidopsis thaliana landsberg
atggtcgccgtcctgggcgagctcggcgtcgtcgccgccggtgatgatgtgcacggcggcgcggccgccgctgatatggtccagcgtggcgagctggcgtgccgcgacggtcggcgccgtgaagccgggccgatgcgcgatcatcagcttgaggtcgcgggtcaccgccgcgacatgctggccgaccaggatgctctccggcgaggtggaatggaaggcgagcaggacgcggtcgaagccgccatagtcctgcgccttggcgagagcctcgacatagttcag

SEQ ID NO: 174712 - DNA, 252 bp, Arabidopsis thaliana landsberg
atggatacaccacggactgcttacgccgttaatgccccgaatccggcttctgaagttgccggagaaactacggcggccctctcagctgcttcgattgctttccgatcatcggatccaggatactctcaaacattgctccaaaatgctgtcaaaacttttcagttcgctgatatgtatcgcggtgcttatagcagcaatgacgatatcaaaaatgatgtgtgtcctttctactgcgatttcaacggatttcag

SEQ ID NO: 174713 - DNA, 224 bp, Arabidopsis thaliana landsberg
atgcaaaccgtgcagagtgaactagacctatcgtacaagcagcgttaccaagatgtctcaattccagaggcttacgaacgccttattcttgacacgtaagaatctagtaacaatagttctgtatatcaaaaccttcattcatctcattagttgacccttattgtgtatctctctgcagaatcagaggcgaccaacaacactttgttcgcagagacgaattaaag

SEQ ID NO: 174714 - DNA, 177 bp, Arabidopsis thaliana landsberg
gtggatatagaactgccagaggatttgccattgaaagaagctcatgcgattggtgaatcattgcaaataaagcttgaagaacttcctgaggtggaaagagcttttgttcatctagattttgagtgtcatcacaagcctgaacattccgtcctttctacaatccccaacgatttatga

SEQ ID NO: 174715 - DNA, 319 bp, Arabidopsis thaliana landsberg
ggacgaaggtcttgatgaagatgattatttgcttctacaagataacaacgtcaaattcaaaaaggttagtcatatttgtgtatataacaatacatcaggattttgtagatacactaaaaatatatgtgcagtactaatacatttgacttttttcttgaaccatgacagaggcagtataagcggttgaagaaagctcaaagggaacagggaaatggccagggagaatcatccgatgatgagtctgatagtagaggtggaactaggagaagtgctgaggataagatcaaagacaggctgtttgatgatgttgatgttgatg

SEQ ID NO: 174716 - DNA, 120 bp, Arabidopsis thaliana landsberg
catatcgtaaagctgctggagggagaatccattccttggactgaagaagatggcggcctcgtgataatgattcgggttgatgagattgaccccaagaaattgagttttgccaagaaataa

SEQ ID NO: 174717 - DNA, 420 bp, Arabidopsis thaliana landsberg
atgatccgccacgcacggctgaagccctaccgcaagaaccgccggccggggaatcggcccatgacgcaggccgagtccgcgcacgtcacagaggccaagctgggcccgtgcatcccctgcctggcgtggtcgctggccggcaacatgccgctgtcgagcgtggtggtgggggtgtcctacgaccacagcaagcgcggcaacctgcggatggggcacctgacgggtttcggctcctgcggctggcaccactacggcaaccagcgccagatggagccgggctggaccacggcgacgcgccgcgcgcactacggccccagccgcatggacggctcccggctgttccacgccaccaacggccccaaggaccccctgcaggcgttgcaggcgcgaatgctggcaaaggagttccccggcctgacc

SEQ ID NO: 174718 - DNA, 135 bp, Arabidopsis thaliana landsberg
atgaacaacagttttcgaaataaaattcatgaacagtcgaaagaaaatttatctgatgaccggcacaagaaatctgataggaccctaatcgtgtttaaccggaaaaccccgctctatttttatttttttgagcaa

SEQ ID NO: 174719 - DNA, 488 bp, Arabidopsis thaliana landsberg
gtgctacttaagcctattgtatcacagcttgttgttgaacctccatcttctttaaaggagcacccacatgtaccatctgtggatgaggttgatgatttattggtttcatgcatcggtcaaatggcagtagcctcaggctctgacctcctctggaaaccgctgaaccacgaggtaacaacataatctcaagaaagcgagtctcagctatctttgatagacttcaatttttttaactgacataaaatcatattggtcaggtgctaatgcaaacgaggagtgagagtgtacggtcaaggatgttgagtttgagaagtgtgaaacagatgctggataatctgaaagaagagtatcttgtgttgcttgctgaaaccattccattcttggctgagctactagaagacgtcgagctatctgttaaatctttggctcaagatattatcaaacaaatggaagagatgagcggtgaaagtctggcggaatacctctga

SEQ ID NO: 174720 - DNA, 66 bp, Arabidopsis thaliana landsberg
atgcaggcgatcaatcgagaaagggtgtacgagatgggatcccggacgagtttcctgcttgaagag

SEQ ID NO: 174721 - DNA, 199 bp, Arabidopsis thaliana landsberg
atggcgacggagacgaacgagaatctgataaactccttcatcgagatcacttcttcatcaagagaagaagctaatttcttcctcgaaagtcacacttggaatctagacgctgccgtttcaactttcctcgataacgatgccgccgcagccgccgaaccaaaccctaccggaccacccccaccttctcctactattgccg

SEQ ID NO: 174722 - DNA, 519 bp, Arabidopsis thaliana landsberg
atgagcccggaaaccaagaagaaggcgctcgagaagtggtccctgttcctgcccaagatcggctatccggacaagggcgagtggcgcgactggtcgggtctttcgatccagccgggcaactggtacgccaatctcgaggccgccagcaagtacaactaccactacgacatcgacaagatcggcaaggcgacggaccgcaaggaatggttcatgacgccgcagacgatcaacgcgtactacgacccatccaccaacaccatcaacttcccggccgccatcctgcagccgccgttcttctacgccaagggcgacgacgcggtgaactacggcggcatcggtttcgtgatcggccacgaatccagccacggtttcgacgaccagggcagccagttcgacggccacggcaaccgcgtgaactggtggacgccacaggacaagaaggcgttcgacgcgcgcgccgacgcgctggtcaagcagtacgacagctacgcgccgatcgcgggcaagcctgacctgcac

SEQ ID NO: 174723 - DNA, 449 bp, Arabidopsis thaliana landsberg
gttattgattcctacgttgctgatcagagagttggctacgcagagccagcttcaggagtggagctttacctttgcccaacacgtggggagactctagatttgctaaacaaagtcatctctcaagaacagctcgatgaggtcaagtctttggatattggattggttggagttgttgtgtggagacgagccgtcgttcccaagcccggttccggttcaaaacgtcagcattctttttcttcttctattggttctaaaacctctgttttgcctgtaaacaagaagcagagagtgcatgttacagagaaacctcttgttgttgcatcaatgagaaatcaccatcatggttatgtgaaacatgatactgctgctgatgatgatgtgccgcctggatttggtcctgtggcttcaagagacgaagatgatttaccggaatttaactttaatccctg

SEQ ID NO: 174724 - DNA, 100 bp, Arabidopsis thaliana landsberg
gaaaaacatcaagaaggagaccctgaacttgtggaagatgctgagttctataggcagttactaaaagagtttcttgagaacatcgatccagcttactcag

SEQ ID NO: 174725 - DNA, 788 bp, Arabidopsis thaliana landsberg
atgttcttgatcaaccggtttaaggtacagtttctttctcctttgggattctcttcttttcttctctagaggactttgagctgacagaatgtgataacattatgattctgtagacggcaatacgagaagccgtggttcttcccaactgtgaaagcctaacgattccttggatgattgctgaaaaagatgattgggttcaacgcaaagccgctccattcatgtggctgaatcaagaaaacgatcacaatacctcccatgcaacagaagcgagatctaaatctgacaagccaccgacttcgttctcatgtcttcaagctgagcaaatgcagagaactgcaaacgccacccagaagattatttctgaaatagggacattggcttcttcctcctgtgctcagtctgagcaagtgcagaaagcggccactgctttccaaaaaccgaatattgaagcagaggctattatgtctacgccattgtcaaactccacaactgtaacaatagagaatgataaatccttggaagaactgaaaactccactactggtacccagcagcagtaacaagcaggagacgaactcaagagggagtaccagagaggtttctgctgttcagtcaccatctaggtctgtagcttcaagcgaagaagatgattcaagggggaaaaaacagggaagaagagcaagaatgttggatcttgggaagaaaatgggggagaaattggaggagaagaggcgtcacatggaggagaagagtagacagattgttgaaaagatgagaggaccttcttaa

SEQ ID NO: 174726 - DNA, 294 bp, Arabidopsis thaliana landsberg
atgagcgccccgccggttaccggccgcccgctatcggggcggctgaccccgccccggctgaccctggcccggatctggccctggacggcggcggtcgccctgtggctgatcgcctgcggcgtctccggcagcttctcgttccggctgctgctggtcagcctgaccctggccgtgttcatgggcctggccggactgggccagatggtcgtgctggccagcggggacggctccttcgacctgtcgctgccctacacgatcacgctcgcgggctacatctccgcgggcgccatcgac

SEQ ID NO: 174727 - DNA, 513 bp, Arabidopsis thaliana landsberg
  unsure (1)..(513): unsure at all n locations
atggattattatgtccaactgttggcccaacgcgccggcatccgggacgagcgggcgctggtcaccggccgtgaccgcaccgaaaaagaggtctatgccgacccgaccgggccgcgcggcgacatctacaccaagggcagcctggtcctgcacaccnnnnnnnnnnnnnnnnnnnnnnnnnnnnnnnacgaatcgctgcgccgcgaggtctatggccggcccgatccgaaaccgggcaacttctcgccacgcttcggcacgacgaaagagttcatcggcatcgtcaactcggtgaccggcaaggattatggctggttcttcgacgtctacctctatcgcgccgccctgccgaaactggtgacggagcgaacggatgacagcctgaaactgcgctggcaaacgccggacaacctccccttccccatgccggtcgaggtgctggtgggcgacaaggtggtcactgtgccgatgaccggcaatcagggcgaaatcgccgtgccggccgacgccacg

SEQ ID NO: 174728 - DNA, 644 bp, Arabidopsis thaliana landsberg
cgatctcggctatccgggcttcgacggctatgcgtcgcacaagcggctcaagcacgccgatctcgatgcgccgatgtacgagaagtcgaagatcagcggccattcgttcacgctcaactggaacctcgacgacgtcaacacgttcaagtcgatcaccggctatcgcaagctgagctgggacgattcgctcgatctcgacggctcgccgtacgacatcgcgttcacgcagcgcttcaccaagtaccaccagatctcgcaggacctgcagtggctcggtcataccgaacagctgaactgggtcggcggcctgtattacttcggcgacaacggcggcaccaacaatccgcagcatttcttcagcggcgcggcgaactacgattcgagctattcgaccaagacgcatgccggctcggtgtacggacaggtcgactacaagccgatcgatccgctgacgctgaccgccggcctgcgctacacgcaggaaaagaaggaactgagccgcaccttcggtttcgtcggcagcgatccgtacctgatcccggccggcaccggcgccgaaaagaccttccacgcgacgacgccgatggcctcgatcgcctggcagttcacgccggacctcaacacctatttccgctacgccgaag

SEQ ID NO: 174729 - DNA, 615 bp, Arabidopsis thaliana landsberg
atgcgccgcgagttcaagctgcttgcacccaaatattcgccgaaatatgcagtggtgcaggaaaacaccaaaacggaacgcaaacgtctcatcgagaagatcaaattccctatgatcgtgaagcctgcgaacctcgcgcagagcctcctcgtgaccatttgctatcacgaggaggatctcgaacgctcgctttcatccgcgtatcggcagatcaggaagatatacaaggagaatagccgtgctgaagcaccgaagctcatggtcgaggaatacatggaaggcgatatgtattccgtcgatgcatacgtgaacagtattggaagcctctacttctgtccgatggtgaaggtggtgaccggcaagaacatcggccacgatgatttctataactatctccatctttctccgactggtctgaagaaggagaccatcgagcgcgcacacgaggccgctgccgcaggcattcatgcactcggtcttcggagtacgaccgcgcacgtcgaactcatgaagatcgatgatgaatggaaattgatcgagatcggaccgcgtgtcggaggttttcggcacatgctccatcagctctcctgtgatatcgaccattcgctgaatgac

SEQ ID NO: 174730 - DNA, 136 bp, Arabidopsis thaliana landsberg
gatacacaaggaacatgttgagaaatggcaggacgagatcaaggagttgcgtttgcttgatgcatcaaacgaggagactacttccctcttacacaacgctcgctatctgattcagaatcctagcattgagcaatga

SEQ ID NO: 174731 - DNA, 157 bp, Arabidopsis thaliana landsberg
atgaacgtcagatatgattccgatataacccaaaaagtctacgctacaacagagcagcggtctagtctaacgcaaaatccgtttcgtcgtcttcctcgcttttcctttcaatctcctccttctccattaatcatctctttctctctctcacgcattc

SEQ ID NO: 174732 - DNA, 351 bp, Arabidopsis thaliana landsberg
atggtcgtctacagaaatggtatcaaggaaatcccaagatcgttcaatttccgcaaaggatttctggatattgcaaactcattcatcaagccaaagcccctgaaagaggactcaatccagtatatttatgataccatcgaacaggatttcaaggacttaccggaagcccgtgctcttgttgcacggtgtgcgattgacgcctataaggtcgacgaggaaggctatgccagaggtgtcgcagaaacagtaaaggcattttggcagatttgtgaggagggtgatgccaggacgtgggagctttttgttgagaacatggaagcggagtaccacaagactcaagaagaaaacttg

SEQ ID NO: 174733 - DNA, 205 bp, Arabidopsis thaliana landsberg
cccaaaagcagtacagaaacctgcaatacaagagagtaaacgcagtcaatatgtcacatataatggacgaacacacattgctttatctgtcattgacaatcaaaagatagataaaccagtgaccaatcgatatcaaccgatacccgaaagcagcccaacacaaaaggaatctagaacaaaactcactttaacgacatctcaataa

SEQ ID NO: 174734 - DNA, 339 bp, Arabidopsis thaliana landsberg
atgcgctaccgcctgcacccgccgctgtttcgcgcgctcggccgcgacgagaagatcgcctgcggcccctggctgcgcccggtgctgcgcggcctggctcggggcaagcgcctgcgcggcaccccgctcgacccgttcggccgcaccgaggtccgccgggtcgaacgcgagctactcgcctcctacacggtgatgaccagccgcctcaccgccggcctgaccgaggcgacgtacgacaccgccgtcgccgccgccgaggccgccgacctcgtccgcggctacgaggacgtcaaactccgcacgatcgcccgctaccacgcccgcctggccgaactgggg

SEQ ID NO: 174735 - DNA, 408 bp, Arabidopsis thaliana landsberg
atgatcgaaccccgacacggcctgatcgccggcgcgctgttggccacgctgctgacgggcctgttgtcggcctgcggcgatcagcggcagtcgcagttccagggctatgtcgaaggcgaattcgtctacgtcgcctcgtcgcaggccggccggctcgagcggctggcggtgcagcgaggcgacgaggtgcacgccggggcgctgctgttcgcgctcgaggcgacgccggagcgggcggcgcaacagcaggcggcgcggcagctcgcggtcgcgcaggcgcaatacgccgatctgcagaccggcaaacgcgcgccggaagtggcggtggttcgcgcgcagctcgtccaggcgcaggcgaacgcgcgcaatgccgccgagcgcctgcggcgcgacgaggcgcagcttgcg

SEQ ID NO: 174736 - DNA, 457 bp, Arabidopsis thaliana landsberg
atgtacacgctgatcgcgctgggtaccggcgtggcgtgggtgtcaagcaccgtggcttttctcgcgccgggcgtgttcccagccagcttccgggacatgcacggccgcgtgacggtgtacttcgaatcggcggcggtgattgtgacgctggtgatgctgggcgacttcctcgaactgcgcgcgcgccggcgcaccggcgaggcgctgaaggcgctgctcgggctggcgcccaagatcgcgcatcgggtcgatgccgacggccgcgaggctgacgtttcgctggataaggtgcagcccggcgacacgctgcgcgtgaggccgggcgagaaggtgccggtggacggcgtggtgctcgacggcgagagccacgtccacgaggccatgctcactggcgagccgatgccggtggccaaggcggccggcgatgcgctcaccggcggcacggtcaaccaggacg

SEQ ID NO: 174737 - DNA, 420 bp, Arabidopsis thaliana landsberg
atgcaggcggggccgccgtcgccgaacaagctcatccagacgatctcggtgcagatccctaacgtctcggggaacctcaccaccgcccagaccaacgccgtcgggacgctccgggccgacctgtcctcgctcgtgtcgggcacggacctcaaggcgggcgtgacggggacggtgcccgaggacgtcgactcggcgtcgacgggcaacagcgcgcagaagatcgtcttcataggcaccatcttgctcatcgtcgtgctgctgctcatcatcttccgcagccccatcatcgtgctgctcccgctgctcacgatcggcctggtctcctcggtcgccaacgggctcatcgacttcctgagcaaggcgctcggctggagcgccgagagcttcacgtccatcttgctcatcgtcgtgctgttcggg

SEQ ID NO: 174738 - DNA, 380 bp, Arabidopsis thaliana landsberg
tgctcggcggcgtgagcctggtcgataccgatgcgtccggtcatgtcgccatcggcgcacccaagacccaggccaacgtcggcctgcaatggctcgtcccgtccagccccggcctcgccctcgacggccgcgtgatttataccagtgaacaatacgccgacgccgtctacactcagaccgtccccgcctggactcgcctcgacctcggcgccagttatcaagtcaaactcgccggccagcgcgcgctcacccttcgcctgcgtatggaaaacgcggccgaccgcgactactgggcctccgccgggggttatcccggcgccggctacctcaccggcggggccccgcgcaccctgctcttatccgccagcctgaacttctga

SEQ ID NO: 174739 - DNA, 288 bp, Arabidopsis thaliana landsberg
cctttgccaatttcatctgaaaataaggagagtgaacgaagacttgcacaacactgtgactccaatccgttggatcatcatgactctcttcgagttttcatgaggaaagctcgttttggtggtgttggtggtggtagtcgtggtggtggtcgtagccaccgtcgtgtccccagtagtggtcatggtgcgggtggatcatccgctactagtcgaccttgtctctcgatggcattgcgctacggttccacggtcgcgagctcaattctgttgatgttcttcgccttctaa

SEQ ID NO: 174740 - DNA, 278 bp, Arabidopsis thaliana landsberg
ggtttagtaatggatcagtatacgtgcgttcttcttccaatgatcaaattccaagaaggtttatctaccttggagatggaggaggtgacttttgcccgacattgaagctgagagagtgtgattttgtgatgccgagaacgaattatccgctatggaagaagatctcagacaatcccttactgatcaaagcagaagtcaaggaatggagtagtgcagaggaacaacagagaatcctgctgcaacttgtcagcacaataacaaaagaagaagattcataa

SEQ ID NO: 174741 - DNA, 297 bp, Arabidopsis thaliana landsberg
accggggccgggggcaatgtcgatgcttccaacaacagcacgttcggggctgatgcgttggtagcgaacgccacgctgtccaattacgtcagcggggtgcacgtcagcttcggctcgacggcgggggagcaaggctcgcccgacaacagcctgacgaccggcgacaatgccttccagaacttcgccggcatgcaggccatcaacctgaacaccggggcggctgcatcgcaatcgtccaacgtcagcgtcgcgatcggcatgaacaatgtcgatctcggcggcggctacagccactga

SEQ ID NO: 174742 - DNA, 149 bp, Arabidopsis thaliana landsberg
gttttgaattgggaatcatttgcgatttttataccggagaaagatatcccgaatttgaagaagattctgatgtcgataccggaaagccggtaccggtcaatgcagatgagagtgaagaaagttcaaaagcattttctgtggcatgctaa

SEQ ID NO: 174743 - DNA, 568 bp, Arabidopsis thaliana landsberg
actcaagtttgatccccgagctcgtgcctgtgcctttcttggctatccttctggatttaaaggctataaattgttggatcttgaaaccaatgatattattatttctagacatgttgtctttcatgaagagctcttcccttttgctaaatcagacttatctcaggaatctcaacatttttttcctgatctggttagcatttctcctatgcctcatcctgtatctgatgcagatgcttccacatcttcatcttccattgatattatgccttctgctaatattcaaaatgatgtccctgaaccttctgttcaaacatcgcataggagaacacgaaagcctgcttatcttcaagattactactgtcattcagtagcttcttcaaccattcatgatatttcccagtttctctcttatgaaaaagtttctccactttaccattctttcttggtttgtattgacaaagctaaagaaccctcaacctacaatgaagcgaaagaatttcttgtgtggtgtggtgctatggatgatgaaattggtgcaatggagactactcacacttgggaaatctga

SEQ ID NO: 174744 - DNA, 141 bp, Arabidopsis thaliana landsberg
atggctgcaaatcttggcatcaccaaccttgctgatatcattcaagacgaattagaagatccacgtcaagactgtccactcctgggacacaatacacgcaatacactggtgaaaccattcaagatactggccgatgaggat

SEQ ID NO: 174745 - DNA, 49 bp, Arabidopsis thaliana landsberg
atgccaaaccgtgaatactcccctgaagccacagagcatgaacacctag

SEQ ID NO: 174746 - DNA, 228 bp, Arabidopsis thaliana landsberg
atgcccgccaatgcgcgcgcggcgatcgacctgacggtcggggacggctcgcatattttcaacaatagcgtgagcaattcgggctatatcggcatccggtttttccgcaacgcggcagtctcgaataacacggtcgataccgcctgcgtcgtactcaccgattgcggcgggctgttcacctccgcgcccgacaagctcgcgctcaacacgcacatcgagggcaacacg

SEQ ID NO: 174747 - DNA, 200 bp, Arabidopsis thaliana landsberg
atgcgcccgatcggactggcgctggaagcgctcggcagcgcgatccgcacgcgcgaattgctcgacgaaacgcgcgcacaggccgaggaactgcaggcgtcggcggaagcgctgcgcatgcagcaggaggaactgcgcactgccaacgaagcgctgaaaacaagaacctcgcgctcgaagatcagggccggcggctgcgc

SEQ ID NO: 174748 - DNA, 1534 bp, Arabidopsis thaliana landsberg
atgaccggaatgagaggtctctccgtatttatcagcgacgttcgtaattgtcagaacaaggaagcggagagactacgagttgataaggagctcggaaacattcgtacatgcttcaagaatgagaaggttactctcaattatctccatttttgtttgcctgtgttttattctcattttgagtggtaattcagtgacggagtagtatctgccgaggttctgtattgattagatatattggagatttctccatgaagctacctattcctctgaggttgattagggagttatataagaatgtagttgaaagaaagatgcaatcactggccgaatattttattaggaaagccagagttgccgagtggatagttttggaagcctgtagtttcttattttatcggattcaggctataaatttttgatataacactaagtgtgtacctggacaggcagtattgtatagctagctcagatcggtagagattagccattattctaccctttgtaacatcactagtactgctttcaactttggaatgtcattactgcatttaaagtccatagatgggagaagatcaatcaagatatataagacactaaatatatgatgatatttaggaactagaagaaaagaatggcctggcagtaaattcggttatgtagtgatggtctaaggaaagaaatacagatcacggaaaattttgaaaagctcattacgaaatacattaagctttgttgctgtaagaagttctggagagataatctggttccatactctacgtagtagagctgtagccggcctgtagtggatccatgtgtggccagttggaccaacaccaaacttattttaaaatgttagaaataaattaatcatgcactcttactttaacttgttttatgttttcaggtcttaacaccatacaaaaagaagaaatatgtctggaaaatgctttatatacatatgctaggctacgatgtggattttggccatatggaggcagtttctcttatatctgcgccaaagtatccagaaaagcaggtaagccaacgttttgtaaccaatgaaatattgctttctaagggtaggagaagataataggtgtgtgtgtggtgggggtggggtatttgtttgattcaagtctagtgagcaagctgaaacaaaaaaaaaaatctctgaagataatggatgctggatttagatactatttcacaagcttgcaacttattcagtttgaatggacctggtaaagtactggaggcatttacttagacgcataagttacttagtaacatcgtagcaaatcttaaccaggaaccatgcattgtatccaagggtttgtatttgcagtttgtattattttatgctcactaccaaatttgcaggtattgaacttttcatccataatttcaggttggctacattgttacatcttgcttgctcaatgagaaccatgactttttgaagttggctataaatacagtgcggaacgatattattggtcggaatgagactttccaatgcttagcactgaccttg

SEQ ID NO: 174749 - DNA, 124 bp, Arabidopsis thaliana landsberg
ggctacgaaaacgattggtgatgataagaaaagctatggattggctcgtattccgttaaaattacaaattgcaaaaaaggaaaaccaaaacacactaaagccggccgttaaggggaaagcatga

SEQ ID NO: 174750 - DNA, 405 bp, Arabidopsis thaliana landsberg
gaacacctcgctgccgccaccgtccgggtcgaaaccggcgcgaccggctacgaggccatcctcaccccggaagcactggcctttctgggccggctgcatcgcctggccgagccgcgccggcagcagttgctggccgcacgccggcagcgccaggcccgttatgacgccagcgagctgccggacttccgcgctgataccgcggcgatccgcgagggcgactggacggtggcgccgattccggccgcactgcaggaccgtcgcgtcgagatcaccggcccggtcgagcgcaagatgatcatcaacgcgctcaattccggcgccaaggtgttcatggccgacttcgaggattccttgacgccgagcttcgccaaccagctcgacggccagatcaacctgcgcgacgcg

SEQ ID NO: 174751 - DNA, 375 bp, Arabidopsis thaliana landsberg
atggcggatattgccaataccggaaccgaaaccgagcagcccgaaggcgttcagccgaacggcggcgaagcggaggccaaggacaacagcgagttcgacgccgcctggggcgagcttgagcagaaagagaaggccggcaccgacgaggtgccccccgatccagaagccgacaagctcgacaaggttgaaggcgaaccgcaagggtcgagcgaacccgctccccctgctgacgcagccccggcaccggccgctgcgagcgagaatcaaccggacgatccgtggaaggatgctcccgagcaccttcgggccctgcaccagcagaccgtgggcaagctagagcagacaatccgttccaatgccgggcgactctcccac

SEQ ID NO: 174752 - DNA, 355 bp, Arabidopsis thaliana landsberg
atgaacagacggaaaggttcgagcagtaaacagaatgaacagaagcggttggctagagagtccaaagctgtaccggctcctagtgccaatgccgagttactggcatcaatacaggtaatttcttagtctacagatgcatgtgtgtgtttgtgtgtatgtatgcctatgcttctatcttattacttggaatttttccctttcaaagaaacgtctaggggagactaaccggacaagcattagtgagaagtttaatcctgagggagattctggcaatggcttccggatcgaaccactgaagggcaataccgcacaaaatccctacccaatctacacaaacggagacaacgcatcctaa

SEQ ID NO: 174753 - DNA, 105 bp, Arabidopsis thaliana landsberg
atgcggccgatcgctcacgccaaactggccggcctgggcctcgccgagctactggacctggacaccggcgccttcggcatggacgactcggaccggtccaacctg

SEQ ID NO: 174754 - DNA, 254 bp, Arabidopsis thaliana landsberg
gtcgacaacgtgcccggcgtggacaaatgcggccccaagaccgccgccaaatggctggaagactacggctcgctggacgccgtgatggccgccgccgacaccttcaagggcaagatcggcgagcacctgcgcgaggcgctggcctggttgccactgtcgcgcgatctggtgacgatcaagaccgacgtgccgctggaacgcacaccgaccgagctgaccttcgccgcgcccgacaccgacaccctgcgcgagct

SEQ ID NO: 174755 - DNA, 108 bp, Arabidopsis thaliana landsberg
attgctgctgtgttccgcaaatcgttgaggttaactaatgaaggtcgtagaaagtttcaaacaggaaagataaccaacttaatgacgactgatgccgaatctcttcag

SEQ ID NO: 174756 - DNA, 611 bp, Arabidopsis thaliana landsberg
attcaagctggatcaattcagccccttttggaggggaaggatgttctttttgctgccagaactggttctggtaaaactcttgcttttctcattccggctgttgagttgctgtttaaagagcgtttctctcctcgcaacgggactggtgtgattgttatttgccccacaagggaacttgctatccaggtaattttcgtttttattaacttaaggcattttcaacttggtagcaacaaccatgctgtcatttcgagtagatatgtcctgtaattgttgtaatgcgctaggtagatcagatctgtaaggttctcgtttttcttctagctgaatcattgatattgctttgtgtttgtaaagtatgagcatcgttgtatgttattgcggcctcccattctggttttcactttactattttgatattttagactaaaaatgtggcggaggagttactcaagcatcattcacagacagtcagcatggttattggtggcaataacagaaggtcggaagcacaacgcattgccagtggttcaaacttggtgatagcaactcctggtcgtcttcttgaccatcttcagaatacaaaggctttcatttataaacacttgaag

SEQ ID NO: 174757 - DNA, 248 bp, Arabidopsis thaliana landsberg
catataactcggccgttacatgtaaatttgcgcaaaacagtaagagacgcatcatttcgtctaactttatcatcgaacaccaacttcacaagtttttcgtgcgttgtttacgcatctaccacaactctacaccctctttcatcggtgttaaatatgtatttgtgtttctacacccaattaccggaaacaacaattaccggaaccgaatcaaccatatctggagatggatgaaagaaattgaagaataa

SEQ ID NO: 174758 - DNA, 384 bp, Arabidopsis thaliana landsberg
gctaatcaagaaatcagcgaatattggaagaatcatctagagaaaaatgttgaagagcttcgcgaatccaaggaaaggtgcttcgagaaatccttggattgcatgaaaaaattgaaaactagcttcgccaaagtgggtgcctactcttctgaagaaaacttcatacgaggcgaccccgaaggcgtcattgaatggataaatggagaagtcgaagccttcgaagaaattttgagtgattgcggggatgtttacgcgttttccgatgcgcgtggaatttcagccatcttggagaaggctggatgcgatcagattaaagccatggcccagcccgaaaccgccttctccatggatgatacgaaggatacttcagctgaagcaacttga

SEQ ID NO: 174759 - DNA, 159 bp, Arabidopsis thaliana landsberg
ggtcctgttcgtttgcctgtgttcgtttgcttgtctgtgttcgtttgcctgtcgctgacgactgaaaccagcgacaacgaccaaaagttgtttgtttgcatagcgatcaaaagtaacgacaatcgccagcgaccagcgaccgcaatttttggtcgctga

SEQ ID NO: 174760 - DNA, 126 bp, Arabidopsis thaliana landsberg
tccgttagtgccgggaccaatggagacacaatcgtctccggtggagattttagtattgaatatagagacggaggaggaagactgaacgtggataccgtcggtgttggggctgtttccggcagctaa

SEQ ID NO: 174761 - DNA, 146 bp, Arabidopsis thaliana landsberg
atggaggatatacaggaggaagagaacggtacggacgaggaggttctgggatcgagcttgaccatggagaaagtggccgcagcgaatcagtacatcgagaatcactacaaagctcagaacaagaacattcaagagaggaaagagag

SEQ ID NO: 174762 - DNA, 413 bp, Arabidopsis thaliana landsberg
cattcggacagcgtgcaactgcacaaccggtaattgcaaaatccggtgctgcaccggctgctgcaaaaaaatctcaaaatccgtacatgatccggggcaaggtacttgattctgccaaccacacgccattggtttccgccacggtatatgtgcgggaaatcaaagatagtgttgtcgttgccatagggtttacagacgaaaagggtgcttttacactaaaagatattccagcagatgaagcattgaactttatgatcttttataccggataccggcgttataggcgggcattgaacggtgtgaagagagatacgcttaacctgggaaatatttatcttcccatgaacgagcacacactcaatgccgttaccgtagtcggggaaaagccaccaatagcgattaagggagatacg

SEQ ID NO: 174763 - DNA, 303 bp, Arabidopsis thaliana landsberg
gtaaccgtctcagcctcacacgcgccgtcaactcctcctccgtcacattcggtctctccaacaacgactccatcgtcgacacgtttaactccgtcaccgtcgtctgggaacacatcgttacacagagacaaactcaaaccttcgcttggagaccaatgccggaagagaaacgtggcttcacgctccggatcaagaagaaagacaagaacttgatccttgattcttacttggattacatcatggagaaagctaacgagattcgtcggttgaatcaagatcggcttctttacacgaattcacgag

SEQ ID NO: 174764 - DNA, 894 bp, Arabidopsis thaliana landsberg
gaaaaaaggtggctaggttcgcttcagttcgttcagcagcttttcgtgcttctgctgtggcagctcgtgttgcaaaccaaaaatctgccaacactgactgttctacactaatcaactgtcattcttctgggaaaggaaccacacataattctggtctagaaaatagtgttggggaagtagggaatcagcaatctcttaccagtttatttgttgaagagaaaaaggacttaagaacaggaaaaaaaacagcgaggaagcttttcgtagaggatttccctgaagaaaaatttcattctactgattgcaatgtcgatctggggaatttgagttatattggctctcaagaacctggtgaggaatcccaggccagtgctcttaacttggttgataagctcattagtgagtgccgtctagagtttgattttgaagttcaagctgactatggaaggaaaacagaagataaatcaaaatttgttcagatttttaaaggtccacaagaattagcaaagaaggtaagttacaaaagtggagctgttggaaacaatattttcgactgggatgataatcgtgaggatgaaggagggggtgatatctatcgtagaagaaaagatgaattctttggcgttgcaagtaaaagacgggaattttctagcttgcctagagaacagaaaagagaactgataccagttgcagtggataaaagatgggctcgttctgatcccaaactgttgaagcatagtgtgactaggagccgaaagaatatccagggtgctaaaaagaatcttggcaaagagttagatgaagttcgtgaagcggcagttttagggaatgatacacaagtggctgctgaagcgattgatgatctgtgctctggagaccgtggcaaatttgatg

SEQ ID NO: 174765 - DNA, 432 bp, Arabidopsis thaliana landsberg
atggtgatccgcggcgtccgcggcgagcgccgggtcgcggcggaggaattcttcgtctcgttcctgtccaccgacctggccgacgacgagctcctcgtcgcgatcgagttccccgtgaccggcccgcgtgccgggagcgcgttcggcgaggtcgcggcccgcgtgggggacttcgcgatggccggcgcgggcgccgtcgtccgggtcggcccggacgaccgcgtcaccgacgcccggatcgtctgcacctcggtgggggagaggccggtccgggtcaccgccgcggaggacgcgctgcgcggccaggccgccgacgacgcggtgctcgcggaagtggaagcggccgtggccggccagctggacccggggccgcagctgaaggtgtcgaccgggaacaagcgccgcaccgcggccgtgctcgcgcggcgcgcg

SEQ ID NO: 174766 - DNA, 426 bp, Arabidopsis thaliana landsberg
atcaaagaatctgagcaccaaaggagttactacaagtgtgcctacaccaaggaccagaactgtgaagcaaagaagcaggttcaaaagatccaacacaatcctccattgtactcaaccacttacttcggccagcacatatgccagcttcatcaagcttatgcaactttccccattgacacatctgacttcgaagagcacgagggatcccacatgatccgattcggtcaccccaacatcagcttctcctcctccacctctaacctccgccaacatcagaatcatcaggatcgcatcaaagatgaatacatgaaaccggtgatagcagaagattggtctccatcccagtggatgtcgtccgaggttgccctcgccgtggaggctttcgagtttaatcctttctggacatctcacgacttatcatcatga

SEQ ID NO: 174767 - DNA, 633 bp, Arabidopsis thaliana landsberg
atgggcaacacccagcgctttggcgtgccgttcggcttcggcggcccgcacgccgccttcatggcctgccgcgatgcgtacaagcgctcgatgccgggccgcctgatcggcgtctccatcgatagcgagggcaacaaggcctaccgcctcaccctgcagacgcgcgaacagcacatccgccgcgagaaggccaccagcaacatctgcaccgcgcaggtgctgctcgccgtgatggcttcgatgtacgccgtctaccacggcccggaaggcttgatacgcattgcctcgcgcgtggcgcgcctcaccgcgatcctcaaggcgggtctgcagcagctcggcttcaccgcgacccaccacgacagcgcgttcgacacgctgagcctgaagaccggcgatcgcaccgatgccatcgcggcgcgcgccgtggcgatgggcgccaacctgcgcaaggcgtgggacgaatacctgtgcatctcgctggacgaaaccaccacgcgcgccgacatcgaactgctgtggcgcatctttggcggcgacgatgcgaaattgccgagcatcgatgcactggacgccagcgcaccgtcgctgatcccgccggaactgcagcgcacatcgccgttcctcacccatccg

SEQ ID NO: 174768 - DNA, 182 bp, Arabidopsis thaliana landsberg
cgttaaatctggaggaagacgcgttccgcatcttcggcgacaatcttgatttccttgccgaagccgaaaagctcaatgatcccaaacctccgacatgggcgaccaacaacaagatacgcctcgacatggatacgatgcggctgctcgacttcagcgacaccgccgccagcgcggggacgcct

SEQ ID NO: 174769 - DNA, 67 bp, Arabidopsis thaliana landsberg
atggtcacggagctgtgcagcggcggcgagctgttcgatcagatcattgcaaagggccacttcacag

SEQ ID NO: 174770 - DNA, 300 bp, Arabidopsis thaliana landsberg
atggacgaaaatctggataagttttttaatcatccgtggggaactacatcttttttattgacgttgaagagtgttacagcaaggggtgctaataagcttatgcggaaatctgtaacggttcagggattcccacacgcaatccaactattgttccttgaaagtgtgcctcgaattagggaattgcaattccctgaggttgacgaagatgatgactcagagatggaggaaacgcagaaggaaattgagcgtctatggagcttgaagttggatattgtctggaaagtcgataggcagtcccag

SEQ ID NO: 174771 - DNA, 63 bp, Arabidopsis thaliana landsberg
atggaagttcgtgctcgcagaggacaaaagaaggctccagatgaagcaaaccaagtgatccag

SEQ ID NO: 174772 - DNA, 30 bp, Arabidopsis thaliana landsberg
atgaacgaagatgatatcgtaaagttaaag

SEQ ID NO: 174773 - DNA, 164 bp, Arabidopsis thaliana landsberg
ttgaccgagatttgaccaccccatcgatgaaaggctactacctctctcacgttttacgcggcttgatgtgcttcgtaaaggagccaagtgtgaaaatatacaacactaccactcgacaacttgttgtcttacccgacatagaagaatccaacatcatagcttga

SEQ ID NO: 174774 - DNA, 929 bp, Arabidopsis thaliana landsberg
cggttagatgaatcccatgttaacaataaccccgagccagaagatcttggacagcagttccatcaaggtgagtatcttgagacaaaacctttgtgagtatacgacatgttaataacttacatttatccgcttgtcaatttctgtaacattctcagctgatgccgagaatatcacactctttgagtatcatggttcattccagaccaacaatgaaacatatgatcgttttgaaaggtgagctttcaatcccactatctatcttcagtctttaattcccagattttaaaccttctcgaataactgttgaaggtagaagttgtagcgtttcactatttctgtattttctttcatccacctttcagcaaaaagctggtgatgatttgttctattctattctgctttttaatggcatctcagatttgacatcgaaggagatgatgaaacacagatgaactccaatccaagagaaggcgctgaaatacctacaactctcatcccatcaccacctcgtcatcatgacattcccgaaggtagatagttatgtcactcttcccttctataatcgtgacatctggttattgtatggggatatgaatttttgagtcaaagatgaaattgttttcaatttttaaatagtgttaagtttatgaagccaataacaatgacttgggcgagtctcttgtataataatcatgtatgtgacctgggaatgtatttttgttgaagcttctgaatgatatgaacactgagcttcgtgaacagagcagaacaaatttactaatctttagccatctgcaggagtcaaccccacaagccctcagcgccaggagcaacaggagaatcgtagggacggatttgctgagcagatggaggaacaaaacataccggacaaagaggtattttcacttactaggaataccctcatctag

SEQ ID NO: 174775 - DNA, 741 bp, Arabidopsis thaliana landsberg
atgaacgatggttgctgctcaaagtgtcaggttaaagcaacgaagaagaagaaatcgaagaaaaacgaaggtgagttgtttaacctatttgaagatttcttacttttatcttcacaaatcttaaagtttttgcctttatgatgcacagatgagcctgatgaagaggatgtgaaacaaaaacagaaagtttcaaagaatgagaatccgaaaaaagattccaatggggagaaaggatcagatgagaaggataagaagaataagaacgtcctcagatggccacaagactcaagtacaaagaaagagaagggtgatggtaaaaacttgtcaagcgaggaaaatggtggtaaaaacttgccaagcgagaaaaatggtgtgaacccgccgccgccttgttacaccgctcaaccgatgatgtaccatggtggacacaatcctttacaccggtggcccatatccgcagcctcgagaagccattatcccccgttttcgatgggggcaatgcatggaccatatggtggttgtggaccttgtggtggtccaattgatccataccaatccatgcctcgacccagaatgttcgatggtgttcacatttcacaatatccgcctatggctgcagcatatccgtatatggctgcagctggtcctttcccctattggcaaaccagaccgtacatggatgcaaatcctatgaagcgttacactacctatgcagaaaattactcctatttttattcatga

SEQ ID NO: 174776 - DNA, 162 bp, Arabidopsis thaliana landsberg
gctactccaaagaataaaaagggacggtattatggtgttggttctattccaattatcccatctgcttctgtcgatcgacatgctcgggatgattttgttgatcaggagacatatgaagcggaaaagaaacggaacgacaaacttctaaaactacaactctag

SEQ ID NO: 174777 - DNA, 166 bp, Arabidopsis thaliana landsberg
atgacgaactcgctccgcgctctcgcgctggtcacatctctgatcgtgtgctcgctcgctctggcgttcggcacgctgaacctggtcacgcactcaaccgaggccatcggcgagatcaccggcacctactcgctcgaccacaccgaatgctgggatgagccgggac

SEQ ID NO: 174778 - DNA, 69 bp, Arabidopsis thaliana landsberg
atggggtttgtagaaactgcgatcgataaccgagccggttacggcaactcgcgctacctaaacacaaag

SEQ ID NO: 174779 - DNA, 565 bp, Arabidopsis thaliana landsberg
ttacaatgaaaacccaagaagaaaacgtgctaaactcaccaacaacgaagccggttcttcttcgtcttctccaaggcctaaaccggtcacgcaaccggaccctgatgcttcacaaatcgcacgaccatgtactgaatgtggtaaacaattcgggtcactgaaggcactctttggacacatgagatgtcaccctgaacgtcagtggcgtggcatcaaccctccttctaacttcaaacgtaggatcaactcaaacgctgcgtcatcatcctcgagttgggatccatctgaggaagagcataacatagcctcctgtttactaatgatggctaatggtgatgtcccaacccgttcaagtgaagttgaggaacggtttgagtgtgatggttgtaagaaagtgtttgggtcacatcaagcgttaggcggacatagagcagcacataaagacgtcaaaggatgtttcgccaataaaaacataaccgaagatcctcctcctccacctcctcaagagatcgttgatcaagataagggcaagagtgtgaagttggtctcggggatgaatcattga

SEQ ID NO: 174780 - DNA, 1138 bp, Arabidopsis thaliana landsberg
atgggacacaaacaaagcgttgactctagaggcaaaggccgaaaaaatcccggttcttcgtcgatggtgcaaaaacatagcggaggagcgatcatctccggaccgtcactgtttgataacttaccggaggattgcatctccaacatcatctctttcacgagtcctcgtgacgcttgcgttgcagcttccgtttcgaaaacctttgaatcggctgttaattccgatagcgtgtgggacaagtttcttccatcggattattcgtctctagttcctccatctcgagttttctcatcgaagaaggagctctatttcgctatatgcgacaatcctgttctagtcgaagatggcggaaaggtatatatattacatcggtttttattgatacaatggaacaattttggtgtagttgtcaagttatacatttcatgcatctattgagatatttatgattgtttttattgttttaatttttgaattatatcttttattttccaaaaatatagagcttctggttagagaaagagaatgggaaaaagtgtttcatgttatcaccgaagaaatctatgtggatcacatgggttagtactcctcagtattggcgatggatttcgattcctgaagctaggtagaacttcttttttggtcattcatttcgattgtataatcactcattctcatgttgatgattatgatgatacactcatgcaggtttgaagaagtaccagagctgctcaatgtgtgttggtttgaggtccgagggggcatgaatactaaagacctatctcctggaacccgttactcggcttacattgtgttcaagacaaagaatggatgtcctaatttgggggatgtgccagcagaagctacagttggattggtgggacaagaatcttctcaaagacacatatactttgttgggcctacggatcaaaggagagacagagaaacgagagatgtaacgagaccaactaaaagaaaagatggttggatggaagctgagcttggtcaattcttcaatgagtcaggttgtgatgtcgttgacacaagtattcttgagattaagaatcctaattggaagcgcggtttgatcattcaaggaatcgaattccgtcccaccaaaagcctgttctatatataa

SEQ ID NO: 174781 - DNA, 462 bp, Arabidopsis thaliana landsberg
atggtggacggcaaggaccgctacgcggacgttcccaccaaccccatcgtcatctacggcccgagccctgagggcacttacaccgtcgtgcgcgtcagcccccacgtctcctactcgtggccgtggtcctacgtgccgtacggcgccgcgctccgcgaggccgacggcgaggtccagtaccgcgacctggacggcacctggcgcttcgcctccggcccgggtagcgtgttcgcgggccgccagcccccgccgctcgatcgccacgccttccgcgacgccgcgggccagctctacgagacctggcggctcaacgacttcggccacctccgcggccagctcgagagcgtccgcacgggcgcgctccagggccacatgatccacagctctccccaccaggaggcgagcgcccgcgactacttccgcgacacgcgagcgctcctcgaccccgccgaggccctcgac

SEQ ID NO: 174782 - DNA, 567 bp, Arabidopsis thaliana landsberg
aaaaagaaagaaacagaaaaaagtgaagaagaaagagcgatcagacggcgaattcgcgatcgtatcgatctcacgatgtcactctcccgtctacacaaattcaagctcttcgcggcacatcgtagcttggaagcgtccaccgcggggagtcccacgatgagtccgacgaagagccctgtattcaatcttcgacgacgcaaaaccctgcggatgttgttcgataagagctccgactgtcgcagacggaatctccgtcagatccttgaggaatctccggaatcagatggaaattccgggaataagaagaggggaaaccaccgtgcaaccagacgacaattgaaagagctcctggtcacatcgccgtcgcccccgtacaaaggcagagaagatatagacggaaatggagaagaaaaaagcgagatttcgccgttaaacgtcacttcaaacggtgacgtcaaagagttaacggctcgtcgattcggttcatctggttcggttcaatcatttcggttaaggattttaagaaaaccatggcgaccagtcctggtttctattcctgagcaataa

SEQ ID NO: 174783 - DNA, 408 bp, Arabidopsis thaliana landsberg
atgcgatctgctctggcggccgcgctcgggcttgcgctttttgtgggcggcgcctcggccgaaggcttcgagcgcaacatcatgacgggcggcccgcagggcacctatatccagatcggccgcgacatcgccgcgctcggcgccgattgcggcctgacgctcaacgtcgtcgaaagcgccggctcgctggaaaacttcgtcggcgtgcgcaaccgccgcaacacgcagttcggcatcgtgcagagcgacgtgctggaatatctcaagaccttcgaggcgaacgacccggaggtgcagaaggccgtgaagggcgtgcgcatcatgttcccgctctacaacgaggagatccatgtcctcgcgcgcaaggacatcgccagcatgaaggaccttgccggccggaagatcgcc

SEQ ID NO: 174784 - DNA, 569 bp, Arabidopsis thaliana landsberg
caagcttgaaagagaaggaagaagactggagaagaatggataatggcgaatcatcatccaccaacaattcgtcgcgtccatgggaatcctacaataccgtcttcactaacgcgaaagccggtttgttcccgattattccccaatagggtttttcttctttagcaatttttcaggattctttcgtgaattgtttcttccagagttcaaaatttcttgaaaattgatcaattcgttgatcatgggttatagttgactggtctttgaacatatttcttatgtgttgttttgaagatttaattgcggaatatcaaaatcttaaatttgcatctttagttattgattgatgtttgagttaaatttctaaactcgtcgatgtttctgtgttatgttccttaggtatggagggagttgacaaagagaaagtccagaggattgtctatgaaatgagtaaaggatccaagtattttcaaaatgaggagcgtaaagaagctcttatgaaacaaaagattgagcatatgcgtgatcgatgcgcaaagctttcatcccttgatttatctaattatcagaag

SEQ ID NO: 174785 - DNA, 1013 bp, Arabidopsis thaliana landsberg
atgaaggatgatgttgaggaaattacttggcaaacatatagtggagaactgactccaaagcaagaaaaaactaaggagaaagtactgaaacggttggagaaggttagtatttttgttcccaatcattttttttcgatgcaaaatcatatatttagctggtacttcttagtgacctgagtctctatatttttctttttttccgtctttctttctccattcggatgctcattataatttatagactattccaactttcctttattcattgtagatgtttttagactacgtccactttgcttcatctttatagggatgtttacttctgtgtagatcggccatatgaagaaggaagtagcagctattcgagccaaagacatttctcagggtggattgacacaaggacaacaaacgcagatcgctaggaatgagcagagaacggctgaggtaaccactttgttaatctgaagtgtcctaactacaatcttagttttggctgcaaaactctttatctgattagactttccatttcaattaactctatgatagcttctggaagaacttgagaacttggaagagacactgaatgacagcatccgggaaagtttgggtgccaaaacagggagaaaacccacccacggaaagaagaaaggatttgtagaagatgaggaagacttgtcgaggtaatctttctcgtgtctcagctattttttctcttagggatctcgtagtattcttacctgtgtttcagttaaaggctgcttcaagtgttcaacctctatatctacatcttcatgcaaaactatagcttgtgtctgttgtttctgattctcataaggaaaattatgttattttcagtgatgaagatgacttctatgaccggacccagaagaaaccatcaacaaagaaaggcagcgaaaaccaaactgtagaaactgttgattcacttctagataagagagacaatgtcttgaaagaaaaaaaagcaaagaatgaacagcttttaacagagaaga

SEQ ID NO: 174786 - DNA, 1258 bp, Arabidopsis thaliana landsberg
atggacagtttgtgtttgaatagcggtttacacggtgtaattccagcgatcactgcggttggaaacggcggttgcggtggagttgttgaagtccgagcaactgcgtcggcaccatcgcaaaaaagaggacctttcgggttctcgtttaagtacccactgacgccgttttggtctcgcggcggtggaggaggaattgcgtcgaggagacgaagtggcttgtgtttagacgacgccgttttggttgattccggcgattcgagaaagccgatcgcggaggagacggcggtggaaacggatacggagaggcgaaatgggagctgggttttgaagatcttggatgtacaatctacgtgtaaacacggagaagaagaagatgatgatgaagtagaagatgaagacggagacgaagacgaggaggttgaattagacgacgccgtagtatctgaagatgatggtggatgcgatgtatgttcagttttggaagatgatggcaacgaagcaaacaaatttcaactcgatagagaatcgttctccaaattgctaaggagggttacgttacccgaatcaaaactctatgcccaactgtcgtatttgggaaacttggcttattcaatttcaaaaatcaaggttcgatttttattttttacttcattagattttttgaattgaaccacgaatatagagattaatatgatatctaggtgttagttttcacaaacttgagaagatacaatgtgtaaaatttgcaggatcttcgattttgttgcattaatttgtgacattttccttgcagcctgcgaatctgtcgaaatattacggcctgagatttgtaacttcatcagctgagaaaacagaatcggcgttaaaagctgagaatggtgaagtttcaggtgagactaagccaattgtggaagcagaagaagaagttgaagaagaagagaagaacaaaagtcgcaagattagtgcttctgctgcatatgagattgttgcatcagctgcttcttaccttcactctcgtaccaacaacatacttcctttcaactcttcatcgaaagccgagaattcggacaaacatgatgtaaatttggctaatgcggagtcatcatcagatgttgcttattctgttacttctgttgttgctgctgaggaagatgtgaagcaagcagttgcagacgatttgaaatccaccatttcgtctccctgcgattggtttatatgtgatgatgatcagagtcacactagattcgttgtgattcag

SEQ ID NO: 174787 - DNA, 642 bp, Arabidopsis thaliana landsberg
atgggctgcatcgtctatgacggggcgatcccggacgatctggaagacggcattgtcggccagggctttcccatcgaggtctataatgtgctgggcgcgggcgatgcgttcatgagcgggttcctgcgcggctggctgcggggcgagccgcatgcgaccagtgcgacctgggccaatgcctgtggggccttcgcggtgtcacggctgctgtgtgcgccggaaattccgacctggaccgagctgcaatatttccttgagcatggcagttccgagcgggcgctgcgcaaggatgccgcgatcaatcacgtacattggtcaaccacccggcggcgcgagattcccagcctgatggcgctggcaatcgatcatcgcagccagttggaggatctggccgaaggcgatgcaaaggttttggcccgcatcccggctttcaaggcgctggcggtgcaggccgcggcacaggtggccgatggccgaccgggctttggcatgctgctggacgataaatatgggcgcgatgcgctttacgcagcgagcgggcagaagaatttctggatcggcaagccaatcgagctgcccggctcgcggccattgcaattcgagttcagccaggaccctggcagccggctgatcgactggccg

SEQ ID NO: 174788 - DNA, 204 bp, Arabidopsis thaliana landsberg
gtcaccggagtagaggaaacagaggaaactggaagagagcccactggaacagaggaaacagaggaacccggagcagaggaaacagctagcacacggaagaacttcgagggaattggaggccaagagggccgcacagacttcttcttcttcggcataccggaaccagcatcagctggcgagaggccagccagcggcggcggctag

SEQ ID NO: 174789 - DNA, 426 bp, Arabidopsis thaliana landsberg
catgatgtcaaacatactagtggtggcagaggaaggcgaggtagaggccgcggacgaagtagtggaagaacaggaagtgggctgtctctaaaatttgaagaagatttagaagacggttctcccgaaagcagcaggaccccgtctcccgaaaacgggagcctttctcacgacgatacatcttggaagaaagttgcatcacacaacaatcatcatagtagtaactcagaggtaaaagtaaggaacttcgatcttaatgttgaattagatgagaatggagacactgctacatggctggaaacacagctagagagaagtccagattacccgttggagattaacgaaatgaaaatagatcctgatgatcaacaacaggctagtgctagtgacgaggaagattatgatgaagaaagcatagaccaagagtga

SEQ ID NO: 174790 - DNA, 104 bp, Arabidopsis thaliana landsberg
atgtcggaatccggctataatcaaccagttgatagatacctccgccgtcaaatcctcggagaaggaacatacggtgtacagattaaaaagccaccgacacaaag

SEQ ID NO: 174791 - DNA, 59 bp, Arabidopsis thaliana landsberg
atgaggtcttgtatggtcgaacatctctcaggaaagcaaaagaggcagccatttgaaag

SEQ ID NO: 174792 - DNA, 114 bp, Arabidopsis thaliana landsberg
ggtgttgcaatcaactttgttaaaagcgacgacatcaagattctcagagacattgagcagtactacagtacccagattgatgagatgccaatgaatgtagctgatcttatctaa

SEQ ID NO: 174793 - DNA, 180 bp, Arabidopsis thaliana landsberg
agagagagacgagaggaagagaaatcgaaaagattgacgacgacgattcgagagattcaactgaattctaaggagcgaaacaagtggggaaggaagcgccacgtcaccgccaaattgctaactgatatttcaaaccgaaccggattcggtttagcgcggctgaaccggactcatcattag

SEQ ID NO: 174794 - DNA, 214 bp, Arabidopsis thaliana landsberg
atgggtggagatatatcaaatggatctttaccagatggtaatgtaactagtgcagctacatcgggtgagaatgcatccggtgaagatttatcggatggaaatacatttgaaagaaatgtatcgggagaacttggagtagatgcaccattatcgagtgaacatccaatggatgcacctgcactggatggacctttgcaagatacatctgaacaag

SEQ ID NO: 174795 - DNA, 68 bp, Arabidopsis thaliana landsberg
atgctacgacagaagctagatccagcagataaagattctaatgatgaagtggttgctgagagaggcag

SEQ ID NO: 174796 - DNA, 496 bp, Arabidopsis thaliana landsberg
atgaagagcattttgcaatatctcataggacaagacgggtatgagttttacgtagatgatgaagaagacgaagacgtggccgtgttttctttggaaggggcctatgattggagacgtattcattatttgattcttagagagtgtcgaaggctagaggatggactgcctatctatgcctaccggcggcagattttgaagaaaattcattgtgaacaggtatctttaagaatctccaagttgacaagtggtctttgggtccaagctagttttgaatcacttgagtacagaagatattcgagttatgctgttgtcttgttgtactagttcattaaggttcagttttctctgttttataaatgagtctgtgtttggtcattttgagtgtgtaatatttgattttaattgtgtttgtagataatggtgttgattggcgaaactggttcagggaagagcactcagttagttcagttccttgctgattccggagttgctgcta

SEQ ID NO: 174797 - DNA, 72 bp, Arabidopsis thaliana landsberg
atggagtttaagcgaccattggacgcgctgggctacgaattatgggacccggaggatgaaatattacacctg

SEQ ID NO: 174798 - DNA, 291 bp, Arabidopsis thaliana landsberg
ctggccaagaacaagcccggcaccttcctcgccgacttcggcgccgccgatgccggctggatcgccgcggtgctctggcagaagggctggcggccgttcaagctcgacggcaccacgatcgctatcgccatcaacgattccatcgccaaggactgggcgaactggatgcagaagatggtcgatgccaaggcgatcgacaccaagccggagtggaccaccgactggttcgccaagttcgacaacggcacctatgcgagctggacgacggcggcctggggcccgaccctcatg

SEQ ID NO: 174799 - DNA, 409 bp, Arabidopsis thaliana landsberg
atattatcgaacaaattggttgaacgagaaaagtgatgtttatagctttggaattgtactattagagatcatcacaaaccaacctgtgatcaatcaaagtcgtgaaaagccgcatatagcagaatgggtggggttaatgcttacaaaaggagacattcaaaacattatggatccaaaactttatggtgattatgactctggttctgtctggagagcagttgaactagcaatgtcatgtctaaatccttcttcagctagaagaccaacaatgtctcaagttgttatcgaattaaacgaatgtttgtcatatgaaaacgcaagaggaggaacgagtcaaaacatgaactcagagagttcaatagaagtcagcatgaactttgatattggagctacccctgatgctcgttag

SEQ ID NO: 174800 - DNA, 286 bp, Arabidopsis thaliana landsberg
atggagaaaacctgtgaaaccaccaaagaggctcatggagagcaatcatcaaatgaaagtcttagcgacactctagaagagaatgagagtatagacaacgacgcatcagcgaacaaacaaaagaaagaagaagaagggacaaggcagagagaatctatgtccgcaaaaacctgtccttggaaggtttttgagaagaccctcaaagacgccagccaaaaggaaggaactaatgagatggatgctgacaccaggttgtttgagaggaatgaagagacaccaccgctgg

SEQ ID NO: 174801 - DNA, 326 bp, Arabidopsis thaliana landsberg
atgagcgatatccgcgatctcgtgcgcatctatgaggtcgagggcaaggagcgcgaggaggtcgaggctctggccgtccgctgccgggtacgtccctggtggcgagattacggggagatcttcgacaacgagttccccggatatgagaacgacgcgacgtccattcggtgctatatgcccctggttcttccaggcctgctccagacgcccgtctatgccaacgcactgttcaagacgggaccgcggtcgccgaaatggcggcagcgggcggtggaggcccggctgcggcgccagcagatcctggaccggaccgacgggaccgcgcc

SEQ ID NO: 174802 - DNA, 123 bp, Arabidopsis thaliana landsberg
atgaagaaaactggaatcatcgcagcctccatctctgtcgcggcttctgccacggcgatctccgccggctctaccaacacctccgtgtcattctcttcgccggaatctaatctctctcgtcag

SEQ ID NO: 174803 - DNA, 90 bp, Arabidopsis thaliana landsberg
atggcggtcccgttgcttaccaagaaggttgtgaagaagaggtctgctaagttcatcagaccccagagtgaccgtagaatcaccgtcaag

SEQ ID NO: 174804 - DNA, 396 bp, Arabidopsis thaliana landsberg
ccgcactactgctgttgtactcctgcggtggcggcaacaagccggaacagggcaccaatacggaagaacaccacgaggaaaataccgtgtcggagcctgacccagacaaatggccgccgaggcattgagctgggcggtacggaacagaaaaacctggggcagtccatcaaagtaaacggcaagctggaagtgcccgcccagaacaaggctgccgtcacttccctgtacgggggcgtgctgcagcagatactggtgcacccgggcagcagtgtgcagaaaggccaggtgctggctaccgttaccaacaccgagctcagcggcatacagcaaaacctgatctccgtgaccgcacagctgaagctcgcgcaactggagctggcccggcaaaccgaactg

SEQ ID NO: 174805 - DNA, 301 bp, Arabidopsis thaliana landsberg
atggccaagcccgggcaggaatgtgcgcgcaagcgcgacttcaatgccacgcccgagcccagcggcaagcgcagccgtggcaagcggaaccactcgctgcagttctgcatgcagaagcacgatggcaggcacctgcactacgacttccgcctggaactctatggcacgctgaaaagctgggccatccccaaagggccgccgctggaccccaaggtgcgccgtctggccgtgcacgtggaggaccacccgctggactacgccgacttcgaaggccatatccccgaaggccattacggcgcag

SEQ ID NO: 174806 - DNA, 179 bp, Arabidopsis thaliana landsberg
atgaaactcgtttcgcgggcgcacatcctcggcgcgctgtccctcgtcgcgctgggcgccgccttcaccaccgccaccgcgcagtacgccggcaacacgctggccgacaaggtgcgcaacgccaacaaccgcttaaagaacgtcgcggcagccgtggccgagggctacgcgccgatccc

SEQ ID NO: 174807 - DNA, 1318 bp, Arabidopsis thaliana landsberg
atggtttatcagattgtaacagatgaaggctctagcagtacgttgagttcgatgaatattactttggaagacggtgtttcgttatcaaaagtggttcagtttaatccggcagatatattggatgattctcaagatcttgaaataaagcaagaaaccgattattatcaagaagaagatgaggtagtggaactacgtaggtccaaaagaagaaacgtgagaccggatatctacaccggatgtgattatgagccagatacaattgacggttgggtgcggatgatgccgtaccagtttggaaaatgtgctgttaatgttgagagtgatgaagacgaggacgataacaatgaggatggtgatactaatgatgatttgtatataccattatcgcgtttattcatcaagaaaaagaaaactaattctcgagaagcgaaaccgaaaagtcgaaaaggcgagatcgttgtgatagacaagaggagagtacatggatttggtagaaaagagaggaaatccgagctttcggttattcctttcactccggtgtttgagcctataccgttggaacagtttggtcttaatgctaacagttttggtgggggtggtagtttctcaagaagccagtactttgatgagactgaaaagtatcgaagtaaaggcatgaaatacgggaagaaaatgacggaaatggaagagatgatggaagctgatctatgttggaaaggtcctaaccaggtgaagtcgtttcaaaaacgaacatcccgatcttcgcggtcagttgctctaaaatcagaggattctgatgaaccacgggtctataagaaagtaacattgagtgcaggtgcatataacaagctgatagatacatacatgaacaacattgagtccacaattgcagccaaggacgagcctaccagtgttgttgaccagtgggaggagttaaagaagacgaatttcgcatttaaactgcatggggatatggaaaagaacttgagtgaggatggtgagggagagacttcagagaacgaaatgttatggagagaaatggaactatgcttggcttcttcttacattctcgatgacaacgaggtacaattctctttgagatatcgcatatactaaaactaaaactatatacaagcatttgcctgctaattccattgttgtggtgtatcaaaatctctaggtaagagtggataacgaggctttcgaaaaggcgagaagtggttgtgagcacgattataggctggaggaagaaatcgggatgtgttgcaggttatgtggtcatgtaggaagtgagataaaagatgtatctgcaccattt

SEQ ID NO: 174808 - DNA, 88 bp, Arabidopsis thaliana landsberg
atggatagacgagaagaagaagaagaagaaactggatatggtgagaagggaacaagaaatcaatctaaagaagacgagagccgtcttg

SEQ ID NO: 174809 - DNA, 440 bp, Arabidopsis thaliana landsberg
gggttcgatattgatttctcgttgttccgatgtctgttcaactaccatcttgttgaccccgatgattacgatttccttgatgatgaatcagaagaaaccaacggggatttcatgaagaggttttctcaagaatctcttaagcgttacaatgacgaatgtgtaagaaaataataatccatttacgttcctaatgttcttttttgtacacagcaactcaactgaactgaatgattccttgtttgaaacagggtacgaacaaatatgaatttcacgaggttgtcaaagccaattttcacggatcttgtggatatatgtttctcatcacgtttcaagtgtttgatccatctgatgaccaggaaaaaaccttccaagctaggatccgttacactacacattacccgactgaatttacttttgtaggccgaaaccgaatccagaag

SEQ ID NO: 174810 - DNA, 225 bp, Arabidopsis thaliana landsberg
attgttggaatatcaaaacaaggtcgtgtatttggacttggattacttcaaaatgagatttctatgcttttgaatggttcaacggtttcctcacaacctactgaagaagaagtaggaacgttagcccaccgagttgatgaacttgaaagtgaattgaagaaaaaacgtgatgagaatttactcctcgagaaacgtcttcaagcaattgaaattgctatgctttag

SEQ ID NO: 174811 - DNA, 68 bp, Arabidopsis thaliana landsberg
atgggatggctagagcgccgtaacgatgaccgatacggcgataaccacatgacaccagcgacgggacg

SEQ ID NO: 174812 - DNA, 213 bp, Arabidopsis thaliana landsberg
atgggtattacgctacaaacaatccgtaccaagtgaacggaccaaaaggttttactgagttcaagtatctggaagagacccatgatctgttcgtgaggcttgatttccctggaatccagaaagagagtgtgataatccttctcgaaccatcgaagaaagctgtcattgtgaccggagaagcacccaaagagagcaaacacgattcttctcacc

SEQ ID NO: 174813 - DNA, 122 bp, Arabidopsis thaliana landsberg
atgacggaagaaaacgcaacgccactgcaaccgccacaaacgcaggaggatgatgaagaggaaaaggcaatgtatgctatctgggcagtaccggaggatgacgtggaggatcggcttcagag

SEQ ID NO: 174814 - DNA, 823 bp, Arabidopsis thaliana landsberg
atggagtgtgtagaagcatttctcggtgatttttccgtcgacgatcttctcgacctctctaacgccgacacttctttagagtcgtcttcgtcacaaagaaaagaagacgaacaagaacgtgagaaatttaagagcttttctgaccaaagtacccgtctttcaccgccagaggatctcttatcttttcccggcgacgctccggtgagccctcttacacactctgtttctctctcccctgtttttactctgtttctctgtaccctgtttttgctctgtttttaatctcatttttgttttgtttgtcaaggttggtgatttggaagacttagagtggttatccaacttcgtggaggattctttctcagaatcgtatatttccagtgatttcccggtgaatccagtcgcgtcggtggaggttcggagacagtgcgttcctgttaaacctagaagcaaacgccgccgcaccaacggccgtatctggtctatggagtctccatctcctctgctatccaccgctgttgccagaaggaagaagagagggagacagaaggtggatgcatcgtacggtggcgtagtccagcagcagcagctgaggcggtgctgcagccattgtggagtccagaagacgcctcaatggagaatgggtccattaggtgcgaagacactgtgtaatgcttgtggggtccggtttaagtcgggtcgacttttacccgaatatagacccgcttgtagcccaacattcaccaacgagattcactctaactctcaccggaaagtgttggagctacggctcatgaaagtggcggatccggctcgggtttaa

SEQ ID NO: 174815 - DNA, 396 bp, Arabidopsis thaliana landsberg
gtcgacggcgccaacgcggcccaagaattcctgctggaacgcggcctcgacaaagccgacgccgacaaggtctggctggccatcgccttgcacaccacgccggggataccggagttcctggacccggagatcgccctggtcaccgccggtgtcgaaaccgacgtgatcggtatcgggcgcgacaacctgtcccccgacgacatcgccgcggtcacgacggcccatccgcgtccgaacttcaagaagcagatcctcgcggcgttcaacgacgggatgaagcaccgtccactcaccaccttcggcacgatgaatgccgatgtccttgggcatttcgaccctgaattcgtgccgatcgacttcgtcgacctcatcctcgacaactcctggcccgagtag

SEQ ID NO: 174816 - DNA, 130 bp, Arabidopsis thaliana landsberg
cttttttgcgtggccccgaaccttcgaccgttttcgtcgcctgttcgacatgccgtacctgttctacgtggtcgacgttcatcggaatcgtatttcccgtgtccgatttgacaacccaccgcgtggacag

SEQ ID NO: 174817 - DNA, 126 bp, Arabidopsis thaliana landsberg
gtattgaaaagggacattccatgggagacttacatgaacactaagctggtttcagctaaaggtctccagctcttaaggcgctatgataaaaaacctgaaagtgctagggcacagttgctcgatgaa

SEQ ID NO: 174818 - DNA, 143 bp, Arabidopsis thaliana landsberg
atgatctatcggttgcggaaaaaatctactatcacccttggacgagccactgaacttgagaccagccctgttgaaccaactgattgtcgtaaccagttgcaacttaacatcacaaagcattctctaatttctagacaagaaag

SEQ ID NO: 174819 - DNA, 519 bp, Arabidopsis thaliana landsberg
atgtctctcttcctcattgaacatgaggagcaggttctgaaatttgagattggcactctaaatatagcttatacactgcttgaagatctttttattcagttcaagtaagttgtttcatccttatcaagtatctaaagtcttaacgctcctgaatgatattgtgctagtccatgttgttattatctaactccttaaccatattttcttctatcagagaagttgcaaaagttggggaacagttgaactttgaagcatgtatggacatgatggatcttctttacgagaaagaggacacatcccttctttatcaatcttcaaaatctctggctgcttccattttggtaaacttatttgctctccattaccctctgttttttttccttaattgctctccattaccatctgtttgaatagacattaaaaatgaaactaaaatggtgttattctcttggccacaggtctcttcttacataataacagtgcctaaacagcagtacgaattccctatatatcccaggg

SEQ ID NO: 174820 - DNA, 66 bp, Arabidopsis thaliana landsberg
gtgaagagagaactaagaggaaaccagttgaccgaagcacgggatgaccacacgctgactctataa

SEQ ID NO: 174821 - DNA, 392 bp, Arabidopsis thaliana landsberg
cgcatccggacaacgcgtattccgaagccgatccaagtgaagccgtggatctcgtggaacccgaacgattcttcgccgattcctacacgccttcgttggctcgaatgatcactcacgtcatcaaccacgaaggccccgttcttgatgccgtactggcgcgccgcatcgccagggcacacggctggcttcgcacgggcggacgtatccgcgaccgcgtcatcctcatcgccgatcaggcacaccagagttcaagcgaagacgtcggagtcttcttctggccgggcaatcaggactgcatgatagccactgcgtttcgccgccccgtcgacgaaaacaatgttcgttcggccaatgaaatctgcattgaagagcttaccgcgctggctcgcgaa

SEQ ID NO: 174822 - DNA, 627 bp, Arabidopsis thaliana landsberg
atgcagcgcgccttctcttacgagtggcgcaagcaggtcaccgaggtggtgccgaagctaaagatgggccaggccatggccgcgcccacgccctatgacgcccagccacagtacgcgccgattcccggcctgccgctggtcgagcagttccgctatccgctgtgggatgccaagcccatcgagccgccggccgacgtcaagctggccggctcctccagcgagttcatcaacgtctcgccgggcaacgtctacgtgccgctgggcaagctcaagccggggctgtacctggtcgaggcgctggtgggcaagtaccgcgccaccaccgtggtattcgtctccagcaccgtggcggtgagcaagatcgccggcaacgagctgctggtgtggtcggcgcgcaagcacgaaggcaccccggtgccggatacccaggtgctctggaccgacggcctgggcgtgatgagcagcggccgcaccgacgccgagggcctgctgcgcctgcagcacgccagccccgagcgctccttcgtgatcggcgaagacaaggagggcggagtattcgtctcggaaaacttctactacgatagcgaaatctacgacaccaagctgtacgccttcaccgaccgcccg

SEQ ID NO: 174823 - DNA, 263 bp, Arabidopsis thaliana landsberg
atctgagcaagacaaggaaccagaggcagaagctagttctgatgttgtgggtgatgggcccagtgaagaagctgttgctgacggtaagttgcttgtacctcaatgaattgttcttcatcaagtaataatgagaagtctgcttacattgttttttcttttatctacccgtactatcagcgcctcaagaaatagatgagtatgatcttatggattctggggacattttgacacctttggagaagtctgggttctgggacggagtg

SEQ ID NO: 174824 - DNA, 441 bp, Arabidopsis thaliana landsberg
atgaatttcctgcatctgatctgggcggcgctgttccggggcaagaggcgcaccgtgctcacgctggtgtcgatcatcacggcgttcctgttgttcggcatgctcgatgccgtgcgcaccacgttcgaaagcggcagcaagagcatcgtcggcgtggaccggctggtgacctcgtcgcgctattcgatcatccagtcgctgccgcagtcgttgcagtcgcgcatcgccgccgtaccgggcgtacgtgacgtggcctatgccaactggttcggcggcatctaccaggacccgaagaacttcgtcttcagctatgcgatcagcccgaactacctggacgtctatccagagatcaagctgtcgccggagcagcgcaaggcgttcgacagcacccgcaccggcgtggtgatcggcccgctgctggcgaagaagtacggctggaag

SEQ ID NO: 174825 - DNA, 97 bp, Arabidopsis thaliana landsberg
tttcaaagtagccattactcctaaagctactatcgtcaccagacctacaactactcccatcgccatcgtcttagatatctgctccaccgccaattga

SEQ ID NO: 174826 - DNA, 61 bp, Arabidopsis thaliana landsberg
atgaggttagtggagatacgtcagcagcccacagcccacaatagcaaggatcgaactgaaa

SEQ ID NO: 174827 - DNA, 148 bp, Arabidopsis thaliana landsberg
atggcagaaaaggagggtaaagcaagtggcacagacaatgacaatcgggtgaaaacgaaacgttcaagtcatagtcgtcgaaaggaatgtgtcaataagagtttggaacataatgatgagcttgtgaaatatatgcccaagttgccag

SEQ ID NO: 174828 - DNA, 366 bp, Arabidopsis thaliana landsberg
atgccgctcgacttcaccgtgccgcgcggcggcaacaatattctgcaattcgaggtcgcgccgctcgagggcgagatcaccacggcgaacaaccgcgccgtccatgtcatcgagggcatccgcgagaacctgcgcgtgctgctcgtctcgggcgagccgcatgccggcgagcgggcctggcgcaacctcctgaagtcggacacggccatcgacctcgtccacttcaccatcctgcgtccgccggaaaagcaggacggcacgccgatcaacgagctctcgctcatcgccttcccgacgcgcgagctcttcgtcgacaagatcaacgaattcgatctcatcatcttcgaccgctaccagcaccgcggc

SEQ ID NO: 174829 - DNA, 114 bp, Arabidopsis thaliana landsberg
gtgcgactgcgggttaattcgagaatatcacagggtgtcttttacaaaatgacacaaccgaaggggtatgaagcttttctgaccgccagatcgggtttcaacgatcctgattag

SEQ ID NO: 174830 - DNA, 369 bp, Arabidopsis thaliana landsberg
cccacgaaatttccggcgcaaatcgtcgacgtcgcgatcgacggcgcggcgcgtatcgaaatcgccgacagcaagtttccgctgatcggcacggcttccaatatcgtccggcgtcagaacggcgagcaggtcgtggcctgcatccggcccgaacgcatcgccgtcgccagcgccgcccgcggcttgggcggcaatgagctggaaggcacgatcgagacaatgctgttcctcggcgatcgctacgaatgcctcgtccagatcggcgggcaggcgattctcgcttatgtcccgagcagcgaaaagctctcggaaggccagcgcgttcctttggcctttcccaaggaagcgctgacgctatggcccaactga

SEQ ID NO: 174831 - DNA, 133 bp, Arabidopsis thaliana landsberg
atgaagaagcacaaggaagagaagaataagcttgaagaggagaagaagaagcttgagaaggagaagaagcagcttgaggaggagaagaagcagcttgaggaggagaagaagcagcttgaatttgaagttatgg

SEQ ID NO: 174832 - DNA, 437 bp, Arabidopsis thaliana landsberg
atctttgagaagtcatcttttgtgaaggaggctggggccgcgatcacggcaccgcccaacttcagccgtgttttgcgcttctatggcttcgacttccaaaagtcccgggccacggaggcaggcgacgtaggtgtcctttgtcccgagaaacgactcgggacacattttgttccgcacaccccacgatctaaatgacttctagatcctgtactaccacaacaagagcgggaaaccaacgagcgttctttctgttggtgattacgaagagaaattcaacgcccattggtactacttccaccgcgtcgatctgcataatcagctccaagaaatggttttgagtgaaccagaggctggttctcacaagaagaaagcaaccattcggctgcgtaccacggtgaaggacatcgagctcgacggcaccatcacgctgcaggacg

SEQ ID NO: 174833 - DNA, 164 bp, Arabidopsis thaliana landsberg
attgatcccggcacatgaggtggttagtactctaagtcagacaactgagcaaccagatattctacaaacaccagaaaccagttcagctacaaatgatctgactgatgaagattcggataaagacgatgatacattgtttaccattgatgtctctgttcctagag

SEQ ID NO: 174834 - DNA, 237 bp, Arabidopsis thaliana landsberg
  unsure (1)..(237): unsure at all n locations
acgcaagaggccgtcatagatcagggccgagaggtccttatccgcccgagtgaccgcaaggaccggattcacgaaccgtggtacgcctnnnnnnnnnnnnnnnnnggttccgccccctgcagcgatgcgaacggtgtagtgcatgcttacctgtatgaggaatgccagtatgaatacgccgaatacgagaagtgcagcacgcatcaagaacctgtcgcttgcagaaagcgcttgtga

SEQ ID NO: 174835 - DNA, 127 bp, Arabidopsis thaliana landsberg
atggaacaacgagaagacaagtttcttactattcaggattcattatccctcaacgagaatctgacgattaaaggaatctccggcagtcaattcagcgatcgtcgtcggccaaaaaaacgagagagac

SEQ ID NO: 174836 - DNA, 130 bp, Arabidopsis thaliana landsberg
atgtttgcttttgaagccacaagtaagcctattaccaacagtgtaggttccattactcacattgaacatctggagtggaataaagatcctgatgtcgtcccctactctattggtgatctcagtgaactag

SEQ ID NO: 174837 - DNA, 139 bp, Arabidopsis thaliana landsberg
atgattaaaatttttgaagtattcgatttcaaagaagaggacgagctcgctgagtctgcagctggaaagttattggaaaaattcacaaaccctagtccttgcaattctccggttctgcaacgccaacgcatccaaagct

SEQ ID NO: 174838 - DNA, 109 bp, Arabidopsis thaliana landsberg
atgacccggctccgcgcctcctctggtgcacgaccgcatctattgccgccgccgcgggcttctgctgcattaccacgagtcaacaagcgaggaaaacacagagagagag

SEQ ID NO: 174839 - DNA, 607 bp, Arabidopsis thaliana landsberg
ccactaaccgaacttcaaggaacaaaatgcaagagatgtggaatctataaggacgaccctcttaaatatgatacatttgacgaatgggagctttgcccttctgatttcacagcagagggtagttacaagcgcttcaaagagaaagaatttaatgctacttttctctgccatggatgctcacaagttggagctggtgagttttaccaagcaacacatcttgagctttagggtcatttattactgttttgccatgaatactgttccaactataaacggaatctctttcacatgtatctctgttggctgtagcttcagtttgaatctgttctctgtgattaggactatcatattcatatgcattctttttcttttggcaggttcgaataaagaatcaggcaccgagaaggaagaacaaaagagcggaatgcatcctggaattgtggtactgattgtagtactcttgttaggtgtagttgcggtgggactcttggtaggttacaagtattggagaaagaagaaacggcaacaagagcaggcccggtttctcaagctgttcgaagatggtgacgatattgaggacgaacttggccttgaaaataccctatga

SEQ ID NO: 174840 - DNA, 514 bp, Arabidopsis thaliana landsberg
atgtaccagtttttcgccgcttaccgcaatttagatctcaactaccagaagttctacaaaacgctggcggaaaaccaggcctacggcatcgtgcgcgggttgatgaagacgccgcgttcgacgttcgtcagcagcgacccgaaagatctcacgcgcatcgtgcgcaatcccggcacgccgcaaaagctcaacgtggtgctgatcacggtggaaagcctgtcggccaagtacatgacgcgcttcggcgacaagctgcacctgacgccgttcctcgacaagctggccgacaacagcctgtttttcgaccacatgtacgccaacggcacgcgcacggtgcgcgggctggaagcggtcacgctgtcggtgccgcccacgccgggcaattcgctcatccaccagaagcacaacgaggatttgttctcgctgggcaagattttcgacaaccacggctacgtcagcgaattcgtgtacgggcgctacggccagttcgacaacatgaacgagttcttcggca

SEQ ID NO: 174841 - DNA, 454 bp, Arabidopsis thaliana landsberg
gagactgattcgcgaagggaagagaaagattgatcatcacatagaaacaaagctaatcgtgaagatattacgtgcatgcacaaccgatgaccaaaatcttttgcaacatccaaactactataaagttattgcatggacagaccctgtagaaccatacacaacacaggtatgggtttccaaaggcaactattggaagtataatacagaattggcgattcccttagattctcctgcaaaatatctttacctagaattgtttagaaaacattcttctagagatcctgcaacatcagatggagaagttgccataggtcgggctaagattcgattgccaaaggatggcaagttctctggtgcagctcgtctcgttgatttgaacagtgatcgttgtatcgtggataaaggaactcttgaattgtctttggaactaattcatacgattgtagtaacataa

SEQ ID NO: 174842 - DNA, 345 bp, Arabidopsis thaliana landsberg
tactccggcgatgccggcgcttcctggttcggcgccgcccgccgcgtcgagaccgaccccgccggctcggccgagagcttcaacgcgaaggtcgcctgcgagggcgacgtcggccacgtcgtctggcaggacaaccgcgacggcgcctacgacatctactaccggcgcgtcgtcgccgggaagaccgcgatcgaggagggcgacgccgaggtccggctcgacaacggcgacatcaagggggcgaacatctcggagagcccccagatcgtcgtccgcgaccgcgtcctgatcgtcgggtggaccgatcgccgagacggcggcgaggaagcgctcaacgacatctaa

SEQ ID NO: 174843 - DNA, 177 bp, Arabidopsis thaliana landsberg
atggggggacggggggaaaccgtacaggagccgcagggtagcgcgctgaagaacccgcactgcaataacgacattgacgcccaagccgcgcagaagccgaggcacagcctgccgcccgggcgcaacaataccgacggagcccggggcaagggggaggggggcaaaagcaccacagcg

SEQ ID NO: 174844 - DNA, 119 bp, Arabidopsis thaliana landsberg
tgagttaccggttaagtcagaaaagaccagaaaatgaacgaagacagatcatttataacgaacacacgtcatcacttaggccctgtggtcgatcaatcattctcatgatctatcattaa

SEQ ID NO: 174845 - DNA, 174 bp, Arabidopsis thaliana landsberg
gttaataattgtcaaagatacaactcgatggaccaaaataaaataataaaattcgtcgaatttggtaaagcaaaacggtcgaggatagctaatatttatgcgaaacccgttgtcaaagcagatgttcagcgtcacgcacatgccgcaaaaagaatatacatcaacctcttttga

SEQ ID NO: 174846 - DNA, 507 bp, Arabidopsis thaliana landsberg
atggtgctcgtgtgcctgccgacggcctgggtgctgctcggcaccggcgtgcgcagcgagccggccggagccagaccggtcggcgccggccagacggtgcgcgaagcgctgcgcaaccccggctacgtgctgctggcgtccggcttcttcgtctgcggcttccacgtcgccttcctggcggtgcacctgcccggcgtgatcgaagcctgcggcctggggccgcaatgggacggctgggcgctggccatgatcggcctgttcaacatcgccggcagcctggcgatcggctgggcgatgggccgctggcgttccaagtccctgctgtcgctggtctatgcggcgcgcgggctggcggtgctggccttcctgttcgcacccaagaccggcaccgtcgtgctggtgttcgccgcggtcatgggcctgacctacctctcgaccgtgccgcccacggcgggactggccacgaagtccttcgggccggccaacatggccaagctgttaaggctg

SEQ ID NO: 174847 - DNA, 406 bp, Arabidopsis thaliana landsberg
atggaggagattagaggagtgcctacgtggcaggaagagttagcgagcctagttgacgccggattacgatacgacggagcaccgatcgatttaacggcggctacaaagagatcgggttttgtgtcggcggatggatccggatccgaaccgaaggagacattgaaagatcaagtgacgggattcatgaaatcgtggggagagatgcttcttgagctcgcgaaaggatgcaaggacattgtgcagcagacggtggtcactgatgactcattcctagtacggaagctccggaaaccggcggctaaagtgtcgaagaagcttagctttctaaacgagttcttgcctgaggatcgtgatcccattcacgcttggcctgtgattttcttcgtcttcctcttagcactcgcag

SEQ ID NO: 174848 - DNA, 296 bp, Arabidopsis thaliana landsberg
acggtcctgattgtgacacctggcatgataatcccgattccgtaatctacggtcctgatccattcgatacttacccgagtcgactcagtgtccaaccgtcagatctaaaccgagtcattgacacgtcgagtccgcttcctccgccgaccttgtggcctccttcttcgccattatcgattcctccgcttactcatgagtcaccaaccaaagaagatccagagactaacgactccgaagacgatgacttcgacattgttgaaaccgagaaaaacaacgtcgttttgatttatatctag

SEQ ID NO: 174849 - DNA, 410 bp, Arabidopsis thaliana landsberg
atgaagctggccgacctgtggaccaacctcaaggcgacctacacggccactgtcggcgccgagttcatgcacatctccgaccacgagcagcgccgctgggtgtactcgcgcctggagctggccgccggcaacgcgcacctggaccgcgacgaaaaattgcgcgtgctcgagcgcctgaccgccgccaacggcctggagcgctacctgcacaccaaatacgtcggccagaagcgcttctcgctggaaggcggcgacgcgctgatcccgatgatcgacacgctgatccgcgtcggcgccgatgccaacatcggcgagatcgtcatcggcatggcccaccgcggccgtctgaacatgctggtcaacacgctcggcaagccgccgctggaactgttcgacgagttcgaaggcaa

SEQ ID NO: 174850 - DNA, 215 bp, Arabidopsis thaliana landsberg
aaatttttgaagtttgtaacgtagaagagaaagtgttagagacgttgcaactcttcccgttatcgaaagttgagagagtgagagcaaacgttactgctgcgagccacaaccaatacacacgagagcaagcatatacgacggcgttttctacattctcaacatgtggggctgagatggaacattcgccgttggatctccgattaagctgtctatga

SEQ ID NO: 174851 - DNA, 128 bp, Arabidopsis thaliana landsberg
ttttcataaccctcctcaacgactgcaagttgatcaagcgtacttctggagaaccttcaaattctgactccaatgcattccaaacatcctttgatgtggatgctggtgctatccgaggaaaaatctga

SEQ ID NO: 174852 - DNA, 402 bp, Arabidopsis thaliana landsberg
atgcgccacgtcatcacacttgccctcgccttgtccctggccagcaccggcgcgctggcgtcgaccgccgcgccggccgcttccgccaccacgccgacggcgcggctgcacgccttgttcaaggccgcgcaacattcggacccggcccgtgcgggcacgtcctacaaggcctattggggcgacccgagcctggccgcggccaaggccaccatcgcgcgcaagaaggccgagctggccaagctgcacgccatcgacgtgaaggctttgagcccgaccgaccagctcagctggcgcctgttcgactaccagttgcgcgacgccatcgccgccggcgcgtttgcgcacgatcagacacaaaccctcatgacgcagctgtggggcccgcagctggaaggcaacgag

SEQ ID NO: 174853 - DNA, 224 bp, Arabidopsis thaliana landsberg
atgaacggggtcatcaaggagaagctcaagatcatccccaaggacgtcaggtgagatgggagttgctgttaccatgccaatcgattatcgtatcgatgcgctaaattaaacagctgcctgcctgcaggtgggtggaggtctccaatgccgtctactacgcgctggtcaacgacttcatgaagccacgaatcgacgaggcgagcaagctactctatatgaattaa

SEQ ID NO: 174854 - DNA, 441 bp, Arabidopsis thaliana landsberg
cggccagctggtgttcaccggcctgctcggtgccgccgggctgatttcgatcatcgacccgctgtactacaaatggctggcaccgaggcgctggctgttcctggcgctgcataccctgaccctgttcgccgccctgctgactgcactgccaatcatgctgcacctgaccactgcgcaaagcttcaagctggcccttatcgcagccatggccctgtcgttccccagccttgtcagcagtttcccgatcaacaactggcgccgcgccggggccctggtggtggtcaccctgtcggtcggcggcgggggctggctgctgcgctcctgggtgccaccagcgaccttgtggatgaccgaagtggcggtcagcaccgaagtactgaaccgccagccgggcgactcgctggacgagattggcgccagacgcatccgtagcagagggct

SEQ ID NO: 174855 - DNA, 151 bp, Arabidopsis thaliana landsberg
aagcggtattcgcgttaacgtcgactttgtgttcggatcccatccttccattttcttcgccttcctctactcactgatttgggcgttaattcaaatcctatttgtcgatcggaatcggatgcttccttctgattcctcctctattgactga

SEQ ID NO: 174856 - DNA, 139 bp, Arabidopsis thaliana landsberg
gacgatccaccactgggtagcattgacccgtatggacttgaagagatgacctttgctaaggaagacgaagtatttccaacaattaacattcttgatacttctgttgataagaaggatgccaataaggatgacgtggctg

SEQ ID NO: 174857 - DNA, 63 bp, Arabidopsis thaliana landsberg
atggctccaaccgccgctcctcggataatcccactttctgtttcttggcctatcaaagctgca

SEQ ID NO: 174858 - DNA, 97 bp, Arabidopsis thaliana landsberg
atgtgtttcaggagtcggaatctcgccgtgtttccttccattgcgctcccgccaaatcgaatgatccgttacatgaaagctgtatcggaggaagaag

SEQ ID NO: 174859 - DNA, 459 bp, Arabidopsis thaliana landsberg
aaaccttcccgtgattatcatctggaggagccagcgaatatacgggtggagcacaatgctcgttgtggaggagacgagagacgaagctttttagggataaacaccacgtggcagatgatgcagttgccaccgagtttctactcttcttcgcatcatcatcatcaacgtaacctcattctttcacggactgtttcctccaacatgtccagcagcaacaatgctgtctctgcttctaaagatacggtcgcggtttcacctgtatttctacgtacgagagaagcaacgaacacagagacttgtcatcgaaatggtgatgataataaagatcaagaacaacatgaagattgctccaacggtgaattggatcatcaagaacagacacttgagctgtttccactgagaaaagaagggatttgtcccgatggccagaaagacaagaacattagtggcaaacactga

SEQ ID NO: 174860 - DNA, 97 bp, Arabidopsis thaliana landsberg
atgtcgtgcttgctgcacaccctcgccgcgcgcgcattcgtgccgccagtagcttgtccccgttattctcgtgctgatcaggcacgtcgtcgttcgc

SEQ ID NO: 174861 - DNA, 249 bp, Arabidopsis thaliana landsberg
atgagtgacagctctgagtatcctttacgcctgctcggctacaacgcgctatacaagtacgagatgaaatctatcagattacctctgagaagaaactttcatcttgagaaacccggctatactttaacaccggtaccctagctcgtttctaaacgctggtcgggaagtgaatctgatcggatcgcaaccgagaagtttcacttaaaaacccagtctctcacactggtcgataaaaccgttcggatctaa

SEQ ID NO: 174862 - DNA, 159 bp, Arabidopsis thaliana landsberg
gtggttgaaaagaatatcgaacctaagattgagaaaacaggcacagaagcttcagcttcttctctgagttcgaagaaggtttgtgtggatgattcaaagaaacaaagcagtggttttggagttttgctgacaaagaggaagtttgaaagtgataacaag

SEQ ID NO: 174863 - DNA, 108 bp, Arabidopsis thaliana landsberg
atgtgggatgtggaggatgttataagtgtgaaacctgagtgtaagagtgtttggacgactctgttcgatgagaggtctggggtcacagatccaacaattgctgatttg

SEQ ID NO: 174864 - DNA, 392 bp, Arabidopsis thaliana landsberg
ttcggaactttccaacattgataaaatcaccaactacatcaaggacgccaaggactttggcattgaaatccttcctccggacatcaacgagtcgctctggcctttcaacgttgtggacaacaagatccgctttggattgggtgccatcaaaaacgtgggtgaaggggcggtgattgacatcatcaaagagcgtgaggagaatgggccgttcaagagttttgtggatttttgtgagcgagtgaaccataaaacggccaacaagaaggtcctggaatcactgatcaaggtgggagtctttgatgactgcgagaaactcaatcgcaagacgctgcttgagaacttggaagtgatccaaaactatacacagaagatccaggatgagaaggaacaag

SEQ ID NO: 174865 - DNA, 163 bp, Arabidopsis thaliana landsberg
atgggtgtggtagaagaagctcacaacgtgaaggtgattggttcaggagaagccacgatcgtgttaggtcacgggttcggcacggaccagtcagtatggaaacacttggttccacatctggtcgacgattaccgcgtcgtcctctacgacaacatgggagccg

SEQ ID NO: 174866 - DNA, 423 bp, Arabidopsis thaliana landsberg
acaaaaccaaaggacttacgagacataacccctgaccgatcaaaacccatcgaaccgttaggttccttcaaagaagacacgtgtacagagcggatatcttctatttcatcccgttacgggaaacccgacttgaaaccaactcggtcgagaaacgggtcaagggtcaaaccttttgacccggtaattgggatatcgatcattatattgacgttgatgattatgttagtgtggggtcgactctgtgcgatcctctgtacatccgcttggtgttacgtcctacctcgtgtcagagacgcagccgcgttggccaaacgcaaacgcaacggttctgcttctgtgccggatttgaattcggagtcgtataaaagaaaagtcgttttggacgggtttcttggacggcaaaatcgcgtttcgttgtcatga

SEQ ID NO: 174867 - DNA, 339 bp, Arabidopsis thaliana landsberg
gttcatcgagctcaagggaaattaaagcctagagctttaaaaggtgtgtttctgggctatccacaaggagtcaaaggctacaaagtgtggctattggatgaggagaaatgtgtcatcagtcggagtgttgtatttgatgaagactcagtttacaagaatctgctacctgaaagtgataaagagcagattgaaggtgaactcggtaaagagactactattactgtcaatgacagtgttaaagaaaaaggagaaagttttgtttcaggtggagctattgaggaaagcagcgacagcagtgactcagaggctattgctacagaagaagattcacctatatag

SEQ ID NO: 174868 - DNA, 154 bp, Arabidopsis thaliana landsberg
atggtgctggattgggatcaggcgctcgataccacgcagtttgtgcctgaaatgattaaggacaagatcatcatcatggggttccttggagcggacttgcgcgatacatcatgggatgataaattttttacacccttgaacaaaaattatgcag

SEQ ID NO: 174869 - DNA, 114 bp, Arabidopsis thaliana landsberg
ttaataccacaacatgcagaaggtgatggattgaaggagaggactgtccgtatatctggagataagatgcagattgatatagcaactgacatgataaaagatgttatgaaccag

SEQ ID NO: 174870 - DNA, 1175 bp, Arabidopsis thaliana landsberg
aaagaagagcagcctttagccaaatctgaagctggtagtagtgccagtgagaagccagatcagtcagctcctggtgcgctgtttgaggagaaggcacaatctgctaatgattcgtggaggaaacttcactctgatcctttgcttctcatcaggcagcgtgaacaggaagctcttgccaaaatcaagaataatcctgtcaaaatggctcttattcgtaaatcggtaagtttcttttgttcttctacatggagggtttgggaattgggattacattggatatatgttattggctttcttttccttatacatttactgaccctgttggagagtttcttttacaggtagaagaaaaaggaaagggtaaagatggagacacaaaggagcacaagaaaaagcataagcgtaaaagtggaaagcatcagaagcaatcttcatccagacagcggtctgattcggaagaagattctggtgaagagaataacggaagaaaatctcaccatcagaaaacgtcagggactcatgacagacactatgaaagaccaaggtcagttttagaaaatgagtcaaaaggaagagagagtcgtgataggcactatgagaaacgaaggtcagaactagatgatgggcacaaaagaagagagagacatgatacgcactatgagagacgaaggtcagaaatggatgatgagtcaaaaagaagagaaagtagggataatcactatgagagacgaaggtcagatttggatgatgagtccaaaagaagagaaagtcatgataagcactttgagagacaaaggtcagatttggatgatgagtccaaaagaagagaaagtcaagataagagacgaaggtcagatattgatgatgaaccaaaaagaagagatgctcgaccgaatgagaaatatcgaaatcgctcccctaaaggcggtgtggaaagggaaaatcttaagagttatggtcaagaggataaaaagaggaaagcagaggatttagacagtggaaaaccgaatgaataccagaatagacgccggaaaggtggctctaagctatcagaagaagaaagagctgctagattgaagcaaatgcaaatggatgcagaggtgcacgaggagcaaagatggacaagattgaagaaagccgatgagaccgatgcagtggaagctgataagaacaaa

SEQ ID NO: 174871 - DNA, 339 bp, Arabidopsis thaliana landsberg
atggagaaagctataaagaataaagttgcaaaggctgtggtacctgcagtagacgttatgtttcaagctctaaggtctgttttcaactccttgttagttttctccattggttcatgaaatcttttatctgaaatatcgacactactttatttctaccttagtgaatttggatcaaaagttattccacctaaaaggattttaaagatgcttcctgaacttttcgaccatcaagatcagaatgtccgtgcatctgccaaaggagtgactcttgagctatgccgttggattggaaaagaccctgtaaagtctatattgtttgaaaaaatgagggatacgatg

SEQ ID NO: 174872 - DNA, 135 bp, Arabidopsis thaliana landsberg
atatataaggatatcgctagtatgtctcaaggtcaagatcctctaaatattgatgagtcatctactgtggatgataaagtacctatgtggatctatgtggaaaagattgagaagttgggaggagaaggatcatag

SEQ ID NO: 174873 - DNA, 428 bp, Arabidopsis thaliana landsberg
gagcgcacacgatcggaaaagcacaatgtcgcaacttccgatcccgaatttatggagattttcaagtgacgtcagccctaaatccagtttcggagacgtacttggcaagtcttcgagagatttgtccggcgagtagcggagaaggtgatagtaacgtgacggcgatagacaatgtgacgccgaatctcttcgataactcgatctaccacacactgctaagaggagaagggttactgaattcggaccaggagatgtacacgagcttgttcgggatacaaacgcggcgaatcgtgagcaagtatgcggaggatccagtggctttcttcgagcaattctcgaagtcgatggtaaagatggggaacattttgaactctgaaagcttggctgatggagaagttagaagaaattgcagatttgtgaatacatga

SEQ ID NO: 174874 - DNA, 131 bp, Arabidopsis thaliana landsberg
atgacccgtctgcacctgttgctggggttgtgcctggcgatgctgctgggcggctgcgcgacctccgccaacgacccgctggcgccaaagaccgccggtgacatcgacctcaagcgttaccagggcaaatg

SEQ ID NO: 174875 - DNA, 415 bp, Arabidopsis thaliana landsberg
atgatcttcaccttgctggaagagcagatcggccacgccgaacatgcctcccagcacgacgcgctgaccggcctgccgaaccggcgcgtgttcgccaaccggctcgagcacgcgctccggcgcgcgcgcgaaagcggcgggcgcatggcgatgctggtcatcgacctcaacgacttcaagcgcatcaacgacacgctgggccacgcagccggagacgccttgttgcacttcgtggcgcaacggctccagcagggcgtccgcgcgggcgatacgctggcgcggctgggcggcgacgagtttgccgcgatcctgcccgacgtggccgatcgggccgcctgcgctggcacgtgccgagcgacctggcgagaagccttcgatgcaagcaccgagttccagggcctgcagctgtccatcg

SEQ ID NO: 174876 - DNA, 46 bp, Arabidopsis thaliana landsberg
atgcatccggaagtcttccgagtttgtccgttacttgatcaggaag

SEQ ID NO: 174877 - DNA, 188 bp, Arabidopsis thaliana landsberg
atggggatgaaatttctgaacaagaagggttggcatacggggagtctccgtaacatcgagactgtatggaaggctgagcagaaacaagaggctgagcagaaaaagcttgaagagcttcgtctccagatcttgcaggagagggagcgttctgagtttcgtgctctccaggaacaagccggtctcatccc

SEQ ID NO: 174878 - DNA, 204 bp, Arabidopsis thaliana landsberg
gacctcgacaacgttggaggaagctctgttattactacaaacggctttatgctttatgacggtcttcatcggaaggaatatgccgcgtgcttgatagagaataataatacgaattttatcaggaacgaaccaggtgaatggaggaaaatggcattaatgaagtttatttttgaagatatttcaaatgataataacagagttgcg

SEQ ID NO: 174879 - DNA, 176 bp, Arabidopsis thaliana landsberg
aaagcggtagtaaggctgggcaaaaaacacccgaatcgattatccgaatcggaaccgacccgaaagttggacccaaaactgtatccgaaatcgaagattttttctattggatcctaaattcctttacccgaaatcgagtccgaatccgactcgaatccgaactcaaaaatacctga

SEQ ID NO: 174880 - DNA, 558 bp, Arabidopsis thaliana landsberg
atgcagtcggaaacttaccgaaaaatgaaggcggttactgaagattactgggaaggaaggtaagtgtaacttttccaagccttccttttagttttcatgccgctaatttggaaatttctgcagactagactagaatattaagccacaacattatctttctttctagaaagcatgagactgtgatatgagcattagtacgcaaccaaactgaagtgtgcctaaatgatttgatgattaatttaattgccatgttttgttttgttctttctaacaacagctttgctcgaacaaatgttctctggctaatttatctcgtggatatcttacttaccaagaagtcatttgtaagtttgcaagacacagataattattagttgcatcaactaagaacagcttattgatactcctttcgttcttgtgtatatgttttaggaacggtcttcaaaacacgaaagagaactacggtcactaaagaagcgaatggagaagtatgaatcagctaaagaggctgtgtcagatcctttcttctcagatatgttgatggaccaaatatcatga

SEQ ID NO: 174881 - DNA, 663 bp, Arabidopsis thaliana landsberg
aagctgctctgcttgattgggccatcaatctaatggcagatgttgttcagtatgaacatctaaacaagatgaattcacgcaacatcgctatggttttcgcaccaaatatgacacaggtgagtctgcaacaacaaggttgattatcaatgtttaactcggggtcagatgggataaaatgattgagaaacacttgtattgtagatggatgatccactgacagcactgatgtatgcggttcaagtgatgaactttctcaagacactaatcgaaaaaactttaagagaaaggcaagactcagtggtcgagcaagctcatgcattccctttagaaccgtctgatgagagtggtcaccaaagcccttcacaatctttggcttttaacaccattgagcagagtgaagagacgcaatcagacaacatcgaaaatgctgaaaatcagagttcaagcagtgagatatcagacgaattaaccctagagaacaatgcatgtgaacagagagaaacagactttggaaaatacagaacaggaagattgagcgactcgagtcaacaggtggtgctgaatctagatcctccagctcagtggccagtgggcagaacaaaggggttgaccaacttgagccgtgtaggatcgagggtagagcgtactgaagcttggcggtga

SEQ ID NO: 174882 - DNA, 315 bp, Arabidopsis thaliana landsberg
atggcgaatttgagtttgagcttgtatctaatcctccggatttacgctcttttgttgctgttcaatgtctccttcgctaaaacacttaaacgagacagtaagctcttccaaatttgtgatttttagtcgggtttttgctttttctgatttgagtttttggttttggcagtgaaagctttgaatgagataaagaaattggtgggatggagattggtatactctcgggttggagatgatccccgtggcgatggagatttgcctccgtggtctggagttacttgctctaaagttggcgattatagtgtcgccgtctag

SEQ ID NO: 174883 - DNA, 155 bp, Arabidopsis thaliana landsberg
ctccttcgatcgtggatagtgagacggtgatcatcccagatgatgaaggtgatgtcgggcatgaaccgggagcctcttccgaggaagtccctaccgtcgaaccgaatgaaaccgagccagttgacgttaagctcgagatggctacggatttatag

SEQ ID NO: 174884 - DNA, 675 bp, Arabidopsis thaliana landsberg
atggagagagttgatcaccttgccgatgagaggaacaaagcagagttcaacgtcgacgatataaagatcgtctgggccggttcccgccacgcttttgatgtttcaaatcgtatgtctcgcctcgtcgctaatgatccggtaagatttctccttcctcctttctctgtttttccggcgacatttccgatgtgaatttcgaaacttttgccatgttaaggtctttgagaaaagcaaaagagctgtgatgagtaggaaagagttgttcaagaacacgttgaggaaaagtgttcacgcttggaagttgattaacgagcttcgtctctcagatgaggaaggactcaaattgagatctttcatggatcaaccaggcttcttggatctgcattgggtataacacaaaatttacaatttcccttgggtggtttaattagaattttggtgttgaattggttttgtggtggatagggaatgtttgtgcctgcaattaaaggacaaggcacagaggaacaacaacaaaagtggttgtctttagctactaagatgcagataattggatgttatgctcaaactgagcttggtcatggctctaatgttcaaggccttgagacaaccgctacttttgatccaaagacagatcagtttatcattcacagtccaactcagacatcatccaaa

SEQ ID NO: 174885 - DNA, 79 bp, Arabidopsis thaliana landsberg
gagcccttccttcaccacctacgtggcgatggacgactgggtggataactgctcctcttactacacgacgtttacctaa

SEQ ID NO: 174886 - DNA, 605 bp, Arabidopsis thaliana landsberg
tgatccgagaaagcagggtaaaaaaggtactagtggacgggggaagcaacatcaacgtaaccttcccctggacgctccaaggcttgggagttcccctcaaagagctccatgagtcggacactcctttctttggcatcgtgccgactgaaggagaatatccactaggactcatctacatgtcggtcaccttcagaactccggaaaactacagaaccgagttcctgaggttcgaggtggcaaactttgactgcgggtacaacgccatcatcggcaggccaggattggcaaagttcatggccattccacattatacgtacatgatattgaagatgccgggaccacaaggaatcataactgtgcatgctgacttccaaggcaccgcagaatgcttccgagtggccattcaggctaccctcaccactaaaccaccgacgacttcctcctcgcagtggaactcaaagcctgagaaagacctcgcgatacccgcgaatgaagctcaagccctgacctctatgcggccgactgaggagacaaagagaatcaacctcaagttcgctgacgagcgcaagactcccatcatcagctccagcctagatgataaatag

SEQ ID NO: 174887 - DNA, 299 bp, Arabidopsis thaliana landsberg
tttggatgatagtggaagagagcttcatgattctgatgatatatctcatggagaaaaaattgtgtctatagctaatccggtgaatcaagagtttaaagaagaggtaaattctattcttgcatgctactccattaccagtactgtcttttgcttattatacctataatcacatctctttcctttaaatgatgtgtattgtatcaccttagggatcatcagttcaagctacgaagatttgtgaatccacctccattgagattcacttgcctagcccggatccttattcggactctgactaa

SEQ ID NO: 174888 - DNA, 97 bp, Arabidopsis thaliana landsberg
ggacggtagcgagttgtctacacgagatctacagaaaatagttcaggctttgccgcaatatggagaacaagttgacaaactctccactcatgtagag

SEQ ID NO: 174889 - DNA, 686 bp, Arabidopsis thaliana landsberg
gtcatttggaagaactaaatgcaaacttcaacaaactaatcagattacccgactccattggttttgaactcaccaatctaaggaagctctctatcaactccaacaagctaattagtcttccaatctccattactcacctcacatctctccgtgtccttgacgcccgtctcaactgcctcatgattctaccggatgatctcgagaatctcatcaacctcgagatcctcaatgtcagccagaatttccagtatctttccgctcttccatcttccattggccttttaatgaacctcattgagctcgatgttagctacaacaagatcactgtcttgccagagtccattggctgcatgagacggttaaggaagctgagtgttgaaggaaacccgcttgtgtcgccacccatagaggtgatggagcagaatttgcaggtggtgagagagtatctgacacagaagatgaatggtggctcaccaaggagtcccagcaaaaagaagtcgtggggattcggtaaattggtgaagtatgggacgttcaatggcggatcaagaagctggaatagagaggagagagaagggttcatcatgcctgagtaccgctccatcgacagtcttgcttcgcctaggtattctggaatgttctctccacgtcgtcttttttctccaagaacctatttcagcagataa

SEQ ID NO: 174890 - DNA, 105 bp, Arabidopsis thaliana landsberg
gataagattaaggtagatgcatgtaacacggacctccatcaacttattgaccatggcccagtagataaggaaaacgactgtgtgaacgaggaagcaaaaatttga

SEQ ID NO: 174891 - DNA, 54 bp, Arabidopsis thaliana landsberg
atgggcttgtccgctaggaccgagggtaaagaaactatgtccaagcatgtcccg

SEQ ID NO: 174892 - DNA, 843 bp, Arabidopsis thaliana landsberg
attaatggatcaccacatggatatattacaccaacactgtggatacgacaaggagatccgcggccaccatatttattcatcctatgtggagaaagttttcgtcacctaaaaaatggaagagcgtcaagtggagatcttcggggagttcgcattggcaatggagcaccagcaataacccatttacaatttgcagatgattctctatttttctgccaagccaacgtacggaattgccaggctctaaaggatgtgtttgatgtttatgaatactattcgggacagaaaataaatgttcaaaaatcaatgataaccttcggatcgcgggtctatggttcaacacaatcaaggctaaaacaaattctggaaattccaaaccagggtggaggaggaaaatacttgggcttacctgagcaatttggtcgtaaaaagaaagaaatgttcgaatatataattgaccgagtaaaaaaacgaacgtcaacatggagtgcacgtttcctctcgccagcaggaaaagagattatgctaaagtcggtcgccctggcaatgcccgtctatgcgatgtcatgcttcaaattacctaaaggtatagtttcggagattgaatcattacttatgaatttttggtgggaaaaagcttcaaaccagcgtggaatcccatgggtagcgtggaagagactccaatactcaaaaaaagaaggcggcctgggctttcgagatctcgcaaaatttaatgatgctttacttgccaagcaagcatggcgtctcatacaatatccaaactccctgtttgcacgtgtcatgaaaacccggtatttcaaagatgtttcaattcttgatgctaag

SEQ ID NO: 174893 - DNA, 103 bp, Arabidopsis thaliana landsberg
gacaatggatatcatctacgaggccagtcaaggtcgtattcgtagctacatttgccatgtcgagtttgagtttaatcgattctatggaactaccacaatttga

SEQ ID NO: 174894 - DNA, 971 bp, Arabidopsis thaliana landsberg
gtacaccatctatatcaaacatggaatttatgatgaatctgtgattattgataagaagaaacctaatgttacaatggtcggtgatggatcacagaagacgatcgtgacgggaaacaaaagccacgcaaagaaaattcgaacgttcctaacagcaacatttggtatatcctgttttcctaagagtgcttgtgctaggtgttaacgaacgaaaagagacaattagggcttgaatttgaggtgcaataaccatatttgtgcttgatttacttatagtggcacaaggagaaggattcatggcacaatccatggggtttcggaacactgctgggccagagggacaccaagcggtcgcaatacgtgtccaatccgaccgatctgttttccttaactgtcgatttgaaggctaccaagacacgttatacgcatacactcaccgccaatattacagaagttgtgtcattatcgggacagttgatttcatcttcggtgatgcggccgcgattttccagaactgtgacatctttatcagaaaaggtttaccggggcagaagaacacggtgacggctcaaggacgagtggataagtttcagacgacaggctttgtgatccacaactgtacagttgctccaaacgaagatcttaaacccgtaaaggcccagttcaagagctatctcggccggccatggaaaccccattctcgaacagtcgtgatggaatcaacgatcgaggatgtgatcgatcctgttggttggttgagatggcaagagacggattttgctatcgatacattgtcttacgcggaatacaagaatgatggtccaagcggagcaaccgctgctagggttaaatggcctggatttagggttttaaacaaggaagaggcgatgaaatttacggtggggccattcttacaaggggaatggatccaagcgatagggtctccggttaagcttggcctttacgatgcttaa

SEQ ID NO: 174895 - DNA, 398 bp, Arabidopsis thaliana landsberg
atgaaaacgtacaatattcatccgttttgggaggaaagatactgccctgttcatgaagctgatggaactcccaaatgctgcagttgcgaaaggttagaggtgagtttacctttcaaccaacaaaacacgggaaaggggaatgatatgagatgaataatcagccaccatatcgttaaaacttaaaagaaggaaactagctagataatcccactggtttgagttcttatgatcttggctaattttctttgcagcctaggggaacaaagtatggaaagcttagtgatggtcgatggctatgcctagaatgtgggaaatccgctatggattctgatgaatgccagcctgtgcactttgacatgcgtgatttcttcgatagcttagacatgaagattgattag

SEQ ID NO: 174896 - DNA, 326 bp, Arabidopsis thaliana landsberg
atggatgtgggaaatactgatcaggtaaatgcagcaattaattattctactcttgtatatttttttctattttagcttaggatgtaaacgagttggtttcatctttgtgctttttttttttgtttcttccaggcctttgaagctatacaacagataatgagattgacccaaaacaagagtatcagtgttgttttattggaccgtttaatgacagacttggaaaataggaatgtatcatacgaatcttcttcaaatgaatcaataaagacaaaaccaacaacgactgaaagactctacatagagttgttgggaaaattattcagcag

SEQ ID NO: 174897 - DNA, 846 bp, Arabidopsis thaliana landsberg
atggcttcgagggatggtaacaagaaaaaaaagaatctcaaagtttttgtcagagatcgttacaacagctttcgtgttttgcctatcgatgattctggaagtaacgaagatgggaagcgtaaagaggttattgaatgttcttcaagatcctctgtttttgaaacaggggaatcttggaagattccttcttcttatccactagagaccaattccaatccattttatattcctggtcaacctgagacctcgtcaagaaatggtgtcagcatgggagcttcttctctggttcagatttgggaagctcggtcgcagcagtcaagctcgagtctaagtcaatcgctactcgatagcaggacgagttctgaatcaagtctctccgactttctcaacgacgaggcgagaaaaagcaacgaaagcagtggtgaagaaatagattggtttcctcaatcagatatgaataatgtttcaaattcttatgagaatgatggagaaggaagatgttttcttgagctggctagttgtagtactcctaggataagaggacggcaagcaagtgaagatgtttgtaagatgattttgcgtgaccgagaaaatgagcttgaattgctcggtggtcgctacgcggtttcaaagttctcgcctcgcggttgtgggcgtcttcaggtacttttattttaccctcaacttgtaatttaatagattacactttagatgatgttacataaaaattgactacttccttattgtttagtatatgcttatgatccgaagtttggaaaggtgcattgtgattcaagaaagatatcggtcgaaatcagatgtaaaccggttttcacgaggatctag

SEQ ID NO: 174898 - DNA, 318 bp, Arabidopsis thaliana landsberg
aaggccatcgagctcaagtcttgcaacgccctcctgctcaaggttaaccagatcggtactctcaccgagtccatccaggctgccaaggactcctacgccgacggctggggtgtcatggtctcccaccgctccggtgagactgaggacgtcgccatcgctgacattgctgtcggtctccgctctggccagatcaagaccggtgctcctgcccgttccgagcgggtcgcgaagctcagccagatcctccgcatcgaggaggagctcggtgagaacgccgtctacgccggcaagaacttccgaaactctgtcaacctgtaa

SEQ ID NO: 174899 - DNA, 68 bp, Arabidopsis thaliana landsberg
atgaaacttattgaaaggcagcgacgaatcggatacattatggattcaatgtacacgggctgtataca

SEQ ID NO: 174900 - DNA, 278 bp, Arabidopsis thaliana landsberg
atttggatgattatgatactatgttttacaatgcctggaatgtggaaatttcgccaactcgtgttacggatttcagtttgatgcaacgtttgcagatagaaaaaactattttaggattgctagatgacataggtgtgggaaccattggttttaggcagtacgatttgtatcctgagctagtgcggcagtttatggcttctgttaggatttactatgtgaatgacaaaaagcgcgatgctcaggaaggagctctgatcttcttcattcacgatgtctga

SEQ ID NO: 174901 - DNA, 38 bp, Arabidopsis thaliana landsberg
atggcagcccgttctggaacgagctgtcgatcaccccg

SEQ ID NO: 174902 - DNA, 510 bp, Arabidopsis thaliana landsberg
gtggtgggcgccatcaaaatttgaccctgtaaaatctcctatgcttttctttgaaggcggtcggccaatacttccacctatacctcctgctactggcctagaccgggttctaaacaatatggtatgcggtctggatttctctgttttcctgtgttactataacgcaacttgagatatttgatactgccattgactactagataatctgttttcaaaatgaacatgggctatgacatttttgggcaagtattgcatgactttacagcgttttgtattgaagaatcagtttttgagcaaacaccaaactgtgcgatatgataaagtaatggtagtgaaatattctgatccttatacgacgttccgccattgtaacaggtaaattttgtggagaaaacaaagcgacctggagggatcataatcttccggacacaatcacctaggcactttgaaggaggtgactgggaccaaggtggtacttgtcaacgactgcaacctttgttacctggaaaa

SEQ ID NO: 174903 - DNA, 660 bp, Arabidopsis thaliana landsberg
gtctccagaacctgaagagaagaaacaaaatatgagagggccgaagaagggggcagccaaggcagttgccaaggctctcaaagacttatctccaagtgaaaagaagtgagtatttacttctcttctcactaccttcaaaaacactagtaaactgagtttttttcttttgtatgtgtttaggtcttcggaagcagctgaagaggagatatcaaatgggatagtcaatgcaatcgataagggtctcaaagacttacctccaagtgaagagaagtgagtatttacatacttcttctcttctcactaccataaaaagacatttgtaaactgagctgatgtttttgcttttgtgttggttcaggtcttccgaagccaaagtggagatatcaaatgggatagtcagtgcaatggataaggatctcgaacacatatcttcaagcgaaaagaagtgagctttttcttgtcttcttactacctgtaaaaaaatactagatttttcttcgtctaagctgagtttatcttaattttgttgtgatgttcaggtctacggaagaggaaggggtgaaaagaccaaatattgtgaggacatatgagcggagaaaaaagctgggaagtgaagtaaccaacgcatacattgacagattagaaatggagaagatgtag

SEQ ID NO: 174904 - DNA, 75 bp, Arabidopsis thaliana landsberg
gaagagaaagaggaagatgatgatgatgatgatgaagacgaagaagaagagaaaaagattgattttgtgatgtag

SEQ ID NO: 174905 - DNA, 84 bp, Arabidopsis thaliana landsberg
ttagatctattaggagactctggtgttggtaaaagacgtattgaccttctatatggacgtggtcactttgacgctccatctcag

SEQ ID NO: 174906 - DNA, 190 bp, Arabidopsis thaliana landsberg
gctactccaaagaataaaaagggacggtattatggtgttggttctattccaattatcccatctacttctgttgatcgacatgctaagaatgattctgttgatcgggagacctatgaagcggagaagaaacagtatgacgaacttctaaaacggatccatgattatttctttgaccttatcgctgaagatg

SEQ ID NO: 174907 - DNA, 213 bp, Arabidopsis thaliana landsberg
accgcttcacgcgtcggcgagaagcttgggttacgtttaagagagcttggtgttgacgtagtctccattgatgcagacgaagaaatctctcggcctattcaccatcgcaaaagagttcttccgttgttcgattccgttcgtcgtaccggtatcagagtcgacggaactgagcaattgaacgatattagtgtcccaattattcccaaaaattag

SEQ ID NO: 174908 - DNA, 75 bp, Arabidopsis thaliana landsberg
atgccggttctacggggactactgaacatacccttgcgcgagcagcctgtactcgatggattcaccacagaacgg

SEQ ID NO: 174909 - DNA, 247 bp, Arabidopsis thaliana landsberg
atgggtcgtggctcctctattgtacccgtcacatctttcaaaggaaaacagagttttggtcgtggtgcatcagccaatcatgtcgcaaatatcggagaaagtacgactgctgcaacaagctcgatgtctggttctcagttaacagaagctgaccgtgtcggaataagtggcctgaacgatgaacaatggaagcaattgagacagatgcttgaagaacgaaatctcaattccaccaataccaaatccg

SEQ ID NO: 174910 - DNA, 142 bp, Arabidopsis thaliana landsberg
cgaagagggtgacgatgaagaagaagacagcaacccttggaagcgtgtgaagaacgagcccgatgtggatgttaagaacgaggcatccatctcgaaccccgaaccggcgatgaaggaacctgttcctgaacccctttcttaa

SEQ ID NO: 174911 - DNA, 603 bp, Arabidopsis thaliana landsberg
ggatcaaggattgcacaagttagtgtttgatagagggggattaccagagggaactgaactaggctactatgctcgtggacaggtgactaactaccttatcctctgtgtggttatatggttgtatccctcttcacctggccttctcttttaagacatatatcactgtggacagaaattgctcggaggctacaaaatgggcgctggaatatattgttactgttgcaagtgcgaggtatttttggatattttacaaaccacatcataccctatcagttagttcttaatttggcattttgcgtgtaggtgagcccctctctgttcgaagctcatgcaggctgggcatctcgtagaaaaccgtgcgaatttgctcttttgtctcttgtatattggttttggtacattcccttagttactgattattctctatttgttgcagttatttttacatatatacatctaatggtgtatctcttcacgaatgggcaactactttctcacatggtcggaaatattctgctaatgataataacgacttgtgtgttatttgtgctgatggtggaaatcttttgctctgcgatagctgcccaagagctttccacatag

SEQ ID NO: 174912 - DNA, 141 bp, Arabidopsis thaliana landsberg
ccttatggaactgacctcgatgtacggagagtttatcggaaatttgatttacaacagttaggcgaaatcttgcgtgtcttctccatccacaaggcaaatattgaaaatcagcaacaaccagaaacagagaaaaataattag

SEQ ID NO: 174913 - DNA, 348 bp, Arabidopsis thaliana landsberg
gataaaggatttttgagggatgatgatggtagtgtctacgataaagcaggacaacaacttgataacaacgggttgttatccttgagacaattttggtggttgaccagcaaccacaagacagataaactggaaatctcgttgtcgaacaacacaccgttggtgtctatcaacacaacattggtggcaaacgacacccacaacacaacattggtggcatacaaggtaaacagagtcgttggcccacatggtaacaatgttccacgtctaatagttgcgaatgctcgtgccgtgactcttggtgactacaacatgcatggcctattctatgcaaaacgatcagtgatatga

SEQ ID NO: 174914 - DNA, 69 bp, Arabidopsis thaliana landsberg
atgacttccacaaacttgccgttggttaccgaagatgaaaagcttccagttggaactggcagcaaccct

SEQ ID NO: 174915 - DNA, 130 bp, Arabidopsis thaliana landsberg
atggttgatccaaatcctcaaatccaccgtgctccgccgcctcacacggcgcagatccaaactcgcggaaccggatctaactacgagataaaccacagactaaagctgaagcataagcaattcgagagag

SEQ ID NO: 174916 - DNA, 139 bp, Arabidopsis thaliana landsberg
gcgcggctcagatcccgacaagtgtacggctaagatcacgaatctcttcttgaaagtaatcctccgcgattacccaatcggttatcggttcggttccactcggtttcggttctttcgatcgattataaagtttatttga

SEQ ID NO: 174917 - DNA, 134 bp, Arabidopsis thaliana landsberg
ctcagcggtatattgctccatatgagtccaataggtcatatgttcgtgtcattgtggacgcggattttgcatcattattttctaacgaatcgatgtcgttttggagatctaaaaacgatgtcgtttcgatttaa

SEQ ID NO: 174918 - DNA, 424 bp, Arabidopsis thaliana landsberg
atgctgagccagcgcatcaccaccttggagcagcaggtggagatccgagacaacactattgatgtcttggagaatcagcttcacgatgtgcagagggaactcgaggaagcgaatgaccacttggacatgcaccacctggagatggaggccaatgaagcaggaagcgagggagaagaggctatcgaggagctaggaccagcccctggtgccaatggtgccaatgatatcttgtcgttcgaactgtgagttgggataacaatggcgacaatctctgttttcagatggcagctaggcagcgttgcgggcattacgagcaggtttttcccgccacctcctccagctcccacagtgcaggagctgatggcccaacagaatgagattctgcgacagctcttgcagcgccagccccaccctcagcagcatg

SEQ ID NO: 174919 - DNA, 66 bp, Arabidopsis thaliana landsberg
atgcaccggagcgccgaggtaggccagcgggatgccagcagcgcgctagcgagccccacggcgccg

SEQ ID NO: 174920 - DNA, 1212 bp, Arabidopsis thaliana landsberg
atggtaagtgactctgcttcatcatctgaaccataacttacagactaatgatattttcttcttttcattactacgaagatgtctaaatgaatttgcttcataccattaaacttatgatagatcgaagaaatccactgtatcggctttttaggcaaactcctagagaccaagataatccagtttctcaggttcgagcacgggcaggtatattctgctctttgtgtcagtttctatgatgatcataccaaacctttaatgaccttactttcctattaaacagatttattctgctgaagtctctgtgtttcttggcgggaataaaccttctagaactgcggatttacgtggtgacatcagtgttaatttttcatgtgatccagaaatctcctctaaactggtatgtccatcttctaacactatctgacgggtttctctatatctttggctgcctgttggtcaccaaagccacctctgtgtccttcaggttgatttagctttagaagaaattgtacggcttcaaaaggaaggcccttcgcaggaagacatttcagctatccttgaaatcgaacaaagagctcacgaaaatggcatgcaggtattttttattgccataatcatcacaaatccatcacagccaaaaaaccataatttgctgcagaaacaaaactgatttaattttgttcttgtcaggaaaactattactggttagacaggatcatacgtggatatcaatcaagggtttacgctggcgatttgggcgcctcttgcaaggtcagtttagaaaacattttttgtcaatactttgatcattttttataaacacagtcttacgaaaagggaagaaacttctctgtggtttttagattttagaagaagggcgtttgcgaatgagagagtcacttgcaccacaaacagcacaagctgcattacagcgaatccttcctcacccgtgcaagaaacagtacactgctgttattctcatgccgcagagatctcgttttggatttctttcatctatctttagttcacgatccgagggcccttatatccgtgataccaaggtcagtgttcatctgttctttgtcttgtctccgtaaatgtaacattgcaatcactaagatatgaatttgtctctttggttactagattttggctggcattgcgggattgggtgttgttgtttttggcatctggagatactctcgcaagtag

SEQ ID NO: 174921 - DNA, 369 bp, Arabidopsis thaliana landsberg
gggggcaggcgcactaccgtgctgagtcacgacggcgccgacctggcagccgccttgcagacgatccgcgaaatcggtgacgaccgggccatggacggcgccgtcgaccgcgcctttcctggcagcagcatccagatcgccgacgtcggcgggcggtttgagctgcgcctgcgccagcccggcctgatgcggcccctgcgggcggccgaagtctccgacggaaccctgcggtacctgctgtgggtggccgcccttcttaccccccggccgcccgagctcctggtgctgaacgagccggagacaagcctgcaccccgatctgaccgggccgctggccgacctcatcatcgccgcctccgccagcacccag

SEQ ID NO: 174922 - DNA, 412 bp, Arabidopsis thaliana landsberg
gcagaagaagtcagatgcagagagacatccaaagagacggagaaaaggattaaagaactgctcaggagatgtatgtagacaagagaatgagactgtgtgtgaaaatgatccgaacaatggaggagaggagaggatgttggcattggaatgtcatgacgagatccaagacaatgcaaaggagaagccaaaacaaagacgcaaaagtgttgcagaaactgtttgtgaaaatgaaccaaacaatggaggagaggagaggatgttggcattggaatgtgataacgagatccaagacaatgcaaaggagaaacgaaaacgaagacccaaaagtgttgcagaaacatctaacaacaccactggtttaaaaaaacttacgcctaggagaaggaaaatatctgcagtatgttcctattaa

SEQ ID NO: 174923 - DNA, 57 bp, Arabidopsis thaliana landsberg
atggcatctcaactcgtagtggtagtagaagaagaagatgaggaagaagcagagagg

SEQ ID NO: 174924 - DNA, 1038 bp, Arabidopsis thaliana landsberg
atggaagatggtcaagtgcttctatactcggtgagtccatctttttagcttaccagtcttcaaactcccctatagagatctttagtgaatgaccaacacctgctttttgtatttttcagagttctgtgaatggcaatgtaccaatgattcccttcccttggctagtcttcaacgacaaagtgaaagttaattctgtgtttctgcgagactctactgctgtatctgactctgttcttcttttgtttggagataaaatctcttccggtggatttgtaagttataatcacatcctattttgtcaatttccttccttgttgttcttattttcacatctgatttacatcttgtcgtctctgtgatccccataggatggtcatctcaaaatgcttggaggatatctggagttcttcatgaaacctactttagcatatacatacctttcgttaaaaagagagctcgacgaacttattcagaataaggtacagttccaaccgtagtctttagtatacaccttttgttgtttttaccctcgttgacaaagtttgtttctcgtcttttctacagcttgtgaatccaaaacttgatattcaactatacgacaaacttatgactgccattagattacttgtgtcagaggaccaatgtgagggcagattcgtctatggccggaaagctctaagccctacaccaacaaagaagttaaaagatgtaggggctcagcttcagaacagcggtggtgaaaacaacaagaaccaacttcagacattacttgcccgagcaggacacggatcacctgtgtacaagacaagacagcttaagaacaaccagttccgctctatggttaccttcaatggattggatttcatgggaaagccatgtggtagtaagaaaaatgcagagaaggatgcagctcatgaggctttgttgtggttacaaggcgagtccaagtcaagtcttaatgatcttaaccacatgtcaatgctcttaaagaagaacaaaagtaaaaaccacgccaaggcatcaactaaatggggttaa

SEQ ID NO: 174925 - DNA, 102 bp, Arabidopsis thaliana landsberg
atgttgacacaaaaaaaaagttttggacgaataagtgccgtcatcaatccattggattacatcatcaatccattggataacccttggtttgatctctatgag

SEQ ID NO: 174926 - DNA, 377 bp, Arabidopsis thaliana landsberg
atggcctcctcaaaattcgttctttttgctatcctagctctgtctcttctactttccggttagtatctctgttaactcgtaaaatccatttgtaacaaacaaaaaaaaacatttgcgttcacaagaaattgaatagatagttgattacttgtgttgtgtaacttgcaggtaccgaagcaagaaagaccgtgtggcctagcagcgaattagacccaaagtgttgcagcaatcagccagaatttggtatatgtgattcaaaagaagatgatgaaagatgcgcccagatgtgtctggatggttgtcccactaacaaaggtggtggctgccaacctattactgaagcccctggtgctgtttgttcttgttactgcgcttaa

SEQ ID NO: 174927 - DNA, 447 bp, Arabidopsis thaliana landsberg
aacgtcatcttcaccgcggtaggcgccgggcccgccgtcaccgccggcaaggccggcgtcgaagccggctggcagggcatgcgaggcctgttcgcccgcgaagccctcgaggccggtggcggtagcgccgccggcctgaccgccgacaacgtgctgccgcgcgcactcacccaagccgaaatccgagctgaggccgccgccgacgatctcgccatccaccaccccggcgtggacgccccagtcacaaccagtggcgatcacctcccaccgttaacgaccgccgaccacggcccaccggtgcttgcccaggaccacgttccgcacagcgccccacatgtgccggcgccagcaaccgaggcgcacccgttgccaccggattcgccgctgttcgacggataccatcgcgtcgaaccgggaccgcagttcaccgacgccgctgggacctga

SEQ ID NO: 174928 - DNA, 87 bp, Arabidopsis thaliana landsberg
atgaaagacctagcagctagggattttctgaacgttagtcgcgatgagtatgcctacaatcagcgcttcaaggatctaattgttcag

SEQ ID NO: 174929 - DNA, 373 bp, Arabidopsis thaliana landsberg
  unsure (1)..(373): unsure at all n locations
atgtgtccctcacctcgtacggatgctgatgctaatgccattgcctcccccaatggccgccagagtgcctatgctggcggggagctaagcccctctgacagcgaggatgcgggcttaggtgnnnnacattactcctctggcggcattggtgcagctggggctgggattgccgaccttgacgatgctgacgacgctgacgaagctgacgatgtgatcggagtcagcatgggatatgatcagactcggctcaagtctcgtacaacgcctgcggaggagaagacgcgcatcatagagcgcaatggtggatatagcggggatgaagggctctttgcggcggacataacagaggaaccggaatcgctggcggatgatg

SEQ ID NO: 174930 - DNA, 129 bp, Arabidopsis thaliana landsberg
atttttcatattggggatatgacgggtaatcttcgacaaaacacagataacaccgaggaagctgatacaaatgtttatactgaaacatcaacatgggtagtaattcatagcggaaagagcaagaagtaa

SEQ ID NO: 174931 - DNA, 282 bp, Arabidopsis thaliana landsberg
ctactgtacttttgtgttattgaccctttctcttttttcgatgaacttcttgagattgaagacgacgaagatgaaggcactgagcatttggtggatgagctccgtacgaatgcaggagcttttgaggaggaagcgcttgtggagaagcttctagagaacttggatttagatgaagttgaagaagatgaacacgacgcagctaatgcatcctttttcgacagcctccacttctcgtccatctttgtgttgcagaagagagagggagagaatgagagcttctga

SEQ ID NO: 174932 - DNA, 135 bp, Arabidopsis thaliana landsberg
atggcggttcgtaaagagaaagtccaaccattccgcgaatgtggaattgcgatcgccgtcctggttggaatctttatcgggtgcgtctgcactattttgatacccaatgatttcgtcaacttcagatcatcaaag

SEQ ID NO: 174933 - DNA, 396 bp, Arabidopsis thaliana landsberg
atgctcgctgcatacggcatcgtcacccgtgaggtgaacgggaactacatgagtaccaaccggcatcgggccacgatcgatgtgggcgaggtgtcccaggagatgctgaccgccgcaaaggcctttcctggcgtggcagatgcagaggcccgatcggtcgttgcggctcgcgtcaaagttgacggtgagtgcatgcgcatgttgctcttcgtcgtcgacgacttcgccaccactcggatgaacctgttcgccccttattctggcgccgaggcgccggcggacggctcgatgctggtcgagaaggtcgcagcgccgctcatcggcgcggtggaaggcgagaccataaccatcaagacgccgcacggcccccaaacccctgtcagagtggacgggcag

SEQ ID NO: 174934 - DNA, 1266 bp, Arabidopsis thaliana landsberg
atgtttgagagttcagataacagtaaaaagctacatgggaaactcttacaaagaggatctgagactgttctaggaacggctgctaacgagagggaacttttcttgactaatgaatgtcttactgttcagctcaaggacataaaaggaacagtaagttttgagattcgatcaaggccgtggggtcatcagtataggaaagagcacatggctgcagataaacttgaccgggcaagagctgaggaaagaaaagctaaagatttgccaacagaatactactgcaaaagcttgtactcacctgagaaaggtggattctttagtcttccaagaagtgatatgggtctaggttctggattctgcagttcatgtaagataagagagaatgaagaggaaaggtcaaaaactaaactcaatgattcaaagacaagatttctctccaatgggatcaagtattctgttggggattttgtttatcaaatccccaactacttaagtaaagataggggtaaaagaaggccagtgtttaagtatggtaggaatgttgggttaagagcctttgtggtttgccaaatactggatatagttgacctaaaagaacccaaaaaaggtaatacgacttcttttgaggtcaaagtgagacggttttataggcccgatgatgtttctgcagaagaggcttatgcttcagacatacaagaggtaacaactatttcttacgtgaaataaaaaattatttcgtatgttacatatttgataatgttaaaaggttgatcttacagttttttatctttctacttttggaaatttctttaggtttattatagcgaggacacatatattcttcctccagaagctataaagggaaaatgcgaagttatgaagaaaactgatatgcccttatgtcgtgagtatccaattttagaccatgtctacttctgtgaccgtttttatgactcatccaatggtgatctcaagaaggtatatatttaaattaattttctaaatagttttcaaagattatgatatattattgttgtttatgtaaaaaagttgaaccgttgtttctcttaactattatgtaacagttgccttacaatatgatgctgaagttctctactattaaagacgacacacttctaagggaaaagaagactgaaactggttctgcaatgcttctgaagcccgatgaggtacctaaagagaaacgtctagctacactagatatttttgccggatgtggtggcttgtcttatggactagaaaaggctg

SEQ ID NO: 174935 - DNA, 587 bp, Arabidopsis thaliana landsberg
atattttggtttaactgccgaagatatttggagtgggagagaaaaaaggagaaaagaaaaaggaggacacgtagggcaaaaggaagcagacagatgttgtgagtgtgacgtaaggcaactgagtttacgtgaaaccaatgtcggtaagagagaattcaaaaacaaatcttcacgtctctctctaaacccaactctcatatatgtcttcttccactaactacttcctcaacctctcccttataaataaacctcttgacttcactcttcatctttaagatcacatcaatcacaactaacacttttacatgaagagacagagaaaagatatggaggaagaagggactgctgatgatcactcattggctgctgcagcgatggcggttgctgttgccgccgcagcagcaacagcagcggaagaggaggagcaatgttggggcggcggagtagtggaggagataacgtggagctctgtgtggttgcctttttgggacgttgagtttgtaggaagaaactatggtgtcttgttcaatgatgttgtttgggacgatgatatttggaacatccacaatttaactcattcctcatag

SEQ ID NO: 174936 - DNA, 645 bp, Arabidopsis thaliana landsberg
atggagtctcatcctcacaacaaaactgaccagacccagcatatcatcctcgtacacggtcccatcatcatcggagctggcccttctggtcttgccacttcagcatgtctctcgagccgtggagtcccttctttgatcctagaacggtcggattcaatagcatctctatggaaatctaaaacctacgaccgactcagactccatctcccaaaacacttttgccggttacccctcctggacttccctgaatattacccaaaatacccttccaaaaacgagttcttggcctaccttgagtcctacgcttcccacttccgtatcgctccaaggttcaacaagaacgtacaaaacgcagcttacgattcttcctccggtttctggagagtaaagactcatgataacacagagtacctctccaaatggcttatcgtagccaccggtgagaacgcagatccatacttccccgagattccagggagaaagaagttttccggcggaaaaatcgttcacgcgagtgagtacaaaagcggcgaagagttccggcggcagaaagttttggttgtcggatgtggaaattccggcatggaaattagcttagacctcgtccgacataacgcatctcctcatcttgttgtccggaacacc

SEQ ID NO: 174937 - DNA, 290 bp, Arabidopsis thaliana landsberg
gcgggtcatcaactgggtcaaacaaatggtggggaagggcagagaaaggcggacgagaagatggtggaggagagaacactgaaaatggacatgtagcagcttctgatgagacgcaaaattctttggtagctattaggaaaagaatagcggaagaaggaagagaagcggttgaacttggtctgcatcaaggatttggttcaaaaagaccagacaagagagatcaagctttgctgtttcagatcttcaactctgcaatgccaaaggattgggttacccctgattcttcctaa

SEQ ID NO: 174938 - DNA, 962 bp, Arabidopsis thaliana landsberg
gcttcttcaaatcagcatcagctttcatgaacatacttgtgactacactcaaaatagtcgcagagtattatccttgtcgtcttttcaaaaccttcgtcatcgatcctccttctcttttctcttacctttggaaggtacactcttaatttgtttaacactttcaactatgtacaacttttaattatgcgcaagtcaaaagtcttatttcacctatctaaatgtgactttgaaagcgagatgatatactttttaagttgaagtcaaagatactgatcctctacgctcacgtgtagggtattcgcacattcgtggatctatcaacggctacgatgattttatcaatgcaagattttcaagactcgtttgactacgacgatttctcgtcatcatacccatcacgagtctcctccctacgattcgacacgtcatcactaaaatcaacggacaagatcggctcatgcgcatcctctaggttcgctttcaccgtatcttgcgacggactcgacacagtcaaaccatggtgtctcacgttgactgacacgtcatcaaccaaactaggacacaacacaggcgcgtacatcttaccgcttaacgcgcgttctttctctttcgcgtcaccggcggctagaagcgagccattcggtggtccaaggaggagcttcttcgcttccacttcgatgccagctaggaccaccgaccgtcactctatcggaacactacgggacccgcggatacctcgcccgtctttcttccaatcgccggcggttttcttccggcgagagtcacacgtcagcaaaagtgaggaaccacgagattcgttcgttcagtgtcccaagttttatcgtagaccgtacgatgagatgacttataggtcaaagatgaggccaccgctcggtggtcttgtatccattgtttcaactcagattagacgccgtcacgtgtctttatctcaacggttctaa

SEQ ID NO: 174939 - DNA, 108 bp, Arabidopsis thaliana landsberg
atggctatagagtccaaagaagtatgttgggttgtacagtcagatcgtagtggatacgacgatgaaacggtgatgaagagcatgcccaactccacagcagtggttcgc

SEQ ID NO: 174940 - DNA, 424 bp, Arabidopsis thaliana landsberg
gcgggagataaccgtcgaaaccagccgggaaggactgacagtcaccaaccacgactaccaggcgggcgacacggtcccggtgacgcagccgggcctggggcccggcgagatccaccacctcgccgggaatcttcaggtctggtgcggcgacggcccggcccggtccccggcggctctggcgtcgcgctggctgcacggtgccgcgtggaataccccgggaacgcaggaggagatccgtcggcctcgcaaccgccaccttcagggcgcgtcccgcggcgtcggaatcaggctcgtccgcgaccgccccgcacaatcggagatgccagcggccgacgtcgcaggcgccgtaagcacctgtgtccggagcctcgctgtccgggaccgccctcttcgcgacctcgacgaggggctgtcccggcgatag

SEQ ID NO: 174941 - DNA, 300 bp, Arabidopsis thaliana landsberg
ccacctccgccggaatcacgccgctaccgtcgtcggacccaccaccgtgatcaccgtcgccgggaaaccacctccgccgccgtcactggaatcaccattgccgccgtcaccggaatcaccattgccgccgtcgccggaatcaccacctccgtcgccggaatcaccaccaccaccatcgccggaatctccaccgccaccgtcgtcggaatcatcaccgccgccgtcaccggaatcaccaccgccgccgccagaccaccaccaccgccgccgtcgtctgaacctccaccaccaccactttag

SEQ ID NO: 174942 - DNA, 152 bp, Arabidopsis thaliana landsberg
ccctcgctacggccacctgaaggctctcatcaagcggagcgtgcccttccccaccttccacgccgtgcggaacgagcttctccttgaggagctcaccatagcgaatgaggcacccactcctgcctcggctctctacagcgctcctaccagcg

SEQ ID NO: 174943 - DNA, 159 bp, Arabidopsis thaliana landsberg
gttttaggtttagctttagtaatctattgcaatatcaaaatgtggaattggatcagaatgataatgaagagagtgaaactctgttcaatgatgagaacaattctccttctgaggctaactctgaaaacgttgactatgtttcagataatgttgactcaa

SEQ ID NO: 174944 - DNA, 79 bp, Arabidopsis thaliana landsberg
gtgttacgaggctgagcagagacgtgaagacagggaaaggcatcctgttaattttaaggataagcatgcgttgtatcca

SEQ ID NO: 174945 - DNA, 201 bp, Arabidopsis thaliana landsberg
ggtatttccaaaaccggtgagatcattgatctcggcgtccaatatgatattgtacaaaaaagcggctcctggtttagttatgatggcaacaaactgggacagggacgtgaagccgtccgccagctgctgctggataatcctgaaatggcgaatgagatagaagcgaagatcagggcaaagttggcagaattggtggtgtaa

SEQ ID NO: 174946 - DNA, 301 bp, Arabidopsis thaliana landsberg
ggcaaggctttgtcgaaagagttctcaaattggtacgagcattatggtcgaaaaccaagacaatggttcagagcttccaatcgcccaacaacaaaacaatgagaaaccaaaggaagcacaatcccaaaaagaagaatttcctccgtcaccctctgaccaccagagcattttggtttctctatcatcccgatcagtgtggaaaggaactgtgtgtgaaaggtctcatctctttcggataaaatactatggtagttttgataaacccttgggacggttcttgagagatcatttgttcgatcag

SEQ ID NO: 174947 - DNA, 1652 bp, Arabidopsis thaliana landsberg
gcgctcagctcttgttgagggtattatgtgtgagtaccagagaggaattaatggtgttcacagccagaacgatactgacagcgaagaaggagccaagatctttaagctgttagagacggctgctgaacctgaatttcttatggcagaaatgagcccagagcagttgagatctttcactacatataaagcaaaatttgaggtagaatagtaatttccttttcttgatatattgattacagtaattaactgcttcaatctaaacctcaggcagccaagcaaatgcggaaggaaaaatcagtggcagaaactctggaagacgctggtttaggtgaaaggaacgtcaccccgttcatgaggattaggcttgttggcctgacgagcttaagttatgaaggagagcacaatccaaaagaaggcattgtaacaatctgggatcccacggagagacaggtacattcaaatgcctaaatctgaatgtttcatgcacaatttaaaataaggcatttttctaatggctaataagtttacacgaaccttatccatatgagcttatatggaacggggagttccaaatataagctcgtcagagttgctgtggacctcgaatggactgaaatgcatatcaaaaaatcgttaccatcactgtacttttgcattaagagcatcatcgattagcttgttcaacttttttcttgtagattcttaaaacagttatcattgtctactactgtgacagagaaccgagctgacggaggggaaaatatacataatgaaagggctagtaccaatgaactcagattcagaaacactttacttacatgccagagggtcaagctcaagatggcagcctttgtctccaaaagattctgaaaattttcagtaagtggttttctttagtagacactggaatctatctcattaatttgttcaatttccctgatgatgttttcaggccttttttcaaccctcgtaaaccaatctctttgtcaaatcttggtgaaattcctctgtcaaggttaatctcagtagtccaagctttttataaaacactatttaccgcactttgctaatctatactctatcatctctaattatgtccttcagtgaatttgatatcgctgcgtacgttgtatatgttggagatgcatacacagatgttctacaaaagaagcagtgggtgtttgtgacagatggatccacacaacattcaggggaaatctcaaacagtcttcttgctataagcttcagcaccccattcatggatgatagctctgtttcccacatcagccataatttggttggatccgtggtatgtacaaattctaatatttgtctagttttacactgagagaatatgcaccgagaaattattgtttgaaaaatatatgctttgtgggcttaatttttggcaggtcggattttgcaatctaattaaaagagcaaaggatgcgacaaacgaaatgtgggttgctgagacaacagagaactcagtctacttcataaacgcagaagctgcctactcttctcaccttaaaacccgcagtgcccatatccaaacatgggctaagctctattcttccaaatccgttcgttctcgtcgacttcctctttctataagtattcggttcaaaaagattgttctattgtattaa

SEQ ID NO: 174948 - DNA, 111 bp, Arabidopsis thaliana landsberg
aaaatagctgatgacgcttccatggaattcattcaaatttctgaaattgcgaaagccattcaaacgatcacttgtcggagatgtttttcttctttgcgatcaccaatttaa

SEQ ID NO: 174949 - DNA, 1390 bp, Arabidopsis thaliana landsberg
atggcgagaagatccgtttcgatatttaatcgccttctggcgaatcctccttctccattcacatcactgtcccgatccatcacctacatgcctagacccggagatggagctccacgaaccgtaaccctaattcccggcgacggaatcggacctttggtgaccggtgcggtggaacaggtcatggaagcgatgcacgcgccagtgcatttcgagagatacgaggttctaggaaacatgagaaaagtccctgaagaagtgatcgagtctgtgaagagaaacaaggtttgtctcaaaggtggattagcgactcctgttggtggtggtgtcagttctttgaatatgcaattgaggaaagaactcgatatcttcgcttctcttgtcaattgcatcaatgtccctggattagtgacgcgacacgaaaatgttgatatcgttgtgataagagagaacactgaaggagagtactcaggtctcgagcatgaggttgttcctggtgttgtcgagagccttaaggtaaaccatatataattatagggattgtttttagtccaaattgtgatcccttttgtatacatgatgttgttgaattgtttgtgtaggtgataacaaagttttgttctgagagaatagcgagatatgcatttgagtatgcgtatctaaacaataggaagaaagtgactgctgttcataaagctaacattatgaagcttgcggatgggctcttccttgaatcttgtagagatgttgctaaacattattcggggattacttacaatgaaataatcgtagacaattgctgtatgcagcttgtcgccaagcctgagcaatttgatgtcatggtaatgctcttcttttcctagttacaaatcaaaatgagtcattttgaaatgtgacagacgatgaaaccatcattgatgttgttttgatgtctctcatggatattttttgttggtttgtttcaggtgacacctaatttgtatggtaaccttatagcaaacacggcggctggaatagccggtggcactggagtgatgccaggaggtttgtcaaataaatataatagttacagttataatctttcgtaaaatgacgtttcttgggtttgttggggacagggaatgttggtgcaaaacatgcgatattcgagcaaggcgcatcagcagggaatgtggggaatgataagatggtggaacagaagaaagcgaatccggtggctctacttctctcgtcggctatgatgctaagacatctccggtttcctacttttgctgatcggcttgaaacagcagtgaaacaagtgattaaagaaggaaaatatagaacaaaagatcttggaggagattgtaccacgcaggaagttgttgatgctgtcatagcagctcttgagtga

SEQ ID NO: 174950 - DNA, 130 bp, Arabidopsis thaliana landsberg
gtataggattgggtggtttcgaacgtgtttggatcaaaagcagggatcaaagctgaaactaggagcagagactggtggaccgatggatcggatagctgacggatggcataaactcagtcggatcgattag

SEQ ID NO: 174951 - DNA, 563 bp, Arabidopsis thaliana landsberg
ggaccctgaattggctgatgtcaagcttgctcaggccaagtttttactgttacgactagctcagttcaaaacactaatatcagatgaatttgagtgcacaccttcattgctactagctggcgacttcaattcaattcctggggatatggtttgattcagtttcttacattgagtttccctaattgttcaatctatttgcaaaatcaaaagattgggtttacggtggtaaaatcctgatacttgttgtcgttttccaggtttatagttacctagtatcgggtaatgctaaacccacagagaccatagaagaagaagaagctccagttcctctgtctagtgtctatgaagtcacaagaggagagcctaagttcacaaattgcactcctggcttcacaaacacacttgactacatcttcatctctccttcagacttcatcaaacctgtgagtatccttcaactacctgagccggattctccagatgttgtcggtttcttaccgaatcatcatcacccgagtgatcatttacctataggagctgagtttgagattcgtcgggaatag

SEQ ID NO: 174952 - DNA, 51 bp, Arabidopsis thaliana landsberg
atgccttatcgtgcgctcttgcatagcgactttagtggcttcgttctcgag

SEQ ID NO: 174953 - DNA, 346 bp, Arabidopsis thaliana landsberg
cggcgagcattacctgcggctccttgagcggctgctggcgctgctcgacgccggcggcgtcccgccggaacgggccgcctggggagtgaacgtcctgctccaggtcgccacggcgaccgcggccgagcactccggacacgcccggtcgcccgggtccgggaccgagtgggacagcctgacccgggctctgcgcgacgtcccggaagccacgcacccgcacatccgcgggctggcggggagcctgctcgcgggctcaccgcgtgaccgcgtgtcctggtgcttcctgatgctgatcaacggcatcgcgggcactcccgtaccggatgaggaatcaggaaaggcctga

SEQ ID NO: 174954 - DNA, 368 bp, Arabidopsis thaliana landsberg
gattacactttgtgcaagatttacttactccacaagcaacaaagaagttggagaagagaagaagaagcagaagaaaggagaacctgtggaagcatcggaagggcagcagccttgtaatgccgagtatcatcaaccgctagcacctctagattcttgccaaccgcagcctcatgatttggctgagcagctggatttgcatcaaccagaacagttgcagctgcaacagcctcatgatattgtgtatcaaccacagtattgtttacttccagaacaacatcagccgcagccttttccttataacttttctgagttgaacagaattcaacagcaaccagtgatgatcccagacgatttagaagatttcttgg

SEQ ID NO: 174955 - DNA, 109 bp, Arabidopsis thaliana landsberg
gtatgaactggccgcagattgtgctgatgacgatgatgataaattggcaatttctgatttgaggaaaagcgtgatggaagaattgaaaatgcacgactcatttgtacag

SEQ ID NO: 174956 - DNA, 80 bp, Arabidopsis thaliana landsberg
atgtcgtggtcgaaagcttgtagaggaactcgaatttcttcatatttagagaaccttcatcgaacatctcagtatccaag

SEQ ID NO: 174957 - DNA, 487 bp, Arabidopsis thaliana landsberg
atggcggaaaactacgaccgtgccagtgagttaaaagcattcgacgagatgaagattggcgtgaaaggactcgtcgacgccggagtcacaaaagtcccgcgcattttccataacccgcatgttaacgtagcaaaccctaagcctacatcgacggtggtgatgattccaacaatcgatctaggtggcgtgttcgaatccacggtcgtgcgagagagtgtagttgcgaaggttaaagacgcaatggagaagtttggatttttccaggcgattaaccatggggttccacttgatgtgatggagaagatgataaatggtattcgtcggtttcacgaccaagatccagaagtgaggaaaatgttctatacccgagacaaaaccaaaaagcttaaatatcactctaatgctgatctctatgagtctcctgctgcgagttggagggataccttaagttgtgtcatggctcctgatgttccaaaagctgaggacg

SEQ ID NO: 174958 - DNA, 297 bp, Arabidopsis thaliana landsberg
atggccgaagacacttcgaaagctgaagtttttaactttcaaaacttagttggtcaagaactgacgaaggatgaaaaagaagagctaaaagaatatgctatatcttgcggatatcagccgagagcacttctcttcggtggcattgatgacgaaaggttgggctgcgttcgggatcagactggtgtgaaggttatcggtactctatcaaagagtatcggtttcccgaagctcgaaacagatatcagccgctaccgacgacagcacatcgtcggtagtttattttattccaatttcaag

SEQ ID NO: 174959 - DNA, 123 bp, Arabidopsis thaliana landsberg
agctgtgatcgagatgtagttcacggctacgctgagggagttgaacttgaacttaactacctgggtttcgacttagacacaaaggctatatattcctacagccgggagaagcatgagcgataa

SEQ ID NO: 174960 - DNA, 496 bp, Arabidopsis thaliana landsberg
atgggcaacgatttacctgatcatggtgggatagtgaaacacagaaatctgctcaaaccagaagaaaacaagctctttactgaaaagcctgcaaaacaaaagaaggaattgctctgtgaagagaaaacaaaacgcattcaaaatcaacagttggataaaaaaacacatcagaaagcagctgaaacgaaccaggaatgcgtgtatgattgggaacaaaatgcgagaaagctcagggaagctcttggtaatgaaagtacgctagaggtttccgttgaattgaatggaaatggtaaaaaaatggaaatgcgtagccaaagtgagacaaaactgaatgaggccttgaagaggatggaggaggaaactaggattaaagaggctcgtctaagggaagaaaatgacagaagagaaagagtagctgttgagaaggcagaaaatgagaaaagactaatggctgcgttggagcaagaagagaaggaaagaaagattaaggaagctc

SEQ ID NO: 174961 - DNA, 119 bp, Arabidopsis thaliana landsberg
aggattggcgagccacaacggtgcacgattgtacgagagttttattgaaccctcgatgtgccgaagttagtcggatcgagtctgtttttgccgaggctgaagacgagtttccgtggtga

SEQ ID NO: 174962 - DNA, 660 bp, Arabidopsis thaliana landsberg
gaagaaggatgggtggtttgtagagcattcaaaaaaagagctacagggcaagccaagaacacggaaacttggagctcaagttacttttacgatgaagttgcaccgaatggagttaactcggttatggaccccattgattacatatctaagcagcaacataacatttttgggaaaggtttgatgtgtaagcaagaactagaaggaatggttgatggtataaactatatacaatcgaatcaattcattcagctcccacaactccaaagcccttctctcccgctgatgaaaagaccttcaagctcgatgtccataacatcaatggataacaattacaactataaactcccattagcggatgaagaaagcttcgagtcattcataagaggagaggatagaaggaagaagaaaaagcaagtaatgatgacgggaaattggagagagttagacaagtttgttgcttcacaacttatgagccaagaagacaatggaacttcaagtttcgcaggtcatcatatagttaatgaagataaaaacaacaatgatgtggagatggattcgtcaatgtttttgagcgaaagagaagaagaaaacaggttcgtcagtgaattcttgagtacaaactcggattatgatattgggatttgcgtatttgataattga

SEQ ID NO: 174963 - DNA, 52 bp, Arabidopsis thaliana landsberg
atgatcgacttattcgtcttgcggccgttgcttcgattacaaaccgccaaag

SEQ ID NO: 174964 - DNA, 208 bp, Arabidopsis thaliana landsberg
ccgcgcgaacccgtacgccaccgacgtggtgatcgccttcgcgactcggcgggtggatctggcttttctgcgggcggcgtacagcgcggcctgctccgggcgggtcgcgtgggtcgtttacgccgagccgggccggcccggaaccgacctgcgctgggagtggttcctcgcggcgttgcgccaatacggcgttcaggcggtggagcag

SEQ ID NO: 174965 - DNA, 488 bp, Arabidopsis thaliana landsberg
atacagacgtgattggtcacgctgtacatgttggtgattttactactttggatgtagcaactggtggtacaacagaaaaagtcgactcaaatgaatattatctacgtagcttactaaatatgtgtcttggtacatactcttgtgatacaccatacgaacttgatagattgatggttttactaactccaaattgcaatgatgatgagattgacgggatatgctgtgaagaaagcggtaataacgactgtcatttagacgatgggtggtacgttaatgttccgagtgaaatcaaaagtgactatatttgtggtgaagaaagtgatggtgatgatgaggaagtaacactatcagaagtcgatgaattagaagatctagaagacgatgaatccgaaactatgatgatgactacgaagaagatgaagaagacgatgaaggagacgataatgaacatgaacatgatgacgctgaagacgacttatttgaagtaa

SEQ ID NO: 174966 - DNA, 158 bp, Arabidopsis thaliana landsberg
aattaaatagatatagattggtgaataaaccacaaaagactaaaactttacggatagaaaatcaagcaaacacgaacttgtggcatgctcatgatcgtgatgatgatgatcatggtcgtgtttgtgtcattgctagaggcgagcaaagtttggaatga

SEQ ID NO: 174967 - DNA, 490 bp, Arabidopsis thaliana landsberg
atgcggaccaggacatggtattagtgtcgggagtctcgggagatataaagaggagaagaacgtccagggcttaaccgtcagaaactcgattatcaacggtaccacagacggtttacgtatcaagacatgggctaagtccgtatcgcagatttcggtttcgaatttcttgtacgagaacatccaaatgatcaatgttggaaaccctatcgtcattgatcagcagtattgtccacacggacaatgtgatagtcctggaaagtatgcttctcacgttcagataaaagacgtcaagtataacaatatttggggaacttcaacaagcaaagaggctttgaagatgcaatgtagtaaaacgtttccttgtcaagacgttgagctctcaaatatcaacttgcactacgttggacgtgacggtttagtcacggctttgtgtgagaacgttggtggttcgattcgtggcaagattgttcctgcaaattgcagggtttga

SEQ ID NO: 174968 - DNA, 67 bp, Arabidopsis thaliana landsberg
ggacagctctaaaacaaccaagaagaagattgaagatcttgtagagaagaagaagaagaagatgtag

SEQ ID NO: 174969 - DNA, 1176 bp, Arabidopsis thaliana landsberg
atgacgatattctatagtggaaaagtgaatgtgtatgatggaataccacctgaaaaggtaaatcaataacattatactgtccagtctgaaaatagaaattttgttggcatgtttttgatcattcatcctgtgtattggtttgcaggcccggtcaatcatgcactttgcagccaatccaattgatttgcctgaaaatggtatttttgcttccagtagaatgatttcaaagctcataagtaaaggtaagcttttgctaaagtgtctgatctgtttttcagttgatagatagatgattcaaacatgaaatgattttgttttgtgtatcatcaaactggaaaaagttcatggaccagcttttctgacgcagtagagcttttttatttattttctcttcttgcaaacactgcttttgttttgtccaactttgaaaggaggcatgggtagttgaccaaggaagtatgtctaaatgttgcattgtgctatactaccttgcgtaaaatatccaaatgcctcttgcatgtttttgtgatagtgattccactttccttcttcagagtctagtttgaattagtcaaaaatcaaattgaaaatgtgaaatcttattgcagagaagatgatggaacttccccaaaaaggccttgagaaggcgaattcttctcgtgattctggtatgaacagtattcatattaccttaatgattctcggagcgaaacttgatcaacacatcttcacctgtgcaaagctatgctaatgttgttaacttggaggaaacttggcttgcttgttgttctgcatgttatatgacctgtgaagtttattaatctaaccgtcgttctatgttttttgggtcgttcttaaggtatggagggccaggcgaacagaaaggtatctttgcaaagatatcgtgaaaagcggaaagacaggtgcatttatatacttacgcttattccaaaatcgctataaactgatatgttttcgtaatgtgcagaaaattctcaaaggccaaaaagtgtccaggagttgcgtcctctagcttggagatgtttctgaattgtcagccacggatgaaagctgcatattcgcaaaacctaggctgcaccggatctccactgcatagccagtcacctgaaagccagacaaaaagtcccaatctttcagttgatctaaacagtgaag

SEQ ID NO: 174970 - DNA, 625 bp, Arabidopsis thaliana landsberg
caaggagaaggagaccacgctcatcgataaaatcgttgacgacgttttgcaaaagctgagtaaaataccggcggaagaaagcacaagtggatcagtggatcaaggtcggggagaagaagtagaagaagcaaaggctgataagatttccgggctcaaccagcgcctaaaggaactggaagaaaaggtagccattacgggtgacaagagagacgagactcgtattgtcgaagttgttgggatgcctggcattggtaaatccactctcttgaaggccttctatgagacatggaaaaccaggttcttgagcagcgccttactccaaaatataagcgaacttgtaaaagcaatgggattgggacgcttgactgggatgctcttgaaggagttgctcccagatgaaaacatagacgaggagacatacgaaccatacaaggagaaactacttaaaaacacagttttcattgttctagatggcataagtgacgagacacatatacaaaaacttcttaaggatcatcgaaaatgggctaagaaaggaagcaagattgtgattgcaagacgcgcagtgactcgtgatctgcttcatgaggattcaatggtccgttatacttattttgtaccgctg

SEQ ID NO: 174971 - DNA, 141 bp, Arabidopsis thaliana landsberg
gcttgtaaaggacgcaacagctgcttcatcgaggtatcaaatactgcttttatcagtgacccatgtagcggaactttaaagactttagcggttatgtcacgatgttccccgtctcaaaacatgagtgacctcagtttttag

SEQ ID NO: 174972 - DNA, 402 bp, Arabidopsis thaliana landsberg
atggaggaaagaggatttatgtcaccttcattggctatatcggcttcttatcgagaaggaggaagcaaaggcatgtcacgacggaggtcaatgagaccaagctttgacgcggataacgagttcatgaaccttctccatggctcagatcccgtgagaattgagttaaatcggctggagaatgaagtcagaggtacgagaaatgtgattttgttgatgatttgacaatggaatttgagattggtttttggattagtactttgcttcttgtgtttgaaacaatgacttggttatacagataaggatagggaattatctgaaggacaagctgaaatcaaagctttgaggttgtctgaacgacaaatagagaaggctgttgaagaggtttatgcccttacactttaa

SEQ ID NO: 174973 - DNA, 975 bp, Arabidopsis thaliana landsberg
atgatcttgatagctctggaaagaattgttactttaaatataccattacccctaaagaactctgatggttccattcctcattttggtgatgagcttggacttccccttgaggaaaatacaaagttgaactcccttttaactaagctggcgaacaatatggaattgaagacagtcggttacattcgccttttgaaactctttaaagcaaaggattcgttaaagcatttttctcccgacgatgatgagaagtatgaatgggtccctttaactgtggagtttgggtttccacttttcagtccaaagttatgcaacaatatctgcaaaaggattgtctcatcacagttacttcaagcagattcgctcatggaacaacacgatgcaatgcaatgtataaggaaaaggttgaaagatatatgtgcactgtaccaagcaacaggtccagctgctaaacttctttaccagaaagaacaagcaaaggagcctacacgtactaataagctcatgaactacgcaagtggaaggtggaacccacttgtagacccgtcctccccaatatcaggagccacaagcgaattccaacggctgaaactagctaatcgccagcgttgtcggactgaagttttgagcttcgatggtagcatccttaggtcagtttatctcctttccatgtttcatgaatttttattttctttgcttgattgttgagaagttttggggtgtggtcgcagatcctacaccttggcaccagtgtacgaggctgccacaaggagcattgatgagaatgcacctttaagtacaacaaaagcagatgctgatgaagcagatagccgagaagtgattcttccaggactaaatcttctctatgatgggtcagagttgcacccttttgatattggcgcttgccttcaggctcgtcaaccagttgctctcatagcagaagctgctgccgcgtctgcatccctcgccccgaagtag

SEQ ID NO: 174974 - DNA, 405 bp, Arabidopsis thaliana landsberg
atgattggcctgatcccgcttttgctctcgcccgcgcatacggcggccaccttcccctatcacggggagaccttcaacggcttcgtaaaggacagctaccgggtggcagggcgaaaagatccggaagagttcttccggacgatggacgaccgttcggtgaaggcgggcctgccgacctggaacgcctgggccgcgggacaccgagctaagggaggcgcggacgatgcacgagaggcgggcaccgaggtgtggaagcgcatcaagaagacgatcaccaagttcagcctcgaccgcgggtttgagttcacgaacgcggtgacgacgaacgagcggcagtgctacctgcagtcgatcatcgtggcccccgagctccagaaggcgggctacgatgcgggaatggcaatg

SEQ ID NO: 174975 - DNA, 324 bp, Arabidopsis thaliana landsberg
gccttctgcagaagaagctgttcaaagaatgcagggacaagtgattggtcaacaagcagttcgcatctcttggagtaaaaatccaggacaggtaaaagcttactgatgtgatgtatgacattattatacttgctgtgttcactgaatgtggttgatgacctttggtatttgttataggatggttgggttacacaagcagatccgaatcagtggaatgggtattatggttatgggcaaggctatgatgcatatgcttatggggcaactcaagatccatccgtgtacgcatatggtggatatggctatccccagtatccgcaacag

SEQ ID NO: 174976 - DNA, 134 bp, Arabidopsis thaliana landsberg
atggcccacaagagtggccacgtggatatcggagaggtcgatgagcggcagggtttcgtcggaggcggaggcggagaagaggagatcatctttaggagtccacgtgtaagaatccgggagagatttgaagtcag

SEQ ID NO: 174977 - DNA, 1450 bp, Arabidopsis thaliana landsberg
taatgtgaaagatgtggagaaaggaaaggcgatgatgttttacttcactaaactcgaatccatcactccctctggcttgcctgctcgagtcgccagcagtagctatttaaagagcaactatttcaagaaccgtccatcaaactggtattactcttacacaagccctgatgaagtcactctatgtccagacaacaaacaaaatctctactgccatttgctttgtggtctggttcaaagaaacgaggttacaagaatgggttctatcttcgcctccgttatggtccgagcaatcaagtttcttgaagattcatgggaagagttgtgttcaaacatccgatcagggcagctcagcgagtggatcacggacattggttgtcgagattcggtgtctctagttcttggtgggcctcatcctgaagcggcagacaccattgaacaaatatgcaaccaaaaatgttggaaaggtataatcacaagactttggccaaaagctaaatatattgaaactattgttactggttcgatggtgcagtatgttcccacattaaactattactctaataatatgttacctctcatttcaacaatctacgcttcttcggagactcaattcgggttaaatctcaatcctatgtgcaagcctgaagatgtatcgtacacattcatgcccaacgtgtcctacttcgagttcataccagtggatggagacaagaacgatgttgttgaccttgctgatgtcaaacttggatgttgttatgaggctgtcgtcacaaatttttcaggtgaggtaaataataaaacattatgaatattaaaaaccatgaaattaattaatccttttctttgttgttgtggatgtgaatgttttttcatgctctttcttgcttcaggcttgtatagaataagagttggagacattctagtggtgactggtttccataacaaagcacctcagtttaggtttataagaagagacaacgtggttttaagcattgacttggacaaaactaacgaagatgatctgtttaaggcggtgaataacgcaaaactcactcttgactcatcacatctcatgctaatagacttcactagctatgctgatatctccactatcccgggacactacgtagtttattgggaagtaaagaacaaaaacgaagacaagaagagcaaaaagcacatagagctcaaagaagagacattctcggagtgttgtttactaatggaggattcattagacagtgtttacaagatttgtcggtttaaggaggaatctgtaggaccattggagataaaagtggtgcgtcaagggacatttgattctctcatggattacttcatctcacaaggtgcttctattggtcaatacaagactccaaggtgcattaaatctggaaaagccttagacgtattagaggaaaatgtggtagccacattcttcagtacctga

SEQ ID NO: 174978 - DNA, 457 bp, Arabidopsis thaliana landsberg
gttgtcaacgcaaatgtttcactacaacgcattgaggaactacttctaagtgaagagagaattctagcacaaaacccacctcttcaaccaggaactccagccatttcaattaagaatggatacttttcatgggattcaaaggtgaatcctcaaaatatttcctcttgtttacattatgttggaatgcaatattagcttctgcaatgctcagtatacatgacattctgatcacagtgtttgctcgaatatttcccagactaccaagcccacattatccgatatcaatttggagatacccgtgggcaccttggttgccattgtaggtggaactggagaaggtaagacgtcacttatttcggcaatgctgggggagttatctcatgctgaaaccacaagcgttgttattagaggcgctgtagcttatgttcctcaagtttcgtggatcttcaacgccact

SEQ ID NO: 174979 - DNA, 639 bp, Arabidopsis thaliana landsberg
catcaatttcttcaaagatgctggagaagttgttcgtgttcgactttttgtaaccgccaagcgtatccataggtgctatggccttgttgactttgcttctgctaacgaagcaaaaaaggtttagactagtttatagttagttatgatgaaaaatatatagtgtatctaagtttcaatttgaatgtacgattgctgaataaactctttattaccgtaggtgctgtataagaagaacggtgaatatttgcacgattataagatttttctttatgtgtattcacgacgtccacagcctccacgacgtccacgacctccacgacctccaggactcaagtaaattcaattttccatgttattgacatttgtttctggtgacactggttattaattactgttagagcttttgatacaatattactgctagactaacgcttttaactttgttaattaggtattgcatagattacacggtttggtatgggattttaactatttacctcttgagtttgattacactggttgaatttttgaatacatgaagagctcactaggttttcttaatttttcagctacaacgactaccttcaacgagaaagccttccgatagaagaaaatgagacaccttccgattttgttgag

SEQ ID NO: 174980 - DNA, 291 bp, Arabidopsis thaliana landsberg
atgttcgtcaaggtaataggtcattcttcatgatttgtggtgcaatataaatgaattattttgacgacaaacaaaattttggacacacaagttataagaagctgtacaaatttttataacacgaatttcttaaatactagaatattgttggaactcactacgagtttctttttttggtttggctagtatatagacaagatacgaaaatgcgagatttctacggaaaagataaagaacgagggatttaccatcattgaagcaaaaggcaacgtagaagaacgagtgaagtag

SEQ ID NO: 174981 - DNA, 54 bp, Arabidopsis thaliana landsberg
atgaagaagaagaagaaagaaagtgacacaaatcggactctccgttcatcgccg

SEQ ID NO: 174982 - DNA, 9 bp, Arabidopsis thaliana landsberg
atgaccaag

SEQ ID NO: 174983 - DNA, 741 bp, Arabidopsis thaliana landsberg
atgaagcttgtctggtcgccggaaactgcttctgacgcctacatcgacaccgttaaatcggtatgccttttaactagattacatatgtgtgtaattacatgcttttttatataatctttatttgattttgcatgtaaatatatgtgtgtatagtgtaagagcgacaaagagtcaggagtggcagaatttttatcagctacagcggctggatggaacgcgaggctgatcgttgagacatggtcacgcggcgatccaatcacgactagcgtcggactcgcggttgctgcaactcacacgggtggaagacacgtgtgtatagtacctgacgagcaatctaaacttgagtacgtgttggccatgagaggatttgttacgacggaggttgtggtggtcggagaatctgttgagaacacgatggaggagtttcccggtgtggatttcttggtggtggactcgaagcggcgagagttcgtcagaacgctgaggtttgcgaagctgagcaacaagggtgccgttttggtgtgtaaaaacgccatgcatagagcaatctctggttttaaatggcacgatgtgttgaaaagaggaacacgtgtggtgagatccgtgtttttaccggttggtagtgggttggatattgtacacgtgggagctactggtcgtggggactcgaggaatcttcgtagccgttggattagacacgtggatcatctgtcgggagaggagcatttgttcagacgctaa

SEQ ID NO: 174984 - DNA, 213 bp, Arabidopsis thaliana landsberg
gggaatataatggaaaaggaagatggtggtggtgatgttggcgcgggaggaattggtggtatcggtgcgggaggcggaaaaggcaagggaaagaatgtaccaaatgaactcaaagctgaagcagaagctcgccgtaaagctgaagcagaagctcgccagaagctcgccagaaagctcaacaagatcttccacaagttgatgaacatccactag

SEQ ID NO: 174985 - DNA, 791 bp, Arabidopsis thaliana landsberg
atgtcatcacatattgatagttatgaacagttcagtagccttgaatctgaagttgattccacagcatcatctggcttgaaagttaacaatattgcggtaagatctactctgttttatcgaactacgaaagcaaatgaaacgtcgaaataaattctttttttcaatcttgtagcctggtgatgccattttgcaagaaatcaaagaaacaaatgggagacttgtagagacagtggtggagatatgtgatgaagatacttcaggaacaatagtcacgtgtacttatgctcctgtggctctcagtgtcacattcaaagatcattacaagtctggaaaaatcgtaagtctctccaaacttcttctttttcctcactgtgctcagctttttgatgtctccaatgtttgatgcaggcacagattcaacctttacgcttactagttcctttggattatccgtatagttccccgatggttctagatgaaatctcctttgacactaggtatgaaactttacatagaaatcaagtaataacggttggactaaacatatatgatcttaaggatttatattcacatgtttcagtgtacacaagtatgaggatctatccgcgagaacaagatcaaggttcagtttgtccatgagggaaatttcagaaccagggtctctgaaagaaatagctcaaacgtggactgattgtgcgagagcgacaatggttgagtacgcagacagacatggtggaggcactttcagctccaagtatggtgcttgggaaacggttctacgagcttcatag

SEQ ID NO: 174986 - DNA, 125 bp, Arabidopsis thaliana landsberg
cgcttttggcagcgatgcggctacacaaaacattgtggtggccgcggttcccattatagaagctttcgccgacaatgttgaaatcacaatgggctccagcattgatctgtcggtggtggccgacg

SEQ ID NO: 174987 - DNA, 442 bp, Arabidopsis thaliana landsberg
atattactctaccctgcagctgacagagaaaagtgatgtctatagctttggtgtggttctgttggagcttatctgtggaagagaacccttaagtcactcaggatcaccagattcgtttaacttggtcttatgggtgagagtaacatagaatattatcttagtttctcatctctcaagtatctgagtacacagtgtcttaaaagatcagaatacttaaatgcaggctaggccaaacttacaagcaggagcttttgagattgtggatgatatcttgaaggagacatttgatccagcgagcatgaaaaaagctgcttcgattgctataagatgtgtgggaagagatgcatctggaagaccgtctatcgccgaagttttgactaaactgaaagaagcgtacagtcttcaactctcatatctagctgcttcagcacatacagactga

SEQ ID NO: 174988 - DNA, 81 bp, Arabidopsis thaliana landsberg
atgaaaggatcaattcatgactccgctattacgggtttagaggctcagcttatggcatcgaagcgaggactaatcgaagcc

SEQ ID NO: 174989 - DNA, 178 bp, Arabidopsis thaliana landsberg
atgatcgagcccaccgtcgaatgggtgctggccaagaagctcgccgagctcaccggcctcacgaccaaggccatcgaccgcaagcgcgagcgcggaatctggcgcgagggcgtgcattaccgcatgattgacggccggaactattactccatcacggcatacaacgcatgggtcgcag

SEQ ID NO: 174990 - DNA, 647 bp, Arabidopsis thaliana landsberg
  unsure (1)..(647): unsure at all n locations
gttcgtgaagatcctgtgttccgcagagaaggatcggatattcatgtggacgcggttctcagtgttacccaggtgaaataacatggttttgtcaatcctgtctttaaaagtttatagacacttttgccttcagcatctattttggacttctggtgcagtatccgtgagttcgtttaccgtttatgtattgttcatgataaccgagtatatttttcatcttttgtcaggccattcttggaggaaccattcaagttccaaccctcactggtgatgttgtcgtgaaggtatatcaatttttttcacatttaaaaaaatgctttaagattttgactctagttctatcaacaatgaaacatgcttgccagcaaactgaacaagctcgacaatgtgaaatagaattcgccatccaatgattcgaaaatgctttgattctaaactttagattgtctttttctttgatgaaaaagaagatcagattttgcttgctagctaactgatagttaattccagctctgggtttctgctcccacttgttgtcgtttaggacctggtcttggaacttctccagcattctaacttggaaactctnttgttgcaggtccgtcctggaacccaacctggtcacaaagtagtgctaagaaatgaag

SEQ ID NO: 174991 - DNA, 292 bp, Arabidopsis thaliana landsberg
atgtatgtttggtataaagcacgcaaaataaacaaccgatttctgcattttgtcgatattaaagactatgtccctatgctgaatgcgctcagtgccgatgaatcaatcgctaaatatgccggtcagctcatttacttaaccaaagccaataacagccgtcaggtagaagaaaagatcatgtactctatcatgagccgcagccctaaacgtgccgatacctattggtttatccacatagacactacttatgagccgtttacgatggagtacagcgttgagcagattgaacaag

SEQ ID NO: 174992 - DNA, 213 bp, Arabidopsis thaliana landsberg
ctcacgggccggcacggatcggatgatatcgtaagcttgcccgttatcggctcggatgtactggaggccgaccgttatgccaccgccgcttttgccatgggccggcaaggcattcattttatcgagcgcatgccggacctcgaggcatatgagatcgacgccttcggcacggcccgcatgaccaccggactaaaaaaatatctgccatgttga

SEQ ID NO: 174993 - DNA, 103 bp, Arabidopsis thaliana landsberg
gggaaaacgaagcgaagataggaaaatcaaagagaataaaatatacctagagcggaaacgagaggttggagaagaagaagttggcaagcaaagacgaagttga

SEQ ID NO: 174994 - DNA, 749 bp, Arabidopsis thaliana landsberg
atgaaagcaatcactgaagaagaagacgacgtttacgtgtctgatatggtggttgaaagttgggagaagcgtcgtaaagagggccgtctaattaggtttgatgagctctaccagcaggatattcaagccctgcagatcatcgcaggtccaaagattccgggtgcggaggatattcccgcagtgcgtggacaagaactcccgagtttggtttctgtggttcagatgattgaaaacttggataagaagatggtagaccagatgaataaaattataataatgatttctgatttggatagaagagttgaatcgttggaagcattcaaggatgagcagaaagcaaaggaggaaaaggtacatattgataattgcgtaatactaagtaacactatgataactagagtataattgcgtaatactgatataacttcgttcaatcgtagaatcaagatgagatgaaccaagaggaggctggtgattcgagagagaaggatcaagaggaggatgttgttcaagagaaagatggtgatcaagaggaggatggtgtcccgaaagagaagcagaaggacccgaaagatgatgtcccgaaagagaaggatcaagagaaagagaaggacccaaaagagaaagagaaagagaaggacctgaaagagaaggatggaggtccttctaaaacccgtggaagcaaacgtcacaagaaggatcactcggagaaccaagaattgaatttggttgttcttgttaggatttga

SEQ ID NO: 174995 - DNA, 367 bp, Arabidopsis thaliana landsberg
gttgagactaaggaactagagaaagaggagacttcaagaagcaaacatgtggtggaagaaaaggaaaaggatgaagcatcttgttcaaaacaagttgatgcagatgcaacagagtttgagccaggtaaagaattatgttaccacaatcagactttacccccatttgttaataggtgtgacgtgttctgtttagatgatggatcaatttctgaaaatgcagattacaagtacccgttactaaagaaggcaagccacatgttgggtgctattcctgctccgcttgcaaatgcttctgagttccctacaaaggatgcagctatccggttacacgcagcacaatcatcaggttcagttcatgtaaccgcag

SEQ ID NO: 174996 - DNA, 419 bp, Arabidopsis thaliana landsberg
gtgtttaaagatggtaaatggatcgctttcaatcctgttcccaacacctttatagtcaaccttggtgaccaaatgcaggtaattaggagacaaattaaaaaacatcatctgttttgttcactctctttgtactaactttatgtgcttgtttttcctcataggttataagcaatgacaaatacaagagtgttcttcacagagcggttgtgaacaccgacaaggagcggatatcgataccgacattctactgtccttctgaagatgctgtgattagtccagcacaagagctgatcaatgaggaagaagactctcctgctatttacagaaactttacatatgctgagtattttgaaaagttttgggacacagcatttgatactgagagctgtattgactcgttcaaagcatccacagcctaa

SEQ ID NO: 174997 - DNA, 46 bp, Arabidopsis thaliana landsberg
atgtctttcctgtttggcaactgcatcatcctataccctatcaaat

SEQ ID NO: 174998 - DNA, 92 bp, Arabidopsis thaliana landsberg
atgcgccgagggcccacccgctacgagggacaccccatcgaggctgaacgacccgagatgcacgaagaaactcgaaatcaacgcgggaacaa

SEQ ID NO: 174999 - DNA, 305 bp, Arabidopsis thaliana landsberg
atcagcaacagtcgcctgcgaagaacaaaacacacgaaatcgaaatcaacaacccgaaaatcagaaagcatgcaactttccctacattgagcaagcaaactaaagaacaaaaaccttcaatcacattttggaaacaaacccacgaatcagaagaagaagcagatcggagaagagagtatcataagaaacgagaaagtaccgaatcggggaggtcaaggggagctttgaggacttctctgccgctgcgggagacgacggtgaccttcatggtgcttaagcggagaaaacgaggaagacccagatga

SEQ ID NO: 175000 - DNA, 361 bp, Arabidopsis thaliana landsberg
atgagacggaacctccaacgctgttgcgattggtgcaaccggcgacggcacgaccgaggatcggaagaggatccgggaaacgttcaccaaacgaaaaaaatggaacgcaaacgcataccgttgaggtggcgccaccgtcaaggcccaagattacgccgtttacgaaaccgttctcctccgtggcttctcctcctccatcagcttcaagcttccgaaggtttccattgctatgtggattcctcattcaccaataaaaaccaacccagatgaggtcaaggaagatggagaaatgggtcgtcgagacttgagacacgccagtaagaaattagtgccctttcgatcggagatcaaggatacctga

SEQ ID NO: 175001 - DNA, 266 bp, Arabidopsis thaliana landsberg
gaatcaacaacgggatgcgagaatctccaccgtctgaatcagatacatttccttcctctttccataaaactcctgaaaggagccaactaacaaaagaagaatggaaaaagctcactaaggatagcacgacaaaggctgttcaagaattggtttcttcacccgattttggcaaatgggcagcagttaatccggataggatcaatgtaacaccaagaaaaggatcttctagcaaaaaccagccacggaaatggatgcgttggttctga

SEQ ID NO: 175002 - DNA, 231 bp, Arabidopsis thaliana landsberg
ctcgacttgcggtactcggaggacacccggaaccgggtctacggcgacaatcggacagctaccgcctacttggcgctgttctcggcgttctttccgcccggcgaacacttcttcttcaagttggtgaaccggttctcgcacctggtgaccgacccgaagatgctctccgaggtggccgggttcaccggccaggacgtgatccacagtcgggagcacgagcgcctcaactag

SEQ ID NO: 175003 - DNA, 473 bp, Arabidopsis thaliana landsberg
atgtcggattctaaacccagatcctctgtttctaccgtcacggcgaaatccgaggtatcaatcgggaaaactcttgtgttaaagtttttgatcgcaagtttctgatttgggttctctgatttttataaattccttaaggattaaagccgatctagctctaaaggagtgcatcgaattgtagatttttcattgttagataaaacttctgtggaaaattttattgttaagactcggattcgttgtagatcgaagttttcatcatgacgtggttttcggatattttggtttctaggtcgaacttgtaacatattttctgcaaaacttttgtgaaggcaaagcccaaagtacctataaattcagtgaaaaccatagcaacaacatctgcagcagcgagcttggtgaaagggaaagcgcaaacaacatctacagtagtgagcttggtgaaagcgaaagcgaaaccaacatctgcaaca

SEQ ID NO: 175004 - DNA, 114 bp, Arabidopsis thaliana landsberg
atttggatgcgggctcctcgctgcagaacaggacagaaagagcataatatgttaatgtgcaaactcgaatacaagcaaccgaagaaaatagcagatgtgtttttcatccaatga

SEQ ID NO: 175005 - DNA, 79 bp, Arabidopsis thaliana landsberg
atggctgccgacgaaggcaaatcttcccgccgaaacagttctaacgtggatactccttatttgtccgaaatatacgcca

SEQ ID NO: 175006 - DNA, 389 bp, Arabidopsis thaliana landsberg
atggggcaagcctcacggctcgtcctcctcgccgtcgtggcgctgctgtccgccggcctcctcccgcaggcgctgggtaagggtaggggaggcaggggacacggtggcgccgtcaacccgcaggtcgccggcatctgctctcgcaccccgttcccggaggtgtgcacgtccaccgccgggcggcacgcgtccaagtacccggtcatcgacaacctggccgtgctgaacatgcaggtggacgcgttcgccaagcgcaccgcgcaggcgcgcaagcacgtctcgaggtcggcccgcaccatcccgccgcagcagacgcaggcgctcacgttctgcgacaccatgtacatgaacacgcaggacaccatcggcgcggcgcagcgggccatcac

SEQ ID NO: 175007 - DNA, 387 bp, Arabidopsis thaliana landsberg
gtgttggcatttgaatgcattcttgagctatccaaacagtatcaagaacgtgtaataggcgctaatgatagttgtccgctgatgtgcaaaaggaaatttaaagacaacggaatgacaggtttttcacttgacgaagtaaatagagtacttggaacaactaaggtaagaacttgttgagatgatcaagtgtaaggatactaaggtaacaaataagattgacttgttccttgttgttttttgcagaatatcataagtatcttacaaccatcagcaggtgaagaagatcttttacttgatcttatggagcgagttgaagatggagattcagtggacctagttgccgatgcttggaacgagcgtcttgatgtacaacagaaaaagatctaa

SEQ ID NO: 175008 - DNA, 456 bp, Arabidopsis thaliana landsberg
gttgagaattttacagacgtgtctagatattttgcaagggtggttagtgactacggacccgcaaaaatatacagctccattaacagaacagtagatgatagattggagttcctcaatggcaaggctgctggagaatatctcacacaaaagttgtttagccaacaagctgttgtggagcctattactcctgtgtcgccacagcaacttcataacaaaagagtctgcttgggaaagggatacagaactgtaggagggatcagtcacggaagagaggagactcatgcaacttctagaggaaagcgaaaaaggtctagtggaaactggggctgtaggtttagtggtggtgaagaaccaatgcctgtgggtctgtggaatgactacagtcgaagtcttgatatgccaacaccaccaccagaatacgatagacttctttataagaattttggtttttactaa

SEQ ID NO: 175009 - DNA, 311 bp, Arabidopsis thaliana landsberg
atgctccaaggcctcgatctcgacaagctcggctggcactggacctcgcacattcattacctgaccgaggtgtggcgtcgtgcgtttgcggcgcgcaatgaagtgctcggcgatcccgcgttcgtgaagaccatcccagtcgcgaagctgacgtcgcaagccgaggcagatcggttgatggcgacgatcaccgatggcgcgacaccgtccaaacatgttccggcgctgatcgaaggcaagcacacaacgaacctgtccgtcgtcgacgggaaaggcatggccgtcgcgctgacgaccaccctcaatacctc

SEQ ID NO: 175010 - DNA, 124 bp, Arabidopsis thaliana landsberg
atggacaaatcacaacgtcagcagtctcaacaagacattgaaaccggacatctaacggcacctgaagctcaacaagacatcaaaaccgaatatatgatgaatattaagaaaatagagtttaaag

SEQ ID NO: 175011 - DNA, 60 bp, Arabidopsis thaliana landsberg
atgagtgtagcaaatgccgtcttcgccttcaatggttgggatgaattcgtcaatgagagg

SEQ ID NO: 175012 - DNA, 52 bp, Arabidopsis thaliana landsberg
atgtcggattcagttcagtacaattttccaggacaaaacggcaaaaagtttt

SEQ ID NO: 175013 - DNA, 242 bp, Arabidopsis thaliana landsberg
aggagaagactgtgaaatcgccaaatgtgtttgaacgagtcaaagaagaaatagaggcaatgggtcatcatgaaaagtccaagagtcgtcaccatgacaaagagactcatggaacaagtgacgacattgatgagagcactccaattgattatgtgaaaggacctggtttctttcaacgactgaaagaagagattgaagctatctttaatgctgttactcccaagcgttcttcaaagaagtga

SEQ ID NO: 175014 - DNA, 163 bp, Arabidopsis thaliana landsberg
atggcccaatatttgtacaccacaatcggaaaccccttttgggtcatttcaagtttgacgagaaacgtaaatcgctatttcttctattcctccctaaaaatctaccaacgagattcttctcgaaaatttcctgcgcctctccgtgtctgtgaaatcgattcag

SEQ ID NO: 175015 - DNA, 267 bp, Arabidopsis thaliana landsberg
atgagcgaaaagcagcgcccgagccctctggcccgggagcccgagcagtcggtcaccgagttcctggacgtcttcggcacgtggctggccacggacgccagacccgccatctcggcccggacggagcgcctgcgcgagctggcgccgcggatcgacggcgaccacgagatcgagcccgtcctcgccaacctcgacgacctgctggtgcggctcgacgccgtcgcctcctcgatcgccgaccgtcctctggctcctcgcgccgaggag

SEQ ID NO: 175016 - DNA, 452 bp, Arabidopsis thaliana landsberg
caatatcaacactggagttccaagacccatcggagcattgcttaagtaaattgcgagtgccagccggaaatcttcccagtttatttgagctcgcacggtatcttcaagaaccaccgccggaaaatctccggtttcctctccggccagacgtctacaaagacttgccgcaaggaaaagagctcttcttctccatctcctccactgagctactagattgtagagctatcacatacgacatcattggccccataatgtcccgcttaaactctaataatggcttcgttatctcgagtaaagactcgctgatcccgctttgggacgactgcattaaccggatggtttcaaagttttgtgaaatggcgattttgcgtaaaccggattcgtcttcttgcatagaaaatgtacaagatcagtggccaaacgtaatcggatatgttaaaggattggcttag

SEQ ID NO: 175017 - DNA, 210 bp, Arabidopsis thaliana landsberg
ctgcaaccaccatatctttatcctccgctgtcttcaccgtttcctcaacataacaccaacataggcaacaacggtacgcgtcaccaaaccctaaccaatagcgtttgcggtggtcgtgcactacctgactcaagttacaccttcatcggtgcaccagtggccaatggttctagagttgctccacatctacctccacatcatgggctataa

SEQ ID NO: 175018 - DNA, 110 bp, Arabidopsis thaliana landsberg
atgttcatctacaagcgaactgggcttgctctcctgttcgccgtctgttttttttattgcatccttaagcggtgttgcatgttcagacttcgcatgcttacgacctccct

SEQ ID NO: 175019 - DNA, 177 bp, Arabidopsis thaliana landsberg
atgaagagaaattttttaaacccacactcagccggttcaaccggttcacgggttaatggtgagtttttgtggttttttttgttttgaacttgtcgggttttagcactaaacccaaaccgaaaaagtattcgggtcacggttcaaccggtcggaccggacggttcgggtcgggcatga

SEQ ID NO: 175020 - DNA, 71 bp, Arabidopsis thaliana landsberg
gtgtggctattcgttttgctacacatgcggagcagaatggaagcaaggaggttgctctcatcgagcaatga

SEQ ID NO: 175021 - DNA, 762 bp, Arabidopsis thaliana landsberg
atgagaattgcaaagccgaatgaggaagaaaatgctgaagcaaaagctgatgaagtgaagagaaaaggaaaggaggaagaagaagaagaagatgaagaagaaggattgaaggcaaagaataagcttgagaaaggaggatggacagaggagttggagttagctttacaaggagcttatttgacggtgaagccaagtcctaatttctggaaaaaagttgctaagatggttcctggaaaatctgcgcaggaatgttttgatagagtgaactcagctctgattactcctcgtcaagctcagcctcgaagagccacaaaaacaatcttatcaacgattccgcagttttcactttctgcaagcaaactactgaaacccaattcaccaaagacaaagatacgacagcgcagaaacaatctctcaaagaaagtggtcaggcatttactggagaagcaaaatcatatggatcaaggtcttggatttgatctcttctcagttcttgagcctaacaccacaagcaattttctctcaactccaatggaaaaagggcgaagtcttccaaaaatccttgaaagtccggtgccttgttcaagtaaagatccaacaactctcgttagccctccagtactgaaacaggtaaaaaacaaggcattgcatgagaagtacattgatcatctgcatatcagggatgctaaaagaaaagccccctcacctcgactggctgggaaagagaacattagacaaaatgaaattcagaagaaggattcg

SEQ ID NO: 175022 - DNA, 259 bp, Arabidopsis thaliana landsberg
gggattgggacctagaggtcctagttctttgacgcccttggagtatgaggtcggaaaccctaggagcctcggggcctacaaaggggcccaagtggctaagtgtcatagtgcccagaggatggactacaccatgcaccttttccttgtgtacctgaaacatgagaagctcggggacctatacttaaagtgtccaggacacgagggccccgaggatttatactacaagtgtccaaaatacgaggagctagaacttatctga

SEQ ID NO: 175023 - DNA, 444 bp, Arabidopsis thaliana landsberg
gtcttggatggttttggagactgcagggggtcacggccgcaaccccaatggcatcctgggccttctatgccgggaacacttccctagacttgtggagtacgccggagtgacgggcccagccttcacattcgaccactacgccgtcgcccccgatgcagtagaccgggacggcagggaattcaataacaaggcggagtgggtgaagcaagagctgtgggtaagtcttagtataatgtaaaatatgtcgcattcgttgtaaattcttgaaataatgtatggatacatcgtttttgtatgcagaatttcttcagatgcgatgctggatatgaggctagggcggatgtggtggccaccacgagctgtaagaagctcgtcgtggacatgcactatgaggcccgcatccaggccatcatcacctaccacggctccgtccttggggagagg

SEQ ID NO: 175024 - DNA, 170 bp, Arabidopsis thaliana landsberg
atggatcctaaggggaagggaattgtgatcaacgacaaggagaaggagtccttcgtcaatgagccaagggatgacaagtccaacaactcgggctcgggccacaagcgaaaagatgggaagaagaagaagacaagacgcatcaaggagatcgtctactacgacagcgatga

SEQ ID NO: 175025 - DNA, 303 bp, Arabidopsis thaliana landsberg
attttgaagaagggaaaatttcacatagattgctacaaggagtactaccgtaatcgcaactgctatgtttgccaacaaaaggtaaataaattctcattaattagtttggttttacagattgtagtaaagtgaacagaattggtttatttatgacttaatgaatgtgaaatacaactctttcagattcctgtaaatgcggaaggtataagaaagttcagtgagcatccgttctggaaggagaaatactgtcctattcatgatgaggatggaactgccaagtgttgcagctgtgaaagattagag

SEQ ID NO: 175026 - DNA, 376 bp, Arabidopsis thaliana landsberg
gagatagttgtattcaagtttaacgttcttgatgaaaaaatcaaacgtgatgttatggaagttatctgggagttttcaggtacacaccaacacaaacctatggttatattaaaccaaatgaatcaaactatggctggttctttttacttaattttaatctatttagtctttaaaacaaagcactattgttttttggttgttaggaattacttcggtagagttgaagagagatcatcaactagaggtgaagggaggagaatttaataaaatcgcaatgtcgacaaagctaaagcgcatagatgaatctgttagccttatcatcaacgatacgcgaacaaagaaattgggctttagtttatacgatctatatcgatga

SEQ ID NO: 175027 - DNA, 315 bp, Arabidopsis thaliana landsberg
atgcgcggcaacacgatcgaaagcgcggccagcttcgccccgggcgccgccctgacggccatcgccaccggcgacttcaacggggacggcaacagcgacatcctgttccagaagaatgacggcaacgccgtgatctggaccatgaatggcaccacccagaccggcaccatcaatgtcaacaccaatcccggcgcgggctttgtcctggcgggcgcggaagacatcaatggcgacggcgtcagcgacctgatctggcacaataaccgcgcgttgagcggcgagacccagaacacccaaatgaccacgggcggcgtg

SEQ ID NO: 175028 - DNA, 136 bp, Arabidopsis thaliana landsberg
gctttctcatggaagttcaccgaattcggagttattcgatcgcaagaaacagccaattttggagcgtgttaaaacttttaattctcggaacgaatacagactcgaagatcattctcgaattataaatctcatctga

SEQ ID NO: 175029 - DNA, 187 bp, Arabidopsis thaliana landsberg
atggtcggcccgatcttcgccgagcagatggaagtgacgatccggcaccatgcgctgaaaagcggctgcttcgtcgtcaacgccacgggctggctgaccgacgagcagatcgtctcgatcacgccggaccagaatctgcagaaggcgctgcgcggcggctgcatgacggcgatcatctcgcccgagg

SEQ ID NO: 175030 - DNA, 194 bp, Arabidopsis thaliana landsberg
cccaaccagctggaacagcaaaagaagtagattcgtcaagttcacaaaccgtagtgcaagattcttctagatacagatgtcagattttctcatacagagaactcgccatcgcgactaacagcttcaggaatgaatctttgatcggaagaggtggatttggaactgtgtataaaggaaggctaagcactggacag

SEQ ID NO: 175031 - DNA, 51 bp, Arabidopsis thaliana landsberg
atggtgccactcagcggcaaggactctgaaaaaggtcaccgagagcagcag

SEQ ID NO: 175032 - DNA, 676 bp, Arabidopsis thaliana landsberg
ggctgggcaaaatattcgatcgatccgcttcgattcggtattcgatttgatttgattcgaaaaatccgaatatccgtaagattttggaccaaagcaaataggaaaatgtagtattcgtaaaaaccgaatcaaatagcaaatattgttttttaaaaaatcgaatatccgcttcgatccgtatcttttgatatatattagaatatatagttatatctatatatagatatcataaatagtttgtgtattgttgctaccttatgtttttatgttaagatgtttgtttgatatttttttttatgttatgttttgatcaatgacatcaaaaactatcgagttttagtttttggaattagtttgataacatttttgttgaccggtgataacaacaaaggttatatttggtatttagaacttattttgaaagcatgttaaataaaaactttgaatatctgatatggttatatagtttatatattttttttaatatttatacgtatcaaagcggatatccgcaaatatcacaaaaaattccggatattcgaaattccggatatccgaaaagtttcgaatcaaagcaaatcataaaatcaagtattcggttaaaacgaatcgaataacaaatatcacaatttttccgaatattcgcttcgtgcccagacctactttccattattaa

SEQ ID NO: 175033 - DNA, 135 bp, Arabidopsis thaliana landsberg
gcaggtgaagaacaaccagatgaagaaagctccgtcgagatcgctaatgggcccattgaagaagaaagctcgaccaaaagtaatgtgttggagagagatatgatcatcgcaaatacccaacccatcatatcttga

SEQ ID NO: 175034 - DNA, 685 bp, Arabidopsis thaliana landsberg
atggatgaagctccaagggcaaaccttaagaggaaacaggagcaacaagatgaaccaaaaagatctaaaaagcgtcgtcgtcaaaggtaaattgatcagactgtcacagagttgaacaatgctcagtgttgcgactctttcattgctgtgttttggttgcagagtggcgcgcagcagttctaaattgcactctaacctagatgatgatgacgtcgcaagtcttcatggccaagtcaggcagttgataaatgtaagatgacagatttctgaagcttctggctctctatcttttaacattaatttcatcttatgaattgggaaatctgtcatacctgaggagttgttactgtcctcaaactctgtatcactagctgtcctcatgtagttcctgactcttgatgttttacaggaatcaaatgacttctggtttaagctagttgtcatttttgttttactggaactttggctttgtcgtatggttttatcttcttttgcagacaagagatacagatagtcataatcaagaagcatctcatgaagacgataaacctgctgttgtaacttcagataatttgccaatctctacagaagaatgctcgcaactaagctttggatcaagccctttgagcaacaacgcaggagagacctctgatgtagcttcaaagatggaacattcagatgctag

SEQ ID NO: 175035 - DNA, 551 bp, Arabidopsis thaliana landsberg
ttgctacagagaagctagatggttatagaacatttgcgagaactgttgtgcttcttcttagagcaggtactagacacccacaagaagggccgtttggtgttgttatcaaccgtccacttcataaaaacatcaagcatatgaaatctacgaaaaccgagctcgctactacgttttctgaatgttctttgtactttggtggtcctcttgaagcaagcatgtttttgttgaagactggtgataaaaccaagatacctgggtttgaagaagtcatgcccgggcttaactttggtactcgaaatagtttggatgaagctgcagtgcttgtaaagaagggagttcttaagccacaggagtttagattctttgttggttacgccggttggcagctagatcagctcagagaagagattgaatcagattactggcatgttgctgcgtgcagctcggatttaatatgcggagcttcatcggaaaacttgtgggaggagattttacagttaatgggcggtcaatactccgagcttagccgaaaacctaagctggatatctga

SEQ ID NO: 175036 - DNA, 170 bp, Arabidopsis thaliana landsberg
gatcatcacagccggtgcaaggagtaactgtgagcaagggtgaagcaacagaaaaaccctctggggctggggtcaatgcttcttcaagctcagagagtgagttcaaggttatggcggctgatgcatctgtgttctcatttggagatgaagacgactttgaaagcgattga

SEQ ID NO: 175037 - DNA, 2137 bp, Arabidopsis thaliana landsberg
gttggattatgtcacatatcacagctttctgatgatcgtatggagaatgtacaagccagatataaggctggggagagcgtccgcgcaaagattttgaaggtaggtggtcttttgtcaggaataataaagttctgtgtagtatttttcttgactaccactgttcctattagccttatgctaagagcccagtaactagtatctggaaaattaacttgaacatagcttttctatgatctatgttactctggaatgttaatgctgttctttttcattttggtgtttgctctagctggacgaggaaaagaagcgtatatcactcggaatgaagagttcctatcttatgaatggtgatgatgacaaggcacaaccactttccgaagacaacacaagcatggaatgtgatccaatcaatgatccgaagtcggaagttcttgcagcagtcggtgattttgggttccaggaaacaagcggtggaacttctctggttcttgcccaagtagaatcaagggcttctatccctccgcttgaggttgaccttgatgacattgaggagacggactttgacagcagccagaatcaggagaaactactgggagccaataaagatgaaaagagcaagagaagggaaaagcaaaaagacaaagaggaaaggttggttatttctttagaaacaaagatgctttatatttggtttcaactcatactgaaaaattatacttgtgtagagagaagaaaatacaagctgctgaaggaagattgctggagcatcatgcacctgagaatgctgatgaatttgagaaattggttagaagctctccaaacagcagctttgtctggataaaatatatggcgttcatgctcagcttggctgatattgagaaagccaggtctattgctgagaggtacttgttcctaacccctctgtatcattcaaagggatacatactgatacaggttgagagcggaaacagtttttgggacctataaatattatataattagataaccgtctggatctaatatctgcttgataaagcattgaagttttatgtgatagtcgctatattcggtttgtttatcctgtctaaaactatctttactgaagggccttgaggactataaatattcgtgaggaagaagagaagctaaacatatgggttgcttacttcaatttggaaaatgaacatggaaatccaccagaggtagatagaagactccaacgaaagctttttagatattaccaataataggcttatatattgcaattttactcgtgtttgatttctcatctccaggaatctgttaagaaagtgtttgaaagggcccgtcaatactgtgacccaaagaaagtttacctcgcactcttgggcgtgtacgagagaacagagcaatataaattggctgataagctgcttgatgagatgattaaaaagttcaagcaatcttgcaaggtacatgctgtttgatctttatcttctcaaagcagagaaatttggctcgtcactcactctgttaacaactttatctgatgtatcctttttagatttggttaaggaaaatacaaagttctctgaaacaaaacgaggaagccatacaatccgttgtgaatcgtgccttgctatgtcttccccgccataagcacataaagttcatatcacagactgccatccttgagttcaaatgtggagttgcggatagagggagatcactgtttgaaggtgttcttagggaatacccaaaaagaacagacttgtggagcgtttatcttgaccaagttcgttatattctgcttctccaaaatttatatttcattgtcatcttttttaatttataacttgatgtttatcttgtacaggagatccggcttggagaagatgatgtaattagatctttattcgagagagccattagcttgagcttgccccccaagaagatgaaggtgccaaatagtcctggtctctaaatctgctttattaagtgtatttgattactacggatttttaaccattttgttctcttgtgttctcagtttttgttcaagaagttcttggaatatgagaaatctgttggtgacgaggagagagtcgaatacgtgaaacagagggcgatggagtatgcaaacagtaccttggcctga

SEQ ID NO: 175038 - DNA, 279 bp, Arabidopsis thaliana landsberg
gcagttccaatccgattgaggcagatgagtggaggagccttttggtgcggaacttccgttctactcgttgcccggaggactacaagaaggacatagcgatccacttcttggagggcgatgcgcataactggtggcttgcggttgataaacgcaagggtgagcgtgtcgagaccttcaaggactttgaggacgagttcaacaggaagtactttccgtccaaggcatgggaccggctagagagtaacttcctggatcttgtccagggtcgctgtaccgtcc

SEQ ID NO: 175039 - DNA, 108 bp, Arabidopsis thaliana landsberg
atttctttgattgattatcttctacggcggctgatacggcggcggaagcggcgagagagaggagacgttcacggaggcaagaagcgcaaacgccgttgctgctgctga

SEQ ID NO: 175040 - DNA, 369 bp, Arabidopsis thaliana landsberg
atgaactcagctcaagaacacgaacgaacaagtaaagaagaacacaagactcgatttgttaacccggttcagctagatcggtgtgatgtaacctacgtccggagccgaatcaatccggcaaattcactagatcaaaggaagagttatgctcaaatttgagcttacaacaatggcggaatctctctctgttactctctctctctaagaacaagaattacaaaggaagaagaaagtgatgatgactttataacaaactcgggttggttaaaaccttatcccgtgagaaccgaagaccctccactgcagttagagactcctctttacttcatcatctttcggtttactcagccatcccaaaaccggagataa

SEQ ID NO: 175041 - DNA, 106 bp, Arabidopsis thaliana landsberg
acatatatttcggtaccgttccggtgatcgacgcgacggaatccggcgccggagttaccaccgaaaatatccaattgttaacccgacccattcaattaaaacctga

SEQ ID NO: 175042 - DNA, 207 bp, Arabidopsis thaliana landsberg
gagagctccatcttggagataacgagactagcaatgttgattgtgttacgcattgtgcaggttcttggaaatgctaaaggagcagttgcagtggtgatttcgatcttgatctttcaaaacccggttacggttatgggaattggcgggtactccataaccgtccttggggtggttgcttatggagagacaaaacgcagatttagatga

SEQ ID NO: 175043 - DNA, 169 bp, Arabidopsis thaliana landsberg
atggttcagaggaagaagacttgtctaacaatcgagtcttcttccaatctccaacctgaaactcggtttgggcaagaacatctcaagaatcttggaccagagatgatgatgatgaagagaactaaacctaggaggaagcttaaagacaatcatgtttcttctcaatcag

SEQ ID NO: 175044 - DNA, 99 bp, Arabidopsis thaliana landsberg
gatattgaatttgttggaaagaagattgatgatgtcgagaagagcatgaagaggagcaatgacaagcagctgaaaatagaacttgagctcttgcaaaag

SEQ ID NO: 175045 - DNA, 255 bp, Arabidopsis thaliana landsberg
agcaagaaccgccacgtcgtgagcacgtgcggccatatccgccgtcggataagttccgagccagactcgacgctgatgaatcggttcacggacttcgcatacccatttgtcgccgtccctacgccgcacgcctctgtagattgggtgacgtgtctccttgaaaatcctccgtcctgcacgcttcttcggcttcatctccgccacggtgatatcgtcgttttccatctccgatctggttccgatgaagcagagtaa

SEQ ID NO: 175046 - DNA, 143 bp, Arabidopsis thaliana landsberg
gtgatgcatttgtgggaggatttatgtcacagttggtgaaagagaaatcgattgaggaatgcgtgaaggctggatgctatgcctcgaacgtggtgatccaaagatctggctgcacttaccctgagaagcccgactttaactaa

SEQ ID NO: 175047 - DNA, 358 bp, Arabidopsis thaliana landsberg
aagcagcgcctcaaccacctgcgcaacagcgtgcaactgggctccgcgacgagcattcctaccgctcccgacgccaagcacaactacgggcaaagctggacctacaccgagaccgaagacaccttcggtatgctccgtggcgactgggacctgaacgacagctggaccgcctaccttgccggtggcgccaagcacacccgagagacgggcgtgtatggcacccctaagctggtcggcaacgacggcacggcgaccatcggcggctcgcagataccgcacaacgaggacaacgtcagcttcgcagccggcctaaatggccgcctgcagaccggcccattgagccaccagatcgcgatcg

SEQ ID NO: 175048 - DNA, 102 bp, Arabidopsis thaliana landsberg
atgtaatcatcaaaaacgacaacgaccagattacacgcatatatgatccgcatgcaaaagatgaacaacatcaaccgctagaatatgatgaacgttgtagag

SEQ ID NO: 175049 - DNA, 736 bp, Arabidopsis thaliana landsberg
atggaccaggaatctaacccaggctatgaaccggatcggattccacattcggttttcgcaacctcggtaactccaaagcaagaatggagtatccaatcgatcgagtctttgttcagtattcacatgggagaccatagtttctccaagatgtataaatctggagaactcaccaatttcgaatatactgcttcgccctatattagctactataacaataacattgataacaaaattgctccgactgacgctggaaccaaagaagtcaatataaccatggtggaaaccggaccaaaaaccggtaatcgagatggcttaaccaatgttcctaaaccggatccacgacaacagattcctatttctccaaccaagtcttgtcactccgaaacaagtaataacagtacaacttctttcgcatttcccacgtaagtcgttctctaatcttccatgccaatttgctcggttaaaaccagactcgttggactgaaaactcggttttaattaattgagttgtgcttatgaggtctattggtttatttttaaaatcctttgtagattaggagagtaccaacaagagcgaaagacatcactaaacacgaagagtgaaagtggaaaaagagaactatcaagacttgactcgaagaccggattgtacccggatgattcgaaacatggcggtgctggtgctggtgttggtggttggctttcttgttgtctctgtttttcggtgaaaaattga

SEQ ID NO: 175050 - DNA, 229 bp, Arabidopsis thaliana landsberg
aagatacaaaaaccctacaacttccgccgtaacgatcgcaagaatcccaagtagaattccaaatacgaaagcgaaacccgtgaacgaaaccatctccgggaagaccacaagtctctcgattggtcaactagtggagaagatttcttgcgaaggaatcaataagagaagaaaacgcgtaatgttgtatagttcatgtcacttggaagaagaagaagaagaaggaggatga

SEQ ID NO: 175051 - DNA, 69 bp, Arabidopsis thaliana landsberg
tgccgccgtaaacaagcttcggcgtcgattttctcctcctctgaagaagaagataatttaatttctaaa

SEQ ID NO: 175052 - DNA, 159 bp, Arabidopsis thaliana landsberg
atgaatgccgagaaacgagaaaacgtaaagcagactaacttcattaaaaccaatcaccgccagtatcaaaatagaagagatactgaagtgaagcaccatctaaataactccactactaaggaaaagatgttgttaccaacagaaagagtcacaaagcag

SEQ ID NO: 175053 - DNA, 54 bp, Arabidopsis thaliana landsberg
atgaccaaggagaagagaattagttgcaaagaagaaaaagaaaccggagaaaag

SEQ ID NO: 175054 - DNA, 211 bp, Arabidopsis thaliana landsberg
gaccattacaattaccacacttacttttatgaattctgagaaaataacatcggcatcatcgtctccagatttgcatgtgattgggtcagcttctcgatctgaaactttagagcttccgtgctttgcttatgctcttcaagtttttcacttcgtccatgggttctggtttcgaaagatgatgatgaatgatggtgataaggacgatgaatag

SEQ ID NO: 175055 - DNA, 624 bp, Arabidopsis thaliana landsberg
atccagtgaaggacattgagaaattaggtgaccttctagataaaggtcttgatgagcttaatactacggctgaagatggaagtgttgatgaggtattttacatattttggaatcttacgctaatgtcttgattctttctgtttttggatactgataattttttgtttgtaatgatactaaaggtggcgaatttactagtagatttgtatgaagattgctgtaacggtaactatgaaatgcttgaggaactaagggcaacttgttctcagacaagtgcaagtgttgttaaggttgggttctttctactacttccgattgtcttgtccctttcactctgagtttgagctcatgtcaagtctactttggtttggtttttaacaatctagttaggatagtttccgagagttagaattgaggctgtgtagtttcttatactaattatggtgttttcaggttttaaacggtgatgaagaggaaagtgacgatgaagatgatgatcaaaccactgacatgatggtggatgcgtctaaccagaaacaagaagccatgcctgctgatgaaccagtagccgatgatggctggacggttgtttcgtctagaaaaaacaagggaaagaggaattga

SEQ ID NO: 175056 - DNA, 140 bp, Arabidopsis thaliana landsberg
gtagcttgaaacacaaggacttgagagggcaaatagtgagttctcaggcttatatagataacgaagccgatgaggttgaagaaaccatgtccggagaagaagagcccatgcaagaggatgaacttccattgacaccttaa

SEQ ID NO: 175057 - DNA, 47 bp, Arabidopsis thaliana landsberg
atgaaccaaatccgaaaatctcggtttggttcggttaaacagcccag

SEQ ID NO: 175058 - DNA, 216 bp, Arabidopsis thaliana landsberg
ataatccagaccttgtcacgccattgtgtaaatgtggaagccattgttgattgggaaaagcgtaggaaagcagcaagagaggaaggaactctgtctcaacaagagatgactcttctgtggaatatggaacatacccaaattggtcccaccggtggcatccttgaaggatatgagattggaaaaggaagccaggatgctcgagacatgggcctctaa

SEQ ID NO: 175059 - DNA, 153 bp, Arabidopsis thaliana landsberg
atggaacgttgcccaataaaaaacgagaggttcaaggcagaggaaggaaaaggatcaaagaagtcgaggactttccttacagaacgcgaaagacgagctctcttcaatgaccgtttctttgacttaaagaacctcattccaaatcccacaaag

SEQ ID NO: 175060 - DNA, 495 bp, Arabidopsis thaliana landsberg
atgatcgagatcacctgcagctataccggcaccgacatcgtggtgttcggcgccatcgcgcggatctaccggtcgcagaaccgcaacatcgtggtggtggtgcgcgggcccgacacgccgatgacggtgcgccgccgcgaccgggtggcgggcgtgtgggtcaaccgcgacgcctgcaagttccagggcctgcccggctattactatctcgccagcaccgagccggtggagcgcatcgccccgcccggcgccctgacgcgctatggcgtgggcatccattacctgcagccgtgcgccatcggcagccatcacgatgcgcgcccgttccgcgaggcggcgctgcggtatctgcagcaggccgggctttacaccgaagcgcccggcaccatcgactttctcagcgagacactgtttcgcacccgcgtgccggtgcccgccggcgtggcgcgcggccagtacaatgtcgaggtctatctgttccgtgacggcgaggtg

SEQ ID NO: 175061 - DNA, 87 bp, Arabidopsis thaliana landsberg
atgggtgaaaggaatttagatggaactgtatcagtgaaagccaccattaataagtacggacaaaaagctacaagaagcgtcattaag

SEQ ID NO: 175062 - DNA, 555 bp, Arabidopsis thaliana landsberg
atgaaggagcagataaaaaacctgaagcttactgaggatgaagagttttgtctgaggaaattggtaatggtatgcaaaaatgaaagaaccgaggactgggacaacaccgggttcccgtcaagtgatacagtaagaaaagcacaattgcaagccataatcagaaggtatgttatcaaacatcagcagaaattatatcttctctgcatctcatgttgtgaatggttctcatgtcttgatttagaccatttctttatagaaagtgaggctttttgcaaagtttggggtgaggcttttagtggtttattgattctgttctaaaaatatgatcactgaagctagttctcttctttcctttgaaggctgcaaggaatggtagcatcaatgtctagaataccaacgtttcgacgcagattcatgaacttggttaaagtgttgtacatagaagctcttgaaatgggtgcatcaggtaatcgagctggtgggatactcaaaccaaacagcgaccaaacaggaaatctggatcggactgaaacaccggacatggatgttgtctaa

SEQ ID NO: 175063 - DNA, 457 bp, Arabidopsis thaliana landsberg
atgcaggacaaaccatcaagctccactttttctatgctggttgctcaacttgggactgttatcaccattcaaagcccattccaggtgtgcactagttacttcctagataaaagaatgtacccttttttgaaaaatttgatagattttgggaatgtgacaatttttacaggatatctaggtttaatcaatggtgggattttcctctataccaatatatactgtggcttgctatgcaatagcaaacaagaaatcgaagtaggataaggttggttatcacagtttaagttttgagtgtgtacaatgagattatgagatggatttttgcataattaagttgtttctttttgtggtgtttgccttcaggtacatgaagaaatcatctcccagctagtactcaagattttctatcttcgttatggtctaatgcagctattcaatcagatgtcattgcttctgc

SEQ ID NO: 175064 - DNA, 272 bp, Arabidopsis thaliana landsberg
atggctttcacggctgctattatcggcatggatggaaggtataatcccaaataagcccattcactttgtatttccatcacactaccaggaatctttaaccagagcaagtacactagttgtgcatctataaaaaccactctcagatctcggcttagtgcttacttgtgttttcttgtctcagtttctaccgatgcagctttgatcccgtgaacggaggagagatggggcaactggaatatatccactttatgaagatggacaaccgcccgtga

SEQ ID NO: 175065 - DNA, 912 bp, Arabidopsis thaliana landsberg
atgtttgctttgacctcaatcaagggtattggaaggcgattggctaacattgtgtgcaagaaggctgatgttgacatgaacaagaggtttgtttcttagcttggttcttaatactttcagttacttaggaattctatggataaggattatgaatcttgcgaggttttggatgttagtagaaaatgtagctctttgactagaattgtacctgctcgatctggtttgattgatttctaggaaatcagatatttaggttttctttgcacatagaacttctctagattgatattcttgaagaagtttggtctagtgtgtgtttttaaatgttttttcctttgctggtatattcagggctggagaactaagtgctgctgagattgataacctcatgacaatcgttgctaaccctcgccagttcaagatcccagactggtttcttaacagacaaaaggattacaaggatgggaaatactcccaagttgtttccaatgctcttgacatgaagttgagagatgatcttgagcgtctcaagaagatcaggtaacaaacaacacatatagacactctcctctgtagtttttagataccatgttaatagtataatgatgcccatcataactttctatatggaagaagctaagtacacaactcttgtgttaaatcatgtatacactcattttcggcaacaaaacctaatctgtagtgtaatgatttactgatgcatcctttgtttctctcttgttgttctgataatcgacatagaactttgtttgtactgactgagattgtcactgtaatgtaaacagaaaccatcgtggtctgaggcactactggggtctccgtgtacgtggacagcacaccaaaaccaccggacgccgtggaaagactgttggtgtttccaagaagcgttaa

SEQ ID NO: 175066 - DNA, 213 bp, Arabidopsis thaliana landsberg
atgaacacgtcagaggtgagagtacctcgaggaaatcgacggaggaaagctgtgattgatctgaatgcagtacctgttgatcaagaagggacctctgcttctgttagaactcctacggtgcctattacaccgtctcagcctgctcctacaatgattgatgtagatgctattgaagatgatgttattgaatcatccgctagtgcttttgctgaa

SEQ ID NO: 175067 - DNA, 242 bp, Arabidopsis thaliana landsberg
ccgtcgtggtcttctgtgattggattactggatcaagaacatgtacatgtgctcatgcccatgcctatgcccatgcccatgcctatgcccatgcacatgcacatgcacatgcacatgcacatgcctatgcccatggccatgcctatgcctatgcccatggccatggctatgcctatgcctatgcctatgcctatgcctatgcccatgaccaagaccgagaccgagaccgttaccagatctga

SEQ ID NO: 175068 - DNA, 390 bp, Arabidopsis thaliana landsberg
gtcaaccaatcacgtcaacgaaattcaggatcttacaacacttactctgagtatgattcagcaaatcatggccagcagtttaatgaaaactctaacattatgcagcagcaaccacttcaaggatcattcaaccctctccttgagtatgattttgcaaatcacggcggtcagtggctgagtgactatatcgacctgcaacagcaagttccttacttggcaccttatgaaaatgagtcggagatgatttggaagcatgtgattgaagaaaattttgagtttttggtagatgaaaggacatctatgcaacagcattacagtgatcaccggcccaaaaaacctgtgtctggggttttgcctgatgatagcagtgatactgaaactggatcaatg

SEQ ID NO: 175069 - DNA, 114 bp, Arabidopsis thaliana landsberg
gccacaaaaagcttaggagcggtcctgctgacacctatttgaagtcaaagaacaccaatccatcagaaaatttcaaacactgttttcaattaggaaaaatcgagtgtatccaag

SEQ ID NO: 175070 - DNA, 226 bp, Arabidopsis thaliana landsberg
  unsure (1)..(226): unsure at all n locations
atgggtctgatacattgtgaacagatccgccgcgaacagaccggtctcattgtccccggacgacggacggatttccaggatcgccgaccgtgcgtccgcctaattcttcggcagcagagccagccggnnnnnnnnnnnnnnnnnnnnnnnntgctccttcagctcatacagctccgacttcgccagatccttcatctacggatcggccagcagcgactccgcctag

SEQ ID NO: 175071 - DNA, 124 bp, Arabidopsis thaliana landsberg
ttatgaaccagttattggcgtgaaacgacatatgacatgcttccgggctaatctcatcgacataatcagaaactggaaagttggccatgggaaaatgattcaagacatacaactgcagaactga

SEQ ID NO: 175072 - DNA, 162 bp, Arabidopsis thaliana landsberg
atgagtcgaagaagtccaaagctggaactgaagttgaatctctcgccgcctacgtcaagccagaggaggatggttcgatctccaagccgctcagcgacgacttcaccgacctcacctccaagctcatgcgtctcgtcggagatgaaccaggacgagccatct

SEQ ID NO: 175073 - DNA, 59 bp, Arabidopsis thaliana landsberg
atgattgattatatcgaggtagcattactctacgataagcccgtgatagtcttcataaa

SEQ ID NO: 175074 - DNA, 78 bp, Arabidopsis thaliana landsberg
atgcccaaggcgcgaggcctgtggttatttgatcgacggataagagagtacagcatacgaatttgcgaaccgctaatt

SEQ ID NO: 175075 - DNA, 177 bp, Arabidopsis thaliana landsberg
ttgataccaaatgttgtttcctatgagaacttcaccacgatcaatggcgatcacataggggtttcagaagataccaagatgtttctagcagagagaggacatgagctaaaggagctatcaggtggagctatagttcaacttattgttcagagtttcaaggaagagaaagaagtttaa

SEQ ID NO: 175076 - DNA, 588 bp, Arabidopsis thaliana landsberg
ttggctaaatactacactgactgataacagaacaatgctgaaaggcagtgactttgatggctttgacaaggtaaaagaaattttcatagccttataagatctaagaaacaaacctggttgcttcatccctggcggtttttgcagagaaaactgcctgcaccgggtttccatgtcgagatcgtaatgatagaacccgacaattcacaaccaacaaagtccaaatctgattccacccaacaacaatctcaaagcagctccagtgctgattccagcaaacttaagtctaatgagaaagacgacgatgtattctctgacagtgatggggaagaggaaggaaactctcagtcttattcaactaacgagaaaaccgcaagctcaatgcacacaactagtaaacctcatcagatcaatgagccaccaaagagagatgacccttccgcaaacagaagtgtcacaagttcatcgtcctcgggtcattataatccaataccaaacaactcattagcagttagtgatatcaaagctattgctgcagatgcatcggtcttctcctttggagatgaggaagaagactatgaaagcgactga

SEQ ID NO: 175077 - DNA, 175 bp, Arabidopsis thaliana landsberg
atcactcgcaaggaccaaatcaaaacccgccggaagatcctccatcgtcagctgactcactgtcttattaaacaaccatatatccttccaaaatcttatttttcgaccgtcccctacaacccaactcatccccggaagcactacttctcgcatcccagccgtgatactccgccag

SEQ ID NO: 175078 - DNA, 337 bp, Arabidopsis thaliana landsberg
gtgagaaccttatatttggaggatgtgctctctattctgaaatcaggtggagataatcatctaagctctaccaacttgagtatatcagaccacaagcttgatttgacggatgaggataaacttgctttagatgaagcaatcatcttggcttggacaaatgacgagtttgatgccctcttagatctagtttcttctagaggaagtcatgagatctacaattatcagcaccaatcaacctggctaacaccactaatggtctttgctggaaagggcaggatcagtgatgtctgcatgctcctctcctttggtgcagattggagcttaaagtctaaagatg

SEQ ID NO: 175079 - DNA, 66 bp, Arabidopsis thaliana landsberg
atgattggggagaagttaggttatgtagtgaagaagaagatgatgaacaaggaaggagaagtgaag

SEQ ID NO: 175080 - DNA, 282 bp, Arabidopsis thaliana landsberg
atgcgcgaatggcgtgccaatgaagccgtcgtcctcgaacgcaacgacaattactatggcgaaaaggccaagctcgcgcgcgttgtctatcgccacatgaaggaaagctccggccagcggttggcgctcgagacggtcgatatcgatgttgcgcgcaacctcgaacccaacgatctcgactcgatcaagaagaatgccgaactggccaccaccagtgcccccaagggcacggtctattatatcagcctcaaccagaagaaccctgatctggccaagcccgag

SEQ ID NO: 175081 - DNA, 153 bp, Arabidopsis thaliana landsberg
acaattcgacaaacatattttcgaattgttgatcaagtaattgatcaaagctttcttccatggcatcgtcgaagggagtacgggacgaagaggccatattatttggtaggtttggtgattgattattttgtggtagaagcaaagaacaattaa

SEQ ID NO: 175082 - DNA, 376 bp, Arabidopsis thaliana landsberg
atgcaggtaaagaaatctcgtgttaagctcttgattcaatctgtttcttggtgtgatgtatatatatgtatcttgtagatcactgacttgtgtgttactttggtttcttcagaacgctgctcgtttggacagtgagatcatctatgaccgtgattttgaatatgattactttggatttaaaactcttgagagatcgtacctcttgaaagtccaagggactgttgttgaaaggcctcaacacatgctgatgagggttgctgttgggatccacaaggatgatattgattccgtgatccaaacttaccatttgatgtctcagagatggtttactcatgcatctcctactctcttcaatgcaggaacgccaaggcctcaa

SEQ ID NO: 175083 - DNA, 186 bp, Arabidopsis thaliana landsberg
aaattggtgcagggggtgaatcgcgtctacatctatgtattttactacatccccgtctgtaaggattcactggttgttcggagggtgcacatgcagaaggataccgatgatgatcacaaggaagatcaggcttcaaccctggatacccaattacttttccaaccgtcatgttcatgctgcttatga

SEQ ID NO: 175084 - DNA, 68 bp, Arabidopsis thaliana landsberg
atgcggaatctcatcctgaacgttttagggcttttttcatcttacggacagatagattatagaatcag

SEQ ID NO: 175085 - DNA, 165 bp, Arabidopsis thaliana landsberg
ggttttacttttctttttttggagcaaaatgttacgttaaaaccaggatccggtgaggaagaagatggcggcgtaatcagcaggacacatatgaattcagcaaagcttctgaagaagacgaagttgacagtactgcgaacagagaatgtaaatctgaatccgtag

SEQ ID NO: 175086 - DNA, 2104 bp, Arabidopsis thaliana landsberg
  unsure (1)..(2104): unsure at all n locations
gacttgaatgaagatgattttcaggaagcagacgatcttgaattggattcatatgacccagatacatatgattttgaggaagcagacgatgctgaatcagacgataatgaagttgaagatggtggagatgactctgcttccgattcagccgatggtgaaccaggggattatcagatagatggtatgttaattctatgtttgaatatactttcgtatagataatgtcatgagagttatgggacatctatgagaaggttttagattttcttctgaaagtacattgtcctttctcttttgagtttttgttcatttctaaacatttttaccttacatggtctgtcagataaggactctggtaacatatcacaatggaaagcacccttgaaggagatagccagaaagaagaaccccaacttgatgcaaattgtgtatggagcatcatcattagctactcccttgataaatgagaaccatgacattagtgatgatgacgaaagtgatgatgaagacttctttaagccaaaaggagaacaacacaaggtttgtcatctcaagtttgacaaaatttggtgatccttttaatctcttggaaaggaatattaatcgttattttttcatataaatccagaatttaggtggtggattggatgtgggatatgtcaactcagaggattgttctaaatttgtgaattatggatacctaaagaattggaaagagaaagaagtatgtgagagcattcgtgatcgatttaccactggtgattggtcaaaagctgctctgagagacaaaaatttaggtactggcggtgagggagaagatgatgaactttatggtgattttgaggatctagagacgggagagaagcacaaaagccatgagaacttggaatcgggtgcaaatgaaaatgaagatgaagatgcagaagtcgttgagcgtaggctaaagaagctggctcgtcgagcaaaatttgatgcagaatatcctttttacccgaatgacatcatttaacttatgtaagcacgatatcatttgctgtctttcatctctgttttaggccaataagttgtctactgctgtctgtgtttattattctctgaaacaactcacatgaaaatatggtgaagaattatagcttagtttatcaaatgggtcactaagttctaagttcatatatcgctctggtcagggagtttcatggttgctgtttagatattcttcctctgcatgtcttatatgtcatatttggttttatgctactgtttctatttgcattttggcaagttgcttttggttcaaccttaacttcgttgtacaagcaataaatccgagttagaggaggatgacaatgataaaggtgatgggaacaatcctcgtagtcaagccgatgaaccaggatacgctgataaagtaagtagattttgctgcaggcagctaagatatatatccactgttttaaaactcactatttgctttgcagttgaaggaagcgcaggaaattacaaaacagaggaatgagttagaatacaatgatcttgacgaggaaactcgaattgagttagcaggattccggactggaacatacttgaggctggagattcacaatgttccttatgagatggttgaattctttgatccttgtcatccaattctagttggaggtattggtttcggcgaggacaatgttggatatatgcaggtaagctacaaagattttcttttcttctggcccaaatgaaggtccaaatgggcacactgctcttttcagcttaaaagatgaaatatctttttcttatttaaaggtaattgaaagatgatattttatttgatagatgcttatcgtatcacatgtatctttctacttaggcccggttgaagaaacataggtggcataagaaagtactaaagacaagagatcctattattgtgtctatcggatggagacgctatcagactattcctgtatttgnnnnnnnnnnnnnnnnnnnnnnnnnnngaatgctcaagtatactccagaacacatgcactgccttgcttcgttctggggtcctcttgtcccacccaacactggctttgtcgctttccagaacctgtcaaacaatcag

SEQ ID NO: 175087 - DNA, 289 bp, Arabidopsis thaliana landsberg
cgtctgcgacggcgacaagtatttctgggtgcaggccgaatcgctggctgccgcgggcctgctgcacgcggccagtggcgagtccgcctacgacgcgtggtacggcaagctgtgggcctacgcgtggcagcacctggtcgaccatcgttacggcgcctggtatcgcatcctcacccaggacaaccgcaagtacgacgacgagaaaagccccgccggcaagaccgactaccacaccatgggcgcctgccacgaaatgctggcgttgatccggagtggcggcaagccctga

SEQ ID NO: 175088 - DNA, 433 bp, Arabidopsis thaliana landsberg
ggtggttatgttgactgctgcaacggcgtttggagaattcaagggacattagcagtctcacgaggaattggagaccggtacctcaaggagtgggtgatagctgaaccggaaaccagaacattacggattaaaccggagttcgaattcttgatcttagcatctgatggcctgtgggacaaggtaagcataacaagaaatgcatgatttcaaaaatttgattttcatttttggtctttggattaaatgttgaagctggtttgtcctataggtaacgaaccaagaggccgtcgatgtcgttcgaccgtactgcgtaggcgtagagaatccaatgacactttctgcttgcaagaaactggctgagctatcggttaagagaggctctttggatgatataagtctaattataattcagctacaaaactttcttccatga

SEQ ID NO: 175089 - DNA, 560 bp, Arabidopsis thaliana landsberg
gtatctctctgtttgatccggttacgagcgaacctgaagagccatggaaaaagactcagaatggtgatcagccaacaaatagtgctctttctaagttgagtgtggatgaagcgatgagtgatttgatcagagatacggtctctagtggttctgttgtgatacatggaaggacaaaccatgagcaacctgaaattgatggagctgagtggtcattcccttgcttgcagaacctaattgatcagtacaattcagagaagcttcaattggagagtatttcagggaaacatgtacaaatgttgagtgaatttatggcttcgtacaggcgactaaggttacttcatgagaaaactagtcatctcaggaaaactttacttgaaacagagaaggagatggtttgttgtgaagctgagacattagaatttggagcaagttgcagggaagtggctggagaaatggctgagtctcagaagaggatgcaggaaactgcagataaactaggaaaagaagtagaagtgtttaagcacaatgagtttgttggtctaaagagaagaagaacctga

SEQ ID NO: 175090 - DNA, 188 bp, Arabidopsis thaliana landsberg
ggaataatggtggtagaaatgaacagatcgtcgcaatatccagtagctatcgaaatgaatcagggatgttcgctaaccgatgctcggttactcttggacagaatcaaatcttcttcaagaacatcctcaagcttaaatccagttgttgttctatccccttgatccagtactcaactaaaagcttgtga

SEQ ID NO: 175091 - DNA, 175 bp, Arabidopsis thaliana landsberg
  unsure (1)..(175): unsure at all n locations
aagcaacgccgagcgattgaaggttgacatcagcgttttagaagtaacaccgagcattcgaacacgagaccagcgttttagaggcaacgctgagtcagtgaaggtcgacatcagcattttagaagtaacaccgagcaatcgaacacgagacccgcgttttagaggcaacgccgan

SEQ ID NO: 175092 - DNA, 31 bp, Arabidopsis thaliana landsberg
atgccagagacccccaagaagagcagccaag

SEQ ID NO: 175093 - DNA, 108 bp, Arabidopsis thaliana landsberg
atagctgtggagaagtttagtgaagcaacggttggatatagagggagtagagaaatagcggacacatgggttcagttgtttagtactccgtattttatggtcacaccg

SEQ ID NO: 175094 - DNA, 208 bp, Arabidopsis thaliana landsberg
tttgtatcggagtctgaaagcttttgagtggattgggtttaaaggaagagaaaaaccagagaaaaaagcggcattccacatcttacggaatgcatgcaacctaaagacgatggcaattacaacatccaacacgtttcaagagaacactaacatactgattgactttgatcgcatgtgcacgaattgtcgcatttcaattaaaccttga

SEQ ID NO: 175095 - DNA, 1341 bp, Arabidopsis thaliana landsberg
tttggccgaagcacttgatatgcaacctcctgttatgccagaggatggtacaactaggctcacagcaggggacgaagcttcaccctctggtactgtaaaagatacatctgtcccggaacctatttgggacgacgaagacaccaagacattttacgagtgcttgcctgatctgaggtcagcttctatttatgttcataacaaacaaagatatgggaaaatgtgtagtttgcaagtggcattcagaaagcatttaattttcctagaagagtcttgactatctagttctgtattgcgtcaacttttttcttttagttttcaattgcttatgtcagatgcattgtttctctagggcatttgttccagcagtattgttgggagaagcagagcctaaatcaaatgagcaatctgctaaggcaaaagagaaactctctgtaagtggattacattctacattatattcgtcactttgctttcttaagatattgttggaagacattaattgttgttgctatgtgtgaacgtgcatggtgttcctttttgatatgtacgatgaaggacccttggtcggcaatcatcactaaattgtctaccttggaatgacataatttgcttgttgacagatttcgtgctgcgtatatgtgcattgtgaaaaacgaacttattactggagttatccctccagcgagaattgctttcttccttgcttgttgtataaaaagcctacacttttgatttaatgccttgttgtgattgatcgtaggagtctagctctgaagttgttgaaaatcaacaaacaaccgaagatacaacagaggtttctgctgattctgctagtatggatgatcgatcaaatgctgagcagccaaaagagaaggaagaagtagaaaaggaaaaggctaaggatactaagaaggaaaaaggaaaagagaaggatagtgagaaaaagatggaacatgagaaggagaaaggtaagagccttgacgtggcaaacttcgaaagattgttacagcgacttccgggttgtgttagccgggatcttattgaccagttaacggtaagagtccttgaaatggttttctacttgatgttttatttgttgaacctcttttctccattgtttatatctatactttgtatttccaggtggaatattgttatttaaattccaagacaaacagaaaaaaacttgtcaaagcgttatttaatgtccctaggacatctctggagttgctagcatactattcgcgtatggttgcaacactagcatcgtgcatgaaggacatcccgtctatgcttgtgcagatgttggaagacgagtttaattctctggtccataaaaag

SEQ ID NO: 175096 - DNA, 394 bp, Arabidopsis thaliana landsberg
atgtggcgccgggtgacgccggaggacctcgccacgctgatttacacgtctggcaccaccggcacgccgaagggcgtgatgatcacccatcacaatgtgcggttctaccagggggcgtacaaccggatcctcccggcggaggagcagaccgacgacgacggcagtgtccggctggtctcctacctgccgatggcgcacgtcacggggcgcagcgtcgaccactggtcggcgatggcgcgccgggtatccctgacgtactgtcccgaggtcaccaagatcatcgagtacgcgggccaggtccacccgaccgggatcatgggcatcccgcgggtgtgggacaagctgtacgccggcctgagcaacgcgctgaacagcgtcgaaccggacgccatcc

SEQ ID NO: 175097 - DNA, 43 bp, Arabidopsis thaliana landsberg
atgaaagaccgggtggcgttccgagtatctcccgacatcgcag

SEQ ID NO: 175098 - DNA, 173 bp, Arabidopsis thaliana landsberg
cttttcttttccacgacgaggacgttgaggccggggcgctggagatagcaggccgtgaccagcccgttatggccgccgccgacgatcagggcatcgtacttctgcattttgatgtctcccttgtttctaaaagctgcatcaaaagcaaaatgttgtccagatattctgaatga

SEQ ID NO: 175099 - DNA, 208 bp, Arabidopsis thaliana landsberg
cgccgacgtcgatgacatcggcggcagccgcgacgagccgctgacctcggcgaccgtgtcgctcggggacggcagctacacggtcgccttcctgcccgaaggccgctacacggcggccttcacctgcgatgccgatgccgacgatcccgaagacaatgacgatctgaacttcaaggccgataagagcttagatatcatcgccggctga

SEQ ID NO: 175100 - DNA, 49 bp, Arabidopsis thaliana landsberg
ggagagcttgtgaaggttttagccaatgacaatcgcaagatcgcatgcc

SEQ ID NO: 175101 - DNA, 42 bp, Arabidopsis thaliana landsberg
atgggggaaatcgataccgtgggatcagtaccggggatcaag

SEQ ID NO: 175102 - DNA, 132 bp, Arabidopsis thaliana landsberg
aataaagaatttgatcattttaaagccttccgatggcgccaaggagatcttaagaggcccaaagagagcaaccaagcgcaaaaacttatctacgttccggagattctatgggtcgataaacgacttggatga

SEQ ID NO: 175103 - DNA, 913 bp, Arabidopsis thaliana landsberg
  unsure (1)..(913): unsure at all n locations
ttcaaaactttcaacttcccgtcggtgacaaatggctcgatgagtatatggacgaaagctccaaactttgggaagcttgtctcgtcatcaaatccgccgtctcctccgtcgaaaacttctcctccgccggaatttcgatcgcttccaccctcgaccgtcgtctctctcctcagctttctcgtcaggtgggtgatcgtaaaaatcgaatctttttccaaaaatttgaatctttttgctgattgttgttttaatggtgggttaggtgataagggcgatatcaggatgtagaagagaagcgatagggatagaggaagaaaacagagcattaatggagaacagagttcaaaggtttccgttttggtcggaannnnnnnnnnnnnnnnnnnnnnnnnnnnnnnngaagttacaaaacgggttcagtggttttcgcggcgtgctttacgcgacgaggaacatgagttcgcttctccttatggttttaatgaacggtctcgtctactgttttcccggagacgcggcaacgcaaacgcagacgcagataacgcaaacgcagagtcaagtcggaggtttcgccggagcaatggggaggttgcaacagagagtggcggctgaggttgggaggatggggataaggaaaggaatattgatgcacgagtatcgccggagcaaagcggcgttggaggagcttaaagcggagctggagcggcggttctacggtgacggtggtggtgggggagagagggaggaggaggaggaggacgagagggagctgagagagagagttgagaatctgaaagggtattttggtaatttaaggaatgggacagagagtatagtggcgcaaatcgatgatttcttcgatgagattgttgaaggaaggaaaaagcttttggatttctgcagccatagatga

SEQ ID NO: 175104 - DNA, 1010 bp, Arabidopsis thaliana landsberg
atggcgttcctcgctctcccgcatttcctgcatctccgtctccggcggaatgatcggaaaaaccgatgcaaatgttgtttgtcttcggcaacgaatgaaggttccacggcggttgtgtggtttaaacatgacctacgtgttgatgatcatcctggcctcctcgctgcgtctaagcacagagccgtcatacctctctacgtcctcgatcgtcgcattctatcgagtaagtttatatacattccaaatgttggattgattagcggaacaaattcgaatttacctgagctcaattcggatctctctagttgatgaacctctgcttcgttttagcttgtaggagagtggaatggttttgcatagatcaagtagctaggattcttccataggactccatttccaagcgttacttgattgggtatctaatccaacgggcttatatgtatgtaggatacacaacggacactttagagctagctattatagcattggaagatttgagaaaaaccttgaagaagcaaggatcaaatcttatgctcagatatgggaatgcagagaatgtcattgaagatcttgtcaaagaggtaacttcaccgagtataatttgagcatttttctcacaatttgaaggcaagattctatttgtcacaagcatgtactggattgtaacaggtgcgagctccttttgtctttgtggaagaagaggtagaataccatctgtgtgaggttttagacgctgtaaagaataaattggaaggtgtttctttatctggagaatcaccgaggattgttgcttggcgtactcctttttacgagagccaagtacgtatcttttacaatatcagttactgcgtagtgattcagaaccagttacttatgtgacacatttttgttcttccagaatttgacagatctaccacaatcttgggaggagtttaagaaactgaagctgcctctcactttgccagttcctgcagcaaaattttcatctccaggaagtgaattgcagtggg

SEQ ID NO: 175105 - DNA, 446 bp, Arabidopsis thaliana landsberg
ggctcaagcccccgggcagccattacgatttctccggcaagtcgccgcagtccatctaccccaaattcgtggtatgggaagccaagcacatttcgaaaacttttgaaccgaacgatactgccgggatggccaaggctgccaagagcgccttggggagaacgtgcgatggagcacagatgagcgaaccttggacggaaaaaaggattccccaagcattgaatcgagaagaaagtatgacgatgccacaacggataaacaaacgaaatgaaataagaagatatgaatatgctcgctggatgtttctctgtctgcccggacaaattggcgacaataaaattacaaaattacatgtattgattgatgtagttgcctcaggcatggatttggataacattcccgccaaattacgcaagcaatccacaagcaagaacagtaatgaactttag

SEQ ID NO: 175106 - DNA, 425 bp, Arabidopsis thaliana landsberg
atgggggctgctgttgacaacaaccaagcgcgggtcgaaatagctcaacattataaccaggtaagctatgcttttttcctttggtggtaggctaatgtctagaactagtatatcacactaatatctctccggttattcagatgtgcaaacttcttgatgagaacgctcgtgaatcagtccaagcatatgtaaacaaccaaccaccgagtaccaaggtgaatgagagcttccgtgcactcaaatctatcaatggtaacattaacacaatcctttcgattacatctgatcaatccaagtcacatgaagacgataccaagccagacctaaacaatgttgagatgaaggacacggccgaagaaacaaaaccgttaagaggtggcgtcgtcgatctgaatgtggtgaaggaagaggagaaccattgctga

SEQ ID NO: 175107 - DNA, 48 bp, Arabidopsis thaliana landsberg
atgaagaaagtactcaatcctctgcgtctctaccgtctttgcaaggag

SEQ ID NO: 175108 - DNA, 676 bp, Arabidopsis thaliana landsberg
atgcccactttgaatctcttcactaacataccagtcgacgccgtcacttgctcagacatcctcaaggacgccactaaggccgtcgctaaaatcatcggcaaacctgaatccgtaaccaactctaaccctctgtttcggccatttctacgctaattcataaattaaaacttcaaattttgttcctgtttagtgttttgattacatgaaagcagagtagaatagaaatttccttttgttgataaggttcatgacgttggttgtattatgcacatgaagtgttcgatggaattcctctctgaattgcaattcctcataacttaactcttgagagttccctttagattaccaatttactaattcatggaactttgtggaaaccaataatacagtatgttgacaatatcactaaaggattcttaagcttgtgttgtggtcttaacttgtgggctacgtctgttttcttctttgttttcagtatgtgatgatactgcttaacagtggagtgcccattgcatttgccggtaccgaggaacctgctgcatatggagaattgatatctattgggggattaggacctggcgtaaacgggaagcttagcgagacgatatctgagattctccaaattaagctctccatagacagctctcgcttttatatcaaattctacgattctccg

SEQ ID NO: 175109 - DNA, 100 bp, Arabidopsis thaliana landsberg
attggatcgagctcggaatctccgagttcgctcggataccggacagtatgatgtcgatcaaggagtccaaatgttctacaaatcgagaagagtttcttaa

SEQ ID NO: 175110 - DNA, 638 bp, Arabidopsis thaliana landsberg
atggtggatgcagagcagaaatctaatgcaaagcaggtaaaaactccatacagtaaaattttgtcaagaatttgattccttcagttatgattattatttggttatcacgttttatacaataacgtcttttttggttacaacgtttaaatgttagttgtttatatattacagccgaagacaccaactactcagactcagggaggaggatcaaagacgctatttgctggaaatctttcctatcaaattgcgagatctgacatgtaagtataatgacattttttcataacattttttctggttcttcctataaaatgttggtggtatgatatttataacccaaaatacagagagaatttcttcaaagaagttggtgaagttgtcgatgttagactttcttcatttgatgatgggagttttaagggatatgggcatattgaatttgcttctccagaagaagctcagaaggtaagttcatattgggtttttttggaatcatggaagtggtattgaaattacgatgattattggattcatttttggatgttttgaatgtaggcattggaaatgaacggtaaattgttactaggccgcgatgttcgtcttgatcttgctaacgagaggggtactccacgaaacag

SEQ ID NO: 175111 - DNA, 295 bp, Arabidopsis thaliana landsberg
gatcgtcgtcccgcacgtcgtcaagtacttcggcggctcgcacgaggacccggaccgcctggtactcgccggacacgcccgcgaggcatcctacgagcgtgcccacgagctcacgaaggcagcggccgaaatgctggagccgggaatccatacggacctgtccgggattccaaaactatgcggccggggacgcgagtattggcgctacggacgcttctgggtcaagttcgagacgccactcggcgacgtgtgcaaggtctatcccgagcacggcgagatcgtctttcccgcctag

SEQ ID NO: 175112 - DNA, 62 bp, Arabidopsis thaliana landsberg
atgacttgtttgttgtgtgcctcggcaataacactcggcaaagaagctttaccggttcccag

SEQ ID NO: 175113 - DNA, 859 bp, Arabidopsis thaliana landsberg
atgaaccaaaccaaaataaccaccgacgataacaaaaactccaaaccggccgaaaccgaatcaaccaccaccgtaccggaatggttaaccgaaacaatcaacggtggctccttccgccacgtagatctcgaaaccggaaccaacggctgggcttcaccaccaggcaacgttttctctctccgctcacataactacttcaccgccacaaaacaaaaatctcccggcggcgattacctcctctctctcgccgccgtagactggctcacatccacctcaaagaaactcgatcacatcctctctcgtcccgataaccgtgtaatccacgctttcaaaacatcccaatctcgtagcttcattttcgccgttaatttccaggtcccagggaaagaacactacaacttggtcttctacttcgcaacacaaaaaccaatcccttcagattcactcctccacaaattcatcaatacagacgaagattcgtttcgcaacgagagattcaaaatcgttagcaatgttgtgaaaggtccttgggttgttaaagcagcagctgggaaatttggtgcatttgttgctgggaaggctatgaagtgtagttatcatagaggatataattattttgaggttgatgttgatataagtagctcggcgattatgacggcgcttattaggtttatgttggggtatgttacgtatttaatggttgatgttggttttgttgtggaagcgcaaacggaggaggagttgccggagagattgattggtggtgctaggatttgtcatatggagttatcgtcggcgtttgtgattgatgatgatgttgatgggaagaagagttcgcagcaacggcggagaatgatgg

SEQ ID NO: 175114 - DNA, 129 bp, Arabidopsis thaliana landsberg
gttgctaccttcaaccctgcagttgggtcccatgtgtgggtggaggaccccgatgaagcatggttagatggtgaagttgtagagatcaacggtgaccagatcaaagttctctgcgcttcaggaaaacaa

SEQ ID NO: 175115 - DNA, 381 bp, Arabidopsis thaliana landsberg
atggagttaggaaaatcaattgagaaccaaaacaacgtcgtggcaagactagcaaagaaagtcattgaaacagatgtcgccaatggctccaatgttgtcttttcaccgatgtcaatcaacgttttgctcagcctaatcgccgctggttctaatcccgtcaccaaagaagaaatcctctcattcctcatgtcaccgtctacggatcaccttaacgcggtcttggccaagatcgcggacggcggcaccgagagaagtgatttgtgcttatctacggctcacggtgtctggatcgacaagtcttcttatttgaagccttcctttaaagagcttttggagaattcctacaaggcttcttgtagtcaagttgacttcgcaaccaag

SEQ ID NO: 175116 - DNA, 85 bp, Arabidopsis thaliana landsberg
atgcaacagagtgttattattggtggcggttacatcgaactttaccgaagcagtgaacgggactaccgacgctgtgatgtcagca

SEQ ID NO: 175117 - DNA, 305 bp, Arabidopsis thaliana landsberg
atggtggcctttggtggccaaaggtggcttttctggatgttcgtagatgctcttttgctgtcaggtaagtctattctagcggttttgtttttgtattagttctcaaaaaaactattagcgtctttttgttttaaggttttgaagatagacctcataaagaaattgctcgtggtaacaataatgaagattcaatttttgttggagatgggacaattatacaaatgtctgagcctcacggttcaacattgatgttcttcatcgaacctatgctagctgctttccacttagcttttattatagttttc

SEQ ID NO: 175118 - DNA, 539 bp, Arabidopsis thaliana landsberg
caaacaacaacggactgcaaggaggactaacacaacccgagaagccattacaagacctatatggagaatgccaacaaaatctctcagtagaagatctgctaactcttgaatatgaagcaaacaacaacaaactgctaggagtaccaacgcaacccgagaagccactacaagacctatatggagaatgccaacagaatctctcagtagaagatctgctacctcttaaatatgaagcaaacaacaacggactgcaaggaggactaacgcaacccgagaagccactacaagacctatatggagaatgccaacataatctctcaatagaagatctgctacctcttgaatatgaagcaaacaacaacggactgcaaggaggactaacacaacccgagaagccactacaagacctatatggagaatgccaacagaatttctcagtacaagatctgctaactcttgaatatgaagcaaacaataacggcctgctaggagtaataccgcaacaacatcgttatcatcaggaaaaagagacgatctga

SEQ ID NO: 175119 - DNA, 598 bp, Arabidopsis thaliana landsberg
atggatcagggatatcagattgagcagaaatggcgagctgattctggagacactgcagtgcttagcctgggaattgtcaaccttcctgttggtgtgagaccttcgaagaaattgaacagtaatctcagtgttgccagtcaactctctaggaaggctgattccagagaagaatcatttttcaaccctaatggctcgacaaaagactctagtgatactgcatctaccctgctatctgagaaatatgctgattttacaaagcaaagaaatctatccgctcgagcatcgtctatgctggtaagtagcaatgtaccagcttatgaggttgagatatcaatcatcttcttactagtgggctgctttttcaaacaataatgcatatagaggcaaagttttctccttggttcagtctgcaaccatgatgaagagtctttctgtaaaaacatcgtccaagtcgatgccaactgagagaaaattttccatttttaattcttaggaagctgaacgagattcatcaaaaagatggagtcctattcttgagatgcagtacagaggaggacttttcaagggaagatgccaaggaggccttcccgaaggaaag

SEQ ID NO: 175120 - DNA, 80 bp, Arabidopsis thaliana landsberg
gagggctcgtggagaagaacctgatgtttcgaacagaagcatttccagacgactcgagatatgaaaatctcgaaagagag

SEQ ID NO: 175121 - DNA, 740 bp, Arabidopsis thaliana landsberg
tgctcatgggactcctcgttcacttgataacgatgaatcatcgagacctgattggagtaatcgaatgactggtgagtctggagttgcggatggtgagagaggtgatgatgcttcaggggaaagtagtgatacgttattggatcagtttcttccgccaagaccgagagagaggtgctctgaggagctgcaagtaagtttcctgatgatgcttcaatgttctaattttaaaagtttaggtaggcaagaactcattggtgtgttgtttggaaatagcagtcttctaaactgattagtttgtgattctaagctgattagtttgtgattctaagctgattactcattgctctgaggagctgcaagtaagtttcctgatgatgcttcaatgttattttgaaacattaggtaggcaagaactcattggtgtgttgtgtggggtctcttggtacgtatggttggaaatagcagtcttctaagctgattagtttgtgattcagttacaagttggtctgatatgtatttttttttgttgtgtttgtagaggaaaatagataagtttctgagcttgaaaaagatggggaagagtttcaattcagaagtgaggaataggaaggaatacaggaatcctgacttcctattgcatgctgtatcttaccaagacattgaccagattggttcgtgtttcagtaaagatgtatttgatcccagtggatatgacccaagtgacttctgtgatgcaatag

SEQ ID NO: 175122 - DNA, 502 bp, Arabidopsis thaliana landsberg
atgttcaagtatgttacatttattcagtggttaaagaaatgtaaattatatgaatcacactccattttcttgcctttacagatattacttaacaagtgagttatccgagaagagtgatgtctacagtttcgggatcttgttactagagattatcacaaaccaacgagtgattgatcaaacccgtgaaaaccctaacatagcagaatgggttacatttgtgatcaagaaaggagatactagtcaaattgtggatcctaaacttcacggaaactatgacacccactctgtctggagagctcttgaagtagcaatgtcatgcgcaaatccttcttcagtcaaacgaccaaacatgtctcaagtaatcataaatcttaaagagtgtcttggtgctgaaaacacgaggataagtaggaataatcaaaacatggactctggtcatagctcggatcagcttaatgtgactgtgacctttgatactgatgtgaagcctaaggcaagatag

SEQ ID NO: 175123 - DNA, 188 bp, Arabidopsis thaliana landsberg
gaactcctgaaaccacgcataaagatcctcagaagaatatagaggagaatgcttcagctattgaggctaaaggggcatcaaatgaagttacagatttagatacatgctctaacaacgttgagacgccactagctgatccaaagaatgagcaagaaactcaacttttgttagctgagtttagctgttag

SEQ ID NO: 175124 - DNA, 461 bp, Arabidopsis thaliana landsberg
gagactcagctttgaggacaaaaccttttgaagacggagggaatgatgtggacatcaaccttacttcacataccgttgaactacatcctgtatcagaagtcccggcgggtatcatgacacgttcaaagactaaacaattgaagaaaatgttcaacttagctgtgcacgatattttgagctccctagagctaggagtaaactggtccgtagcaccccataccggatatgatctaatagccgaagaagagcttgttgaagcattcacccaaatgagtcttgaacaaattactcccccaagtatgaaatatcgtttgacaggttcaaggacctctagaaaccaagagaagactttggagcttcaagagacgaacgattcaagtgtcacatctacaagtgatcgagagagtcaagatcaagaacaagacataaaggacatggaagagttcgaagacgttgattaa

SEQ ID NO: 175125 - DNA, 495 bp, Arabidopsis thaliana landsberg
  unsure (1)..(495): unsure at all n locations
atggagttagtcgtttccacgtaccaggctgctgtgttgttgctcttcaacaacgcagagagattaagctacactgagatttcggagcagctaaacctcagccatgaagatcttgtcaggctgcttcattcactgtcatgcttaaagtacaagattcttataaaggaaccaatgtcgagaaccatctcgaaannnnnnnnnnnnnnnnnnaactccaagttcacaaataagatgcggaagattagggtaaatatgatgagaagcattctgttataatgtagcctagatcaaaaagactaatgatgttttttttcttttcttaaataggtgcctttgcctccaatggatgagaggaagaaagtggttgaagatgttgataaagatagacgctatgcaatagatgcagctcttgttcggatcatgaagagtagaaaagtgttggcgcatcaacagttagtctctgaatgtgttgagcatcttagcaaaatgttcaag

SEQ ID NO: 175126 - DNA, 61 bp, Arabidopsis thaliana landsberg
atggctagcattcgcaaggcattcttcgatcccatcattaagcaaaagaagtcacatatag

SEQ ID NO: 175127 - DNA, 154 bp, Arabidopsis thaliana landsberg
gccatcgaactggccggccatctggcggcgatcgcgccgggcgtcagtaccgatgacggtgtcgaggccggtgaatttctgcgctggctggaaagcggtcacttcaccttcctcggttgtatcaagaccaacgtggtcgttggcgacgacggcc

SEQ ID NO: 175128 - DNA, 120 bp, Arabidopsis thaliana landsberg
tatcggaacgtacttagtattaccggtgttaagcctttcatcatccgggagtccagctacttctcggcggttccaaccctgcagaaacgtcccctctgtagagttaacccacctagttcg

SEQ ID NO: 175129 - DNA, 348 bp, Arabidopsis thaliana landsberg
atgctctacgaccttgatgagctccgcctagaagcatatgagagctctacaatttataaggaaaggtccaagtcgtttcgcgataaaagaataagttggagagattttcaagttggtgatcaagtcttgctgttcaattctcgctagaagctttttcctgaaaaactcaagtctaggtggtctggccccttcagtggcactgtagtaagtccatatggagctatcacgttgtctggaaaaggtgacgacttcacggttaatggccaaagactaaagaaatatatggcagaccaaacaattccagaaggaacttctgttccactggaagagccacccaacgcccaataa

SEQ ID NO: 175130 - DNA, 56 bp, Arabidopsis thaliana landsberg
atgtcatcgtcgaaactctacggtgtcgattacggaaaaagaagaacaattgaaaa

SEQ ID NO: 175131 - DNA, 342 bp, Arabidopsis thaliana landsberg
atgattgatgaagaaaccaatgccattactatcattgtaagtctcttactcataaccacaaatcttcttaaccttttttctttctttcagaatgggggaaaaaagtttaaaacccatttttacgatacgatttaactcgaggtaaaacaatatcaacacacactgatgaacatgagacttctcattctctgtctcatcatttgtgtgaaaatggatttgaacaggactatgagtatgcaagttataatccaatcgcttacgacatagcaaatcatttctgtgaaatggcggcagattatcattcaaacactcctcatatcttggactacactctatatccag

SEQ ID NO: 175132 - DNA, 87 bp, Arabidopsis thaliana landsberg
gaagcaaggtctgtgaagaagggctacgaaagtggtgaatacacacaacgtcaagcaactacggcaaaggatcgaagcattgtctaa

SEQ ID NO: 175133 - DNA, 407 bp, Arabidopsis thaliana landsberg
atgcactcttccatgtgcttagaattgaagaggctagttgatagaatcatgagaatctttcctgatatagaagatgctcgacctggatgctcttccgggatacagactctttgtttactccacaatgctttggataaaactaagcagcttcttcaatattgcagtgaatccagtaaactctacatggtatgtgttcaaaatctcaactttcaatacattttcatagttggttttggtactaatcccttggtttatctctatgtggtctaatgtgattaatactatgcttcaatctgcaggcagtaacaggagatgctatactcgcaagaggttctagagctaaaaaatcattagagcaatgcttaaacgacattagaagtatagtaccaactattttggagatcaag

SEQ ID NO: 175134 - DNA, 216 bp, Arabidopsis thaliana landsberg
aagaagagagtataccggagagctcgtgaatcggcgccggagcgatggagtaaaattgttaggattttgaaaaggagaagcgtggttgaagaatttcggattagaattttgatagggtgtaaacgacggtggtcgatccatgagctccggcgacggcgaacttcactggcaacgttgagtttgtgtgttattcgaaaagataacgtttctgtttag

SEQ ID NO: 175135 - DNA, 363 bp, Arabidopsis thaliana landsberg
gttattaatttaagtaacgagagcttaattaaaagacaaaatccagtagaactcgcagagagaagacccagaaatgttcgagaagataaagcaaaccctaacctgaagattgttaagcttgatatattcccagattttcttgacggcagttgtgcgagagacttcgttttcccaataaaattagcgagcggcttcgaaacgggaaccaccttaagaatgccagtaccttgtctaccagttttagcgccggtggaagaagcggccttcgccatcagtaccctgcaagctccgaaaaccctcgacattttttcttcttcacacagttttgaaattggaaggagagagagcctgtctaaaacctag

SEQ ID NO: 175136 - DNA, 390 bp, Arabidopsis thaliana landsberg
  unsure (1)..(390): unsure at all n locations
atgcgcaagcgtcacctgcttatcgccctcgccaccgcgtccttgtgcctgcccgtcatggcgcacgccgacgacgacccgatgcagcacctgatcaacaatcccaatccggccagtctggtcatttacggtcnnnnnnnnnnnnnnnnnnnnnnnnnnnnnnnnnnncagggcggcggcgccatcgaggtcaaggccaccggcgtcggcgaatcctacgccgccgccgtgcagaccagcctcgacaagccgatcaaggcgggcgatnnnnnnnnnnnnnnnnnctttctcaaggcgaagcgtgacgacggtcagccgcccgtgctgcacaaccgtgtgcagatcaacgaagccccccactccaatgtcggcgccgaggctgacttcaaa

SEQ ID NO: 175137 - DNA, 186 bp, Arabidopsis thaliana landsberg
gaaataccaaatgcttcaaagctctggtacaaccctgttgtcgacctcgacataatggataggctcttcggcactagacacattagtactgatgatggatactatccagatgttgaatttgattcagaccatatagctactaatatagctgcagaagataattattctgatgaatattcagagtaa

SEQ ID NO: 175138 - DNA, 573 bp, Arabidopsis thaliana landsberg
ggagaattgttcttgagagattttaacatcaaagaagaggcttatgggatacttaagcctcttgtgagagaaataaaagctgttaatgtgagtgaccatacgttagagattcgtttttattgggcggggaaagggacaactctcattcccaaaagaggaaattatggtcctcttatctctgcaatctccttgtgtcacagtaagtacttatgactatctcaggtctctgcatttgtaaccctcactctttatcgtatttctctcttcacatttgagttaatcataacttcaaattatcactgaacgctaatattcatctttttcataatgtcaggtttggagccacgatgtggaggtcgttttgaactagtttgttaaagatgtttttctgaagcttggtgtttatatatacttacacttttagtgtctcattttcagcggagaaaacgaaacgtcacactaattattcactcattttcgggttaacgggtgccttggtaacaattattctcttggcgttgggaggggatgctcagaaaagatgcagaggagacaggaacatgagagaaagag

SEQ ID NO: 175139 - DNA, 323 bp, Arabidopsis thaliana landsberg
atggtgagtgtagaagaaaatctcaaacttctttcgtctaaaggatggtaaactcgtcacccacatcgctattccaatcaccatcgctattgttccggccagattatgcacatatgttggattccatgcaaacgtcttcacatatataagaaaacgtaaaaacaaatatcagttggaataaaagaaagaatgaaagttttgttttgttttgttttaaggataagattaaggtagatgcatgtaacacggacctccatcaacttattgatcatggcccagtagataaggaaaacgactgtgtgaacgaggaagcaaaaatttga

SEQ ID NO: 175140 - DNA, 98 bp, Arabidopsis thaliana landsberg
atggccataacgcacggacttgtctcaaccccgttaataaggcaagtgttaaactgttcggcgaaaatatatagtctgatccgattaggccgcctgag

SEQ ID NO: 175141 - DNA, 304 bp, Arabidopsis thaliana landsberg
gcaaagcggctaagcgagggagccatgtgcaggacaaactttgcatccgcattacaaaacgtgtgattgtgttacaacgtacaagtcacaaagtcacacaaataatccgaaatggtgttgacagggcgaccagaaatagctataaaccttacctagctctaacgtaagtaatcactttttccttctcagtaatttatttttattgcttctctttgactctggagatggactcaacctcttatacaagctccatggccgattaagggactttgttggaccgaactccatgaataatatgccgtaa

SEQ ID NO: 175142 - DNA, 170 bp, Arabidopsis thaliana landsberg
ggcttaaattgagacaaagagaagctagagttgtttcaatatcagtggaagagtcaagagaacgcaaaatggaagggattacgccgccatatttgcgttttcgagagcttgggttaggtttagagcatcgaggtggagaaactgaagaagaggaagaagcggcgcagtga

SEQ ID NO: 175143 - DNA, 329 bp, Arabidopsis thaliana landsberg
attctgtgagagagatcgatgaacatgttgaacaatttttggtttgcgatgacgtggctatggttagttatgtaggtttgaattcaaggagtaaggaaggcgttgttgtgcatgatgttagaagagagattctttgtgctaaggaagaagtagggagagagatcgatgaacatgttgagcaatttttggtttgttatgactcgactgtggttagttatgtagctttgaatccagggagtaaggaagacgttgttgtgaatgatgttagaagagagattatatcgtctttggttctagaaaatcctggagttgttcttgaagatgtctaa

SEQ ID NO: 175144 - DNA, 74 bp, Arabidopsis thaliana landsberg
acaatgaagccaaaatgaagaatgaggccgaagaattcgatgcggaagaatcggatgcatttaaagctttttaa

SEQ ID NO: 175145 - DNA, 277 bp, Arabidopsis thaliana landsberg
gtacgaagactaccttcgacaagaaaactgtctgatagaagaagatgagacagtggaaggacttgatgagactcccgattccgattatcttgaggtaccttattttttaattctcttcaaaacatgctaggctccaaaagaaatgcttagcgtttaaagaacagaactgttgccacaaatcccgaagatgacttatcatggggatgaatcaacttattgttaatttaaattctcttctcgtcctccttagagtcgtgctaacacagttggctgttaa

SEQ ID NO: 175146 - DNA, 72 bp, Arabidopsis thaliana landsberg
gaaggtgctggtcatcaagtcgtgtccgcgttcgtggagattgtgtttgataattctgacaaacggttcccg

SEQ ID NO: 175147 - DNA, 138 bp, Arabidopsis thaliana landsberg
atgtgcagggtacaagatgctttgtcaaagtatgacgattcagatgacgcttccaaggatccatcaataacgccagcagcttgtgcacacaaaagcaagcgactctcatttgcgtggctcgacgtagaagcgcagaat

SEQ ID NO: 175148 - DNA, 1231 bp, Arabidopsis thaliana landsberg
atgggacgatcaccatgttgtgagaagaagaatggtctcaagaaaggaccatggactcctgaggaggatcaaaagctcattgattatatcaatatacatggttatggaaattggagaactcttcccaagaatgctggttagtatacgtatcttcattattacattttaatcatactttttttattcgtgaattgttttttttaagttttgcttgaatcttgactatagggttacaaagatgtggtaagagttgtcgtctccggtggaccaactatctccgaccagatattaagcgtggaagattctcttttgaagaagaagaaaccattattcaacttcacagcatcatgggaaacaagtgagtttgaacttttcaataattttatatttttgccattacgtagtttatacgaaaactactaatcttgtagattagtcttagagtcatagctttgaatgatgttactagtgatttatgttaaatctacaatgcatcagattctaactttgtttgctttcgtataggtggtctgcgattgcggctcgtttgcctggaagaacagacaacgagatcaaaaactattggaacactcacatcagaaaaagacttctaaagatgggaatcgacccggttacacacactccacgtcttgatcttctcgatatctcctccattctcagctcatctatctacaactcttcgcatcatcatcatcatcaacaacaacatatgaacatgtcgaggctcatgatgagtgatggtaatcatcaaccattggttaaccccgagatactcaaactcgcaacctctctcttttcaaaccaaaaccaccccaacaacacacacgagaacaacacggttaaccaaaccgaagtaaaccaataccaaaccggttacaacatgcctggtaatgaagaattacaatcttggttccctatcatggatcaattcacgaatttccaagacctcatgccaatgaagacgacggtccaagattcattgccatacgatgatgattgttcgaagtccaattttgtattagaaccttattactccgactttgcttcagtcttgaccacaccttcttcaagcccgactccgttaaactcaagttcctcaacttacatcaatagtagcacttgcagcaccgaggatgaaaaagagagttattacagtgataatatcactaattattcgtttgatgttaatggttttctccaattccaataa

SEQ ID NO: 175149 - DNA, 339 bp, Arabidopsis thaliana landsberg
atggaaaatatatcccagccggccgcccccggcatctaccacctcgacgccgaggtttatcatcagagccccggcgcatcgaagtcggcgctctggacgctgcacaagcgcacaccgttccacgcccgctacggcaacaaggacgagaccaacgcgcagaagttcggcagcgccgcgcattgcgcggtcctcgagccggtgtttttcgaggccaggtactaccgcggcccgtccgatcggcgcgggaagaagtgggagactgccgagcaggtcgccgcccagaccggccggacgtgcctgacggagaaggatttcgacggcgccctccgccttcgcgac

SEQ ID NO: 175150 - DNA, 792 bp, Arabidopsis thaliana landsberg
gttatagagaaactctccataatctcagtatcggatgatgccaagtccaaactattaggtgaaatagtggaagagtataaccttcgtctagaggtgttggcaatcgaatacactcccgaatttcacaaacaggtgactctttgcatcattatataagtaatcttatttgcttcttgaagttatgaaagtatgtaaaatgctacttgttgatgtgtgtaggtactaaaaagcgagaaggcagaagaagagaaagaagtcatgagttccaattctgctcagccgtactgttcatcacaaaaggctgagagtgaagcagaagtgtataagtttactctcacggatgcggatatagaggaaaaccaagaacaagaaagaaaagtatgtgatgaggaagatgattgcatagaggaagaagtggtggaagaagatcagagtgtattcagatttagagagagtactgaagatgagagaaaagagagaaagaggttaaggaggaaaccaagatcaacttcatcatcaagcagtcctatcgcgaaagacgtggattgttggaggtactattacaagggaaagagaagtcgtcaaaggaaagagtgtggtaaatgttgttaccatatagtgtacaacgtgtttacaatgttgccggatcaaaaggaaagcgaagaaggagaaagaagtttcaaaaaagctatgcatgttcatcctaagcttcccgattatgatcagattgttgctcacttcactgctcttaggaaacaacaacaacaaaaacaaaagcatatgcgttcatga

SEQ ID NO: 175151 - DNA, 41 bp, Arabidopsis thaliana landsberg
atgcagaacgatttgatcggcggcaaagttcggcttgttag

SEQ ID NO: 175152 - DNA, 215 bp, Arabidopsis thaliana landsberg
ttgcattgtcatactcgcctcaaattcttgaggatggaagtattcctgtaacacctaatgatgttttgatcgatgcccttgtgacaccttctggtgtggttcccatcacccctagtgctaccgagaggtacgccacaaaatgtttttagctgtctcttagatctgttatttatagctgactatgttgtgtgattctctctgttcttagcatgtga

SEQ ID NO: 175153 - DNA, 59 bp, Arabidopsis thaliana landsberg
actgtaaccttgctgacggagagtacgtcctcgtgtcggagcaaggagctgctcaggag

SEQ ID NO: 175154 - DNA, 186 bp, Arabidopsis thaliana landsberg
ataaccgaaaaactcgcgactctagcagaaagcaacgaaagtgcaatggagtctaaaactggtggtgttggccttgatatgacttcaaggagaagggaaaacagtcaggactatgcagcagaagcatcagaaagcagaggtctgcaaatggatggctcaagtcttacccgaggcgtttctgcgtaa

SEQ ID NO: 175155 - DNA, 944 bp, Arabidopsis thaliana landsberg
atggtctttgcagatgagaagaaaaccgaaaatatggatggatacgtgggttttcatgccgctgtacggaactgttacagccgttttgtgaagaatcttgcaaaacagtgtaagcaattagtaagacaccatcttgattcagtgaccagtccatattccatggcgtgctatgagaataactaccaccaaggaggagcttttggcgcttataacaaattcaaccaagcctcacctaattcgttttgcttcgagctctctgataccagccgtgatgagccaatgaaagaccaagaaaacattcctcctgagaagaacaatggccaagagacaacaccaggaaaaggaggggaaagccacataacagtccctgagactccttcaccggaccaaccatgtgaaatagtgtatggtttggtaaagaaagaaattggaaatggtcctgatggtgttggagctagaaaaagaatggcgagaatggttggaaacaggaacatagagccatttagagttcagaatggtgggcttatgtttgctaatgcagataacggaatgaaatcaagctctgcttactctgagatatgttcatcagccgcacaacattttgctagaattcgcgaagtgcttgtcgaaagaagcgtaacatcaactctaaactcaggatttctaactccttggtgagttttctattgatgaatgtccttagtttcttagtagaggaaggaaacattttgatttgatattctgtttgtttttgcagccgagacagactagtggtggcacttggattggatctatttgcagtgaatgacgacaagttcatggacatgttcgttgctcctggagccattgtggtactacaaaacgaacgccaacagcttcagaaacgtcaaaagattcttcaatcttgcttgactgagtttaaaacggtggctcgttctctataa

SEQ ID NO: 175156 - DNA, 196 bp, Arabidopsis thaliana landsberg
gcgatcggagattattgaaatagcctgtctattcaagatagacgcgtgttcacaaaataccgactcaattcatcctatttcatcagatctgggatgtgatatcgcacccaaggatgaactggatatcgtcagatccaataagaattcattgttggacaagcacgcattttttcgagttatttcatgtattccatga

SEQ ID NO: 175157 - DNA, 205 bp, Arabidopsis thaliana landsberg
gcaaatccatctgttaccctcgttggttggaagcttaatggacatttgctcgactcgacgacggccactacggcggacattgagattcgaaatacgtcgctactggttactaatgtaaatcacgatcattatggcgagtaccagtgcctggccaccaacagtctgggctcggcaagcagcgaatcagtattcctcgatgttaagt

SEQ ID NO: 175158 - DNA, 413 bp, Arabidopsis thaliana landsberg
atggttattgatgaagatagtgtagagattcaacttacacatgctaaaacgaagttgaacgagatttgcttaaagaaaaagtggcctaagcctatctacaggtatatcctactcctacattttggaagcattcacatacttgagtagtctaaagtcttataatctcaagaagcagaacacatttgataagccattgtttaaaaacattttgttattgtttttcacattttttcagcgttgaggaagatagaagctcggtacagggaaagagatttgtttgctctgctaagattaagataacagaagaaaaaacattatatatgaagggagatgaacagtccaagataaagaaagcagaaagctcctcggcgtatcacatgattagagccttgagaaaatctcattatctctaa

SEQ ID NO: 175159 - DNA, 285 bp, Arabidopsis thaliana landsberg
atggaaatcctgctgctgtcgttgttggtgttcgttttcgtgccggggctggtcctgctggtgcgggcgtgcctggcgaagtctccgcgtgctgccttgttgccggatgcacgccgtccacgcattgcggtgctggtgccggcgcacaacgaggcgaacggcattgccgtcaccgtcacgctgattcgcagccagcttgatgaaaatgccggcgaccgcgtgatcgacggttgcgaccactggaccgacatgacggcatcgatcgccgcatctgcctgcacgcac

SEQ ID NO: 175160 - DNA, 148 bp, Arabidopsis thaliana landsberg
atggtgaggagcgcggccaccaagtaccactgcatcgtcgtctccgccgcccgcccgccgtccagttctctccctctctctttgtcttctacgggattggaggtgggcggcattcggcagggcagcactatcttctacgggattggag

SEQ ID NO: 175161 - DNA, 149 bp, Arabidopsis thaliana landsberg
tgacgacgggcaatagctcgatccgacattacggcatgctcatgacagagttcgacacagccgtcgcggtcgctttgttatcgacggtcaaaacactgtctgatggtgcttgcgaaataggccacatgacttatacatcaacagaatag

SEQ ID NO: 175162 - DNA, 49 bp, Arabidopsis thaliana landsberg
atgatcggctctggcaacaacaaagactgcgaagaatggttcttcgacc

SEQ ID NO: 175163 - DNA, 357 bp, Arabidopsis thaliana landsberg
aagaaaattcgaaatcgaatcgaaaaatgcataaggaatggtaacaacagtagtagacccgacgagaaacggatcggaggtccatcaaccgggaaattaacaacaccgccgacaggagactgcaataaccttccatggcgagctgaatcaaaagccctgagctcagtcagaccaagttcatggttcggcggaatcaatctctccagcttgagaaccgcgtcggagccgcaggccaaggttgtcgcagcaagtaaaagcacggcggcgatgataataactccagcgggagaatccaccgccatttctggagttcgaactttctcttcctggggaaagagagagaaagccgccaattga

SEQ ID NO: 175164 - DNA, 229 bp, Arabidopsis thaliana landsberg
atgaccgcagacggcgccgccacgccgcatgataccgggcagcggccgatctccttcgtgccggccggcatggacctgtgggtcgacgtgatcggcgtgcgctccatgcgccatctggaccttcatttcgatacgcaggtgatcctcaggcgcctcggcgaggacctcgacccgaagaagctggacgatccgcacctgctcttcaacgatcccgggatcgtcgcactcg

SEQ ID NO: 175165 - DNA, 123 bp, Arabidopsis thaliana landsberg
gatcccggtacgattccagcgaggaggatttggacatcggtggatgttggcaccgagatttataaagaagatgaagcaattgcagaatgggatctctctgatttcgatgttcttattacttga

SEQ ID NO: 175166 - DNA, 337 bp, Arabidopsis thaliana landsberg
atggcggaggggcaatccccggagaattcaccgccgtcccctacaccaccatctccgtcatcatccgacaatcaacaacaatcctctcctccgccttctgattcctcctctccttcaccaccagctcctcctccgcccgatgattcctcaaatggttcacctcaaccgccttcttcagactcacaatcaccaccatctccgcaaggaaacaataacaatgatggcaacaatggtaataacaacaatgacaacaacaacaacaacaatggtaataacaacaacgacaacaacaatgggaataacaaagacaacaacaacaatggcaataacaacaatg

SEQ ID NO: 175167 - DNA, 519 bp, Arabidopsis thaliana landsberg
atggtgcctcacatcgacgaacagtttctaagagatgtcgaagccgtgctcaccgctcctgatcgtggattgggtacatgggtcgacaaaaccactgttatgtggttcaaattcaatcaccaactagctgtcgcaattggtgatatactccagcgcaactttcaccatgcgtggccgacgtaccggatgattcccgttgttttcaaggcaaggtggtttttcctcctcacggtaagcatcgagtttttatataaagcacttcctgtaaaccgtagaccaaattcttactatttgctctctttgtagcgtatgcacacctgggattcaaggcacacgctgacggtgtggacgcagtttaatttggtggctagaacgttgtaccgggacaatatgcgggtgctgaaacggggatgggcgcgtggtttggataagccgaggtggatgacgacaacagtttggaatgatttggtggacatgtttactgaatttgacccggatgatgtcggtttcatgtcttga

SEQ ID NO: 175168 - DNA, 84 bp, Arabidopsis thaliana landsberg
ctctttgaaccagccaagtgtgtggtcgaaagaacgattctcttgaaccaaaacgacgatggttttgatcggatacgattctga

SEQ ID NO: 175169 - DNA, 285 bp, Arabidopsis thaliana landsberg
atgcgacgccaactcgccggaatcttggccaccgcggtcatctccgcgttcgcccttcccgccctcgcacacgccgtcgaagcagcgcccgcgcccgccgccgcgcctgcgcgcgccgatccgctgggcgacctgatcaacaccgccctgggcggcggcctgccgggctcggccgagttcaccatgcgggcgacgatgtatcacgccggcgccaagggcatccgcgcgttcgactcgctgggctgcaaggtcgcggccatgcgcaccgtcgccgacgatcccaag

SEQ ID NO: 175170 - DNA, 472 bp, Arabidopsis thaliana landsberg
atgaccgccaagcagcgaaatcaagcttatcaaggcgcgcgcttagtttatgaagtgttcgaaacacttgagcgaaactttgagccaataccattcactttacgaagggttcgtggtgatgttgatgaggctgctctagatcttcgatctcagcttggggtttcgccggatgtcccgatcgctcggctcttgcacgtgtttgaacgttgcggagttgttgttcaggcgttgccgctcgtgctcaacaatcgtgacggatttgctggctgggcttctcgcggcaacggaatgcgcccggtagttacacttccgatcggggtttccggcgatcgccaaaggattaccgcctcccacgagattgccgagatgctttacgaccatggagcatctgggcagcagaaggaagacgcatgcaaccgctttgcgggcgcgctcttgcacaaaaaagctacaatgctgcgcgaactacgcg

SEQ ID NO: 175171 - DNA, 712 bp, Arabidopsis thaliana landsberg
atggattctgatctttatatctttgatgggtcttcatcttcttcctcaatctgccacagtactgatcctgatatgttttcctccgacacaacaacaacaacagatctctactgcaacaatccttatctcaatccttcaatggatgatcatcaatctctcagtttctttgaaagttttactccgacgactcatcatatcctctcttcttctcctccaatctctcagctccagaccttaactctcacacacacaaacagtttccccaacttctccggtttcgaaaacttcgacactgtcaaaacagagcagctcttgtttaactctccctttgatgctccattcatggaagattcctcgaattttcagaatcagaatttgttaaactcgccggaagattccttcttctccgatcacatgcgacgagtttacagcaccggagatttgcaggtactttatctataatatcctctgttttcctctgtgatttcacacaaaaactaatattttggaatttttttagaatttaggaagggattttacgggacagagatcatactcgagtcctttggcggcggagagttcaccaacgacggtgttttccggcgatgaacaaagcttgagggtggggcgttacagttccgaagaacgtaaagagaagatttctaagtatagagctaaacgaacgcagagaaacttcaccaaaaacccttaa

SEQ ID NO: 175172 - DNA, 727 bp, Arabidopsis thaliana landsberg
tgtgcaagcaacagacaaagagtggatacatttgaaagggaagttcctcctcaacggttctgcatcgcgggtagtcatttacatcgaaggtccacctccaggaaccgatattcttctcaatagcttaactgtaaaacacgccgagaaaattcctccttcaccacccccgtctattgaggtaagtcaaaagatccagttcacattttcaccgccgtaaattataggtgaacaaaatattctaaacaaatataacattttctaaagaataaacaatttagcaaaataattttgttctgaagactgttgtttaatttggaaaacgtaaacaaataatcgatgtcttaatccgtgttgttttgtttttttctcgtagaatcctgcatttggagtaaacatactcacaaatagtcatttaagtgatgatacgacaaacggatggttttcattagggaactgcacgctaagtgtggcggaagggtcacctcggatccttcctccgatggcaagagactcgcttggagcacacgagcgtctaagtggccgctatatacttgtgactaaccgaacacagacatggatgggtccagcacaaatgatcactgataaacttaagcttttcttgacgtaccaaatatcagtttgggtcaaagttggttctggcattaatagtccgcaaaatgttaatgtcgcacttggtatcgatagccaatgggtaaatggaggacag

SEQ ID NO: 175173 - DNA, 146 bp, Arabidopsis thaliana landsberg
atggagagggaagcagcttccgcggttgtgaggaggcggcggtcggcggaggggggcgcgagacgcaactcgcgagaggaagacctgggggtgattggaggggaaaacctgggagatgaagatgaggacgttgcctgtccaataag

SEQ ID NO: 175174 - DNA, 755 bp, Arabidopsis thaliana landsberg
attcttaagcgaaactcgaagttcaagaaagtaaaagattttgaagatggcgacaacaacattaaaggtggttcttcttgcatggaactatatgggaagtggcaaatggaaccattgtgtctccctcccgctgttaatggaattgtgcccaaggtaaaacaaatgttgttgtatttgtccttgtttatatcgcttctgcagttgcaacttcatcaatactttaaaacaaaacatactttgtagacgggaatagtgtataaatgtataatccttatgtttttttcagaacgagcgcggtcaagttgatgtctggtctgagaaatgtctcccacctggaacagtccacttaaggtttcctcgaatatttgcggttgctaagagattcggtatagattatgcacctgccatggttggtttcgagtacagaagtaaaggtgctacacctatttttgaaggtattgtggtctgtaccgagttcaaagacacaatcctcgaggtataatctctttaattttcaatctgaaacagagtaccatgttttgaatatggatccgttggttatatcttgtttttcttgttgttttggttaggcatatgcagaagaacaagaaaagaaagaagaagaggagagaagaagaaatgaggcacaagcagcttcgagatggtatcagcttctttcgtctatcttaacccgtgaaagattgaaaaaccgttacgctaataactctaacgatgtcgaagccaagagtttggaa

SEQ ID NO: 175175 - DNA, 327 bp, Arabidopsis thaliana landsberg
atgccgtcggggcttcggtaccaagttgcgcaatctctgattcttcttatgaatcgaaaggtatgtttttttatttattacgtgattgatacgaattctgagatgatcgtaatcgaaagtaatgtttttttaatatgtttgctttggtgtgtgttaaagagtcttgtcatcgaggatttgttagctctgtttctagatattcaaactcttggtgataaaaacttgcgaaagcttgctttctctcatattgttcaaaccattcgtaaaatgagtatcactgatccaaggcacaaatctcttcacaagattgttttctctatgttggag

SEQ ID NO: 175176 - DNA, 75 bp, Arabidopsis thaliana landsberg
atggatgagattattcgagtggaaaaggaaggagatgagacgagagataacattttggagagaaacaaagcaatg

SEQ ID NO: 175177 - DNA, 113 bp, Arabidopsis thaliana landsberg
gtgaggctacaggtcggttacgtaggttaagaagaggattcatgtgtgacagagagacagctgttgcaaacgaagcaaaaagaacgtgcaagatacgagagcgacgcgtctaa

SEQ ID NO: 175178 - DNA, 93 bp, Arabidopsis thaliana landsberg
gtggatgatgaggccatggaattgaacaaagagctaatgcagaaactactagaacttgatgatgttgatgctgtttatatcgaccaaaaatga

SEQ ID NO: 175179 - DNA, 70 bp, Arabidopsis thaliana landsberg
atggagctcgaagaggcaagcaaagaagtatatgagtcgttttacatagaccatagtcctcttagtccag

SEQ ID NO: 175180 - DNA, 120 bp, Arabidopsis thaliana landsberg
acaaatttcatggtttaaaagatatagaacagcgttatcgacaacgttatttagacttgatcactaatgaggatgcgaaggaaacctttgtcactaggagtaaaattcttcgctatatgc

SEQ ID NO: 175181 - DNA, 82 bp, Arabidopsis thaliana landsberg
atggtcacccgtctgtgtcgattaaggatcgttcgatgtaggcctgttgtggtggagactttgcaactatccacatgctccg

SEQ ID NO: 175182 - DNA, 877 bp, Arabidopsis thaliana landsberg
agactgataagggaatatttgaggagattttgagaggagagattgattttgagtcggaaccatggccgtcgatttcggagagtgctaaggatttggtgagaaacatgttaaagtatgatcccaagaaacggtttactgcggctcaggtcctaggtaaacgttactagtatacttggtttgtttggtttaatgtttcgaacgaaggaaattgaaccggttttggtttttctttagaacatccttggataagagaaggtggagaagcttctgataaaccaatcgatagtgctgttttgtcgcggatgaagcaactccgagctatgaataagcttaagaagcttgcattgaaagtaagtatctttgatgtttcgttttacttgatgaaattagaccggtttcgattcattaatatgatttggtttggtttaagtttatcgcgcaaaatctcatagaagaggtactaaagggtctcaagacaatgttcgcacacatggataccgataagagcggtacaatcacttacgacgaattgaaatccggactggaaaaactcggttcgaggttaaccgaaaccgaagttaagcagctcttggaagatgtaaggcgttttgttctctttactaacttaaactaaccggttttgatcaatttggttaatgttttttggtttaggctgatgtcgatgggaacggtactattgattacattgagttcatttcagctactatgaaccggttcagagtagaaagagaggataatttgttcaaagcttttcaacatttcgataaagataacagcgggtatgtgtcggaaaccgatatgtaccaaactgatgaaccagaattaaaccggattaataaccaaattacatgtgttt

SEQ ID NO: 175183 - DNA, 343 bp, Arabidopsis thaliana landsberg
atggcgctgcagccacgagagtaaggattggcctgagcgccacgtagacaattgtagtaagatgcgccgcgacgtgagcacggaattgtgtttctcctcagcgcaccatagctgatgtacctcctcgtagctaatatgcgccggttgatctctgagtccatctcgaactcctctcccatttctcctccgccgtagaatagatctcctccgtctccgagggcggcggaaacagagcactcggcaattgtaccgcggcactctgtttcgaatggagggaaatctccggcgaattcggtggattgagaagatacggcgacggaccagttatgaacggcgagaatga

SEQ ID NO: 175184 - DNA, 288 bp, Arabidopsis thaliana landsberg
atggacgagttcagtaatcttgagaaacatgaatctgaattaggagcattctttggagacttggcttttgaagaggattcatgcaggtaacattctcatgtcttttctgttcaccttaattcgagtatatatgacataagtttctgcttctctttattgttctgatttagaatgctctcctttggttctgtctcattcataaaatcgacattactctttttgttgggcagtgaggatatatcattgaaagggcttcaacaagaacttgaagaatgtgaaagtgacgag

SEQ ID NO: 175185 - DNA, 195 bp, Arabidopsis thaliana landsberg
ccgtcgccaagccgtacggcggcggtgagagcttcaccaacgtcgactggtatcgccaactcgcccagaagctgcggaaccggggcatcgaggccgttcacgacgacaactccaggtacagcaagcaccccgagtactacggaggcaagtggtttgtgaccagagatggttcactgaagagggagcggcccatgg

SEQ ID NO: 175186 - DNA, 71 bp, Arabidopsis thaliana landsberg
atggcaaagaaatttaaagaagttagatcagaagtcagagccagcacagagaagaaatcgccggaaacatt

SEQ ID NO: 175187 - DNA, 393 bp, Arabidopsis thaliana landsberg
atgatttactactacccgatgatgaacgatcgcacgtgggtcgagcgcgaagttcacgagcgaaagctttccgacaccgtgtaccagctatcgacgaacgacgacggcgagccgatgtattttttcctgttcgggatggcgttcttctacctgccatttttcctcgccggccacggctgggcgctgctcaccggcgcgccggccgacggcttcagcccgccgtaccagtacgcgctcgttatcggcggcgtcatctatacgctcatcgggctgctgctcctgcggaagatcctgacgcgctacttcttcgagggtatttccgccgtggcgatcctcatcgtcgtgttcgcgacgaattacggccatcaccttacctacaagaacctcgaaacc

SEQ ID NO: 175188 - DNA, 611 bp, Arabidopsis thaliana landsberg
atgagcaaaggtgcgaagagaatggtgaagaagaagctggaagcaaaggagggaataatacggttctgagcccatttgatgaaaacaacttttcagatcctccttttggtgctaatgacactgttgtgtctccacgagagacaagaaaaacctgtcatgatgagcttaatgtatatgaaagcaatgaagatataatcaatgatggcagcaaggagccagactgtttgctccatgaagatggtagcatagcaggagaaaagacgagctcagatgagaatttctgcagtagtgaagctgagaagcaagaagagtcaaacattcacatcactgtagctgtaggggaaggaaatcaaggacaaggctgtttgcttcatgataatgtcctcgagagtgatgaaactttgaaatccaatgaggtaaacgaaaaaaggaacaaggattttggtgagggtgatgattgcaatgactcttacggaaagaaatttcaagagctgaaggttgaggcattgtcgataaaggagcgtattcttaaggcgcaagaaactgtgacatggttgaagaaaaggagagccacaaaacagagagaaatagcagtagctcgtttggtttag

SEQ ID NO: 175189 - DNA, 94 bp, Arabidopsis thaliana landsberg
ccccgaccacccccgacgccaacccgcacaccgacgtgaccgccgtgatctccccgacgtcactgaccaccccgccggagctctactgccgccg

SEQ ID NO: 175190 - DNA, 161 bp, Arabidopsis thaliana landsberg
atgcccggttgcatccatatcatcggcgccgcagtcgccaacaatcatggcatcgtcatccgcaagcatggcgagatcgtctttgccgagatgcgcgccaacttgcaccgcctgtggtccgaacccacctaccagatgcagaagctgcgcgataacccgct

SEQ ID NO: 175191 - DNA, 903 bp, Arabidopsis thaliana landsberg
atgggcaaaccggagagaaaagtccgagagagaattaactcttcatcttcttattttcttcgatgtttcggggtttcccggaaaattcactcggacaaaccaatagtagacgctggtcaagagatccagaagacgaagaagaagacgagaactcgttggttttcacggccaacaaaatttcgttccaaggaggagatcacaccgacgtcgatttacaagtcggagaaacaaaagttgacttttgaagatgataagcaaaatctgtttcgggtgatacgtcatgtgaccgatcgaaaaaatgttgcgacaagtggttataagaccgttgatcatgaaactaaagaggtatttattgaatttttcttactgaactactttttttggttacaataacaaatattttccctttttgtaacgttttttttttatcagaaagacacgaacgaacaaagagacataaatccggagccgttgagtttcttaggatacgatgacaagttttacgaacgggtatcaacagacggaaaacttgacccgactaatatcgtcgggtcggggtccaagccgaaggaaataagggagaagtcgtcaagggttagaaaacggtcgcgggtctctaaacttgacccggtaattgggatatcaatcataatgctaacgctgatgataatgttgacgtggggacgtttgtgcgcgatactttgtacatccacttggtgctacattttccctcgtctcaaagaagctgctactgcggttgcggtggtcaaccgcaaacgcagtggtagcggtaaaggtgaagaagggtcgtttcaaggtgatttggatttgaactctgtggcttataagaaaaaagtcgttttggaaggatttcttgttcggcaacacagagtttcgatgtga

SEQ ID NO: 175192 - DNA, 174 bp, Arabidopsis thaliana landsberg
atagggcggcctctctttgagaagaagacgttaatggtagaagagaagcggaggcgtcagttggtaaagctgacgagaacaacaaaatcagctgctgctgctaatggtggaagctttgcatcattaagtagattgaagcttcggagacggtggtgcttgtcacggcgacaatga

SEQ ID NO: 175193 - DNA, 376 bp, Arabidopsis thaliana landsberg
atcaccagccacgcgacacaatgtatcacaatcgaatacagcgaagacctcgattcgccttccgcgcggcggcaacgtcgccccgccggatgcaagacgtgcgtcaacctggggtacgccctgatccacgacgaccgcttcggggtttggggaggactgaccgaagcccaacaccgccgggctgcgccaccgaaccggctgaccggccgacctcccgactgtttaggcagctcactccgcgcccgaaccgaggacatgcgcgatgtccgattggtggccggtcaaagtggtccagagccccgggacggcgcgcatcgcgagcaccagggtcgccacggtcagcacggggagaacgacgctttcaccggttttcccg

SEQ ID NO: 175194 - DNA, 597 bp, Arabidopsis thaliana landsberg
attaaagtcgtttctatttggagtggaacaccgactggtgacgctttcaagtcaggttgggtcgaggacgaagaagatctatctgttgactacatgttgcaactaataaaagaggagcacatattcaaggggtccatgttttcaggtggtgttgtccttgattcgctacccgatgaaaggaatgacaacagtgatgtatgtagcacttatgattgtgttgatgaggataccatacaacctgatgcttccttgcctggctcttctaaaccccgtaaaactaaagggcaggttcacataccagattcgattaaaaattacattgacatgaaagacaagcgtatggagtcgcgtatgttgaaggctatagctgattcagaggctagattgagcagcttgttgagggaaagccatggcaggaagaataagcgtcacagtggtcctaagtcaagagatgtgggtgagggattaggtgggaagaagggatcctcccttgttgtttcggataatggcatggttccgaagtctaaagagaacattactcctatatttattaatcaagtcctatctgaccggattcctgattttatcctctcataa

SEQ ID NO: 175195 - DNA, 90 bp, Arabidopsis thaliana landsberg
gataaactgaagataatgatgaaaacaaacagcagttcagttgctgcaggagattctgctgaacggaaacctaagaagagacatctttga

SEQ ID NO: 175196 - DNA, 99 bp, Arabidopsis thaliana landsberg
atgtttcaactggagctgaatgctaacatcgacgagatcggacggttgataaatctcaaagatggatcaattcggacagccattgatactggatgtggg

SEQ ID NO: 175197 - DNA, 1541 bp, Arabidopsis thaliana landsberg
atgacggaaagggcacgtgccgtttacaacaccgtgactagaagaaagcttctccaatcggatgcagacgccgttcaggtgagcgacattgtgacggtgatccagaacgggacgggaaacttcacgaccataaacgccgccattgcagctgcaccaaataaaactgacggtagtaacggttacttcttgatctacgtaacggcgggattgtacgaggaatacgtggaagttcccaagaacaagagatatgtgatgatgatcggtgacggcatcaaccagaccgttatcaccggaaacaggagtgtcgttgatggatggacaactttcaattcagccacatttagtaagttcatatttatttcatttaatcacacaaaaccaacttcatattgaaaaaattagaacataatatacggtttagattagcattagagttttgtccacacgatttttaaaattattagaaaatatgaagacatgtgcacaaaacatggcttcttcgtgcaagtgcgatgtaactattgtttgagaaacttttgtttatcaaatatgtagatcattaattaagaaacaataactgttgtaagttgaacataaaaatattgcaagtccacttagctttttagtatagactttcccatgcaatggatggcgacttggtcggatggtccaccgaaagtcttgactccacgtcaattcgtcgtgtcctcaactaacctaataccatagtccaataaactttttttttttcctctttacaaatattttgtttcatagtccaatttatagttttttttttttaattctaataattaactaactctacgttttgttcacaaatggcagttctatcaggtcccaactttattggtgtaaacataacaatccgcaatacggcaggaccaaccaaaggccaagctgtggcattgaggagtggtggggacttgtctgttttctacagttgtagttttgaagcctatcaagacacgttatacacacattctctcagacagttttatcgtgaatgtgatgtctatggtactgttgattttatatttggtaacgctgcagtggtattacaaaactgtaatttgtatccacgtcaacctcgcaaaggtcaatcgaacgaggttacggctcaaggtcgtactgatccgaaccaaaacactgggacggcaattcatggttgtactataagaccggcagatgatttggctacgagcaactatacagtgaagacttatcttggtcgaccatggaaggaatattctagaaccgttgtcatgcaaacttacatagacgggtttctagaaccgagtggttggaatgcatggtctggtgattttgcattgagcacactttactacgcggaatataataataccggacctggttctgacacgacaaaccgagtcacttggcctggttatcacgtcatcaacgcaactgatgcttccaatttcacggtcaccaatttccttgttggtgaaggttggattggacaaaccggagtgcctttcgtgggtggactgatcgcataa

SEQ ID NO: 175198 - DNA, 406 bp, Arabidopsis thaliana landsberg
cgcggcccgctccgcgcccggcggcaacgtgctgcgggccgaacgcaaggtcgtcgcgcatggccagctgatcggccgcgtggcgatcgagatgaacgaccggcgcagccagcaggacttgcgcgtcaagcagcggcgctacgcgatggtgctggccggccagctggcggtctcgctgctgctgatcgcgctgctgctacagcgccgcctggtggcgccgctgcgcgtcctgatgggtttctcggaccggctgtcgcagggcaagttcgacacgccgctggccctcaggaccagcgacgagctgggccgcctgggccgccagatggagcgcatgcgcatcgcgatcggcgagctgttcaaggacatcggccggcgcgaggagcgcttccgcaccatcgtgacccag

SEQ ID NO: 175199 - DNA, 429 bp, Arabidopsis thaliana landsberg
atgcaggcgcttgccgagcgcaaggcgcgcaaggacagcgccgggcggcgcaagaaggcgcgcggcgaccttccgcgcatcgtgctcggcggaatgaaggagcgcgcggagctgacgggcggagccaatgcgcgccttgccgaaagccggcaggggcaggcggcggaggccgtggcctcggcacgcgagcgcatcgaaatcctccagccgctgaccgtcaccgtgccgtcgacgcagcttccggcaaacaggacggttctgcgcatggagggggtgacggcgggctatgcgccggagcggccggtgatccgcgacctctctttcgccatgacggggccggagcgggtggcggtgacggggccgaacggggcgggcaagaagacactgctttccctggtcacgggccggctcgcgaccattgccgaaagc

SEQ ID NO: 175200 - DNA, 424 bp, Arabidopsis thaliana landsberg
atgctttcttttacctctgttcttccatgtgactcgaatcactctgatcttgaagcttcagtggctaaagaagctgagagtaacagaattgtggttgaaccggagaagaaaccgaggaaacgggggagaaaaccagcgaatggaagagaagagcctttgaatcatgttgaagcagagaggcagagaagagagaagttgaatcagagattctactctttaagagctgttgttcctaatgtgtctaagatggataaagcttctctattaggagatgctatttcgtatatcaatgagcttaagtcgaagctgcaaaaggctgaatctgataaagaagagttgcagaagcagattgatgggatgaataaggaagcgggaaatgcgaaaagttcggtaaaagatcgaaaatgtttgaatcaagaatccg

SEQ ID NO: 175201 - DNA, 307 bp, Arabidopsis thaliana landsberg
cctgcatgtgcgaggggctgtggccaacgcccctccgggcaagtgcacaacatgctgtcgcaagtgcgaaacatgctacagcctgcatgtcgagaccttgcggccacaaaacaaactgtccttaccgaaacgctgcacacctgctgacaccgctggtctgctgctgccgcctgtgctacagcctgcatgtccgagaaggcggaggcgaccctgctgcggttcctgttccgtaccgttggcaccctgctggggggcagcatcgcataccttgccatgttccacccgcagtccgccgacaacctctacg

SEQ ID NO: 175202 - DNA, 488 bp, Arabidopsis thaliana landsberg
atgtggctggtggcgctgatgttcgtgccgatcgccatcttcatgattcacctctaccagtgggcggcctatcccaatccgggagcggtggccgaggctctccagcatcacctggtgaccctggaacaggccatgacgatcaacgacaagcacgccatgttgaatccggcgagcgtcatcgtccagaccatcatcatcttcggtgtcctgttgatctttacgtatttcctcaacaaatggtccctgcagtgcgatgccgatccgatgcacggcacgcaggagagcttcaaccgctggcggaccaagttcgagaatctttgcgggatcggcatcttcatctatgttgttctgctgacggtggggtcgatcgactggatcaagtcgctcgatgtcacctggtactcgtcgatctacgggttgcaattcccttggggacagggctatgccgttcttgcgcttggcgtgctgacggtcatcctgctctcgaa

SEQ ID NO: 175203 - DNA, 612 bp, Arabidopsis thaliana landsberg
atggcatcactcattaatcaaatccccgacctcgttgacgcagaggagggacgaaagccagagtcaaggctcatatcaagcatcactcaactaatgtctcacatcaactcttggagtttttattcaggaatggaccccaagatcatatctctcattattcgaatcatctatctggtcagatcaatggatttggattcgcagacaaagcccaagtcggagctaatgtcactcgttactcaaactatcgctgtctacaactctatggatttggattctcagccgcggccgctaaggaagctcgtatcagttttttctcagtatggttttgacgtaaattctacagtttcggattcagaatcggattcaagtgagaattacgtgtcacacattaaagattcattaaaacttgagccggagcccgagcttatttccttcatccatcgaataggctccctcgtcatctctatgaatccaaactgggagaagcttatttccttttgccctcaatttgaagtaatactgagcgatgatggaaagcttcaagtggaagaaggacgtctaagcaaaaatcagttatccgacgatatcccaatgaagcggaattgtctccag

SEQ ID NO: 175204 - DNA, 684 bp, Arabidopsis thaliana landsberg
gagattctcgaagaatgtgatgatcgtaaagtgttgtttgacaatagttataatgcccccgtgagcaagaaagacaaacaagtccatgatcttctcaacctcgttgaacaaatctcaaagaagaacaatggaaaatcttatatggctgacttatcacatgaactaagggtgacaaaaagttacaaaacaagatttcacattttgtatagtgttaaatatctgagttaaaatttcgtctctttggttctaggagaatgaggccactataaaggaaaagcagaagcagattgaagaaatgaaaggctggtcttcaaaacaagagatatctcaaatgaaaaaggaactagagaaatcgcataacgaaatgcttgaggggataaaagagaaggtgattaaattcattcattggtttatatgtaacgtgtatataaatgaataatgtcatcattacaagttgttgttttctttggttagatctctaatcagctgaaggaatcattggaggatgtgaaggagcaattagctaaggcacaagccgagagagaggaaacggagaaaaagatgaatgaaattcagagactatcttctgatgagatcaggaggctaagagaacaactcaacaaagctgagaaagaaactgcttcgttacgcaccgaactcaacaagaaatgtactgttctttga

SEQ ID NO: 175205 - DNA, 55 bp, Arabidopsis thaliana landsberg
atggcggaagcgcggaagtggacgcaagctgatgtcaccgcgaaggcgaagcccg

SEQ ID NO: 175206 - DNA, 123 bp, Arabidopsis thaliana landsberg
attgaaatcgagacaaacctgaaagattcgaaaacaccgattggtggtgtcaaagcaaaatcgaagaagcttgctgcttgtgagggattcattgagaaagaacaagtccaaatggggttttaa

SEQ ID NO: 175207 - DNA, 225 bp, Arabidopsis thaliana landsberg
gcctccgccgactacaaggccgccgaaaccagcaagaaggccatcaaggccgagatcctggacatcatcggccccaatgccaaggtcatgctcaacggctgctacatcagcgccagcaccacgaaggacagccctggcaccctaatcgaggcgcacatgatcggccagcgcattggcggtcggaaaggtttccgcaacatgcggatctatccgaccaaggcgtag

SEQ ID NO: 175208 - DNA, 691 bp, Arabidopsis thaliana landsberg
atgaatgagaaagttgagaaagaagatgttgttcaaaatgaagctaatgaacaagagacagttacaaagaagaatgaagaaggtgatatagtcgacaaaaaagatgagactcctgaagtagaagaaaaaattgacaaacctgaaacaaggtagatcacttctaacttaataatttttattacatttgttcaagtgtactttcttgagatggtacatgtgttttaactctcttttttttttttttgtagtacaagaaaacttgaaatacatatagcatttctaagtgagaagtatgaggcagacatcggaaaagttatttctaaattcgaaggtatataataaaaataatactattattcatatatatttgaaatatgtgttattttaatcatttatattgaatggtgtatgaataggggtcaaaacatgtaaggtcgatgtagaaaacaaaaaagttgtcatcactggcgattttgatgaagagaaattgtggaaagaacttgaggaaaaaatgcgtaaaaggatagtcaaaatggaaaaggaaaaaaaggacgatgaacctataacgaaagatgaagaaaatgaaattgatagaggtgtttatatgaaccctagtagtgatgatgagaaagaaatggctagatggatgatgtttagtgatgaaaatcctaatgcatgttctatttcgtaa

SEQ ID NO: 175209 - DNA, 660 bp, Arabidopsis thaliana landsberg
gtaatgacgtcgcgttgcttccaccaaattgcttctttcgaatgggagcagctgcagttatgctatctagtcggcgtatcgacagatggcgagccaaataccaacttatgcaggtgagaagaacaaagaaacactctgatttactcttgctctgttctttgttttgactgatgacattgtaactggtgaataaaacagctagtaagaacccataaaggcatggaagacacaagttacaagagcatagagttaagagaagacagagatgggaaacaaggactatatgtatctagagatgtaatggaagttgggcgccatgcactgaaagcaaacattgcaacgcttggtcgtcttgagccttcctttgaacatatatgcgtattagcatcgagtaagaaagtacttgatgacattcataaggatctcaagttgacagaagagaatatggaggcatcaagacggacattggagcgtttcgggaacacatcaagcagcagtatatggtacgagctggcttacctagaaacacaggcgaagatgaaaagaggagatagggtttggcaaatcggtttcgggtcagggtttaaatgcaatagtgttgtatggaaagccctaaaaaacattgaccctccaagacataacaacccatggaatctctga

SEQ ID NO: 175210 - DNA, 644 bp, Arabidopsis thaliana landsberg
aaacctgccgagctccgaaagccagcagcaggaacttttctgtagagaaagagccgcccaaaacttccccaaaagcgtcaccgtcaaaactgcctttctccccaaaaggcaagaatggagctctcccaagtaacaaatgggtccgagatcctaacgcttactgtgaaattcacaaaatgaatggtcatgccacaaaggactgtaaggctttgggaaggttgttggctgcaaagtttgcctcgggtgaaattcctgacattgacgtcacaacaatcgatctggctcagacagcatacgaggtgttagattccaaaaaatcttcaccccccaacaaaaagcaaaagagtgaaccagctcccgtcgctccaaagggcccgaagaagatggtcaaagtaattatgggaggatccaagctctttcgggattctatcagcgccattaagcagcacgaaaggaaagtagtcactccgatggcgaaaaagcctaagaccaatcaagctgactggcctgaaatttcattttcggaggaagagacctgcgacttggataaacctcacgacgacgccctcgtaatatcactcgatgtggggaactgcgaagtacaaagaatcctcattgacaccggaagttcagtcgatagatag

SEQ ID NO: 175211 - DNA, 137 bp, Arabidopsis thaliana landsberg
atttatcctcctcctccgtcgtcgacgccgtgggtataatctccgacggagacatcctgaatcgctggacaccgatcctccacttccggctagaccacaacggtcttgattcacaagccgacgtctcgtcttcataa

SEQ ID NO: 175212 - DNA, 99 bp, Arabidopsis thaliana landsberg
atggctacgaacgctggttatcttcggtgcaaagaagagcgcaagaatgaaagcttcttcaaggttgttcagagtataaatgtttcttcagaaaacaag

SEQ ID NO: 175213 - DNA, 1542 bp, Arabidopsis thaliana landsberg
atgaaccagtataagccaatatttttgggtacggccgatccaaatactgagcttagcaagctatctcgggcatgtaacacccaaaagtgtattcgtgctggtggaaagcataatgatttggatgatgtcggcaaagatacgtaccatcacaccttctttgaaatgcttggtaactggtcctttggagattatttcaagaaggaagctatcgaatgggcttgggagctcttaaccaaggtaattaaatacctgggaaatttgtctctgtttacttgatttaagaaaaatatacatggtattattcagtaaactattgtctccctcccttgggacggtatgtctcaattttgtaaagtgattcttctcttttcatttggttgtacatttcagttttgtaaagtgattcttctcttttcatttggttgtacatttcagttagataccttgtgacagtatttcataattttgtaaagttactattctcttttcgttgaggttgtttatttcattgaggttgatacctccctgttttcatgcctcaggtctatgggctaccgactgatcgaatctacgctacatattttggcggtgatgagaaagctggccttcaacctgataatgaggctagggatatatggttgaaggttcttccatctggacgtgtgctgccatttggttgcaaagtatgtattgattatttaagataataacttttaatctgttacctaatttttttgaatccactactcattgatttcctctctcctgaggttacttcacaagtacttcagctaagttgcctttgtattgtcaccattgtttcttgtatatattgacacatctgtttgtcaatgctaacgacaaccaactgtaagcttgaatgcattttggctaggaatacgctatcatgtttggtagttggcaggctttaaaaaccattgtttatgatttacagtcaaaatcttgtacaaaatgtaaaacttaagggtttttaaatgctgtttttctttcatttaacttttgattaaactgcaggacaatttctgggaaatgggcgacacaggtccgtgtggaccttgtactgaaatacattatgatcgcattggtaaccgtgatgctgcatccttagttaacaatgacgatccaacatgtttagaaatatggaatcttgtctttattcaggtacaaaccctctctgtcccaattgttatttagttccattttactaatctttatctcaatatcacaattgttttaatgattttgtagattgtgttactgaaaactctatattgtgcagttagctagattgttattgctcctttagctgtgctatcatattcccaattgtttcctctgactgggatgttacttatgtcttcaaaatagttcaaccgagaaagtgatggctcgctaaaacctctgcctgccaagcatgttgataccgggatgggcttcgagaggttgacttctgttcttcaaaacaaaatgagcaactatgatacagatgtgttcatgcctatctttgatgacatccaaaag

SEQ ID NO: 175214 - DNA, 55 bp, Arabidopsis thaliana landsberg
atggcggatgaatcctttccccaaggcgtggccgctaccgacgacacgatcgatg

SEQ ID NO: 175215 - DNA, 151 bp, Arabidopsis thaliana landsberg
tgaccgacaccgtggcgaatgccggcgcgtccgacgtctgcggcgccaagatctccgcaaaggcgatcaacgaagctgtcggcgtcgacggtcaggcgatcgcaatgcatgtcttcgacaaccagagcatacccggcctttgccgcccagg

SEQ ID NO: 175216 - DNA, 216 bp, Arabidopsis thaliana landsberg
cgatcctttagcagagaagaatgcgccaaatcagcttcaaaacacagactttgtttgcttctgcaattgagcgaagacccaaaccgccttcttgtcttggagtgcaaacctcggcccatgccactttcaccttacgagaattcaaagatggaccggaccataaaaaagcagaacacagtttatcaatttcctgaatgcaagcttttggcagcctaa

SEQ ID NO: 175217 - DNA, 249 bp, Arabidopsis thaliana landsberg
atgactctgggatcaaaacgacctctcaccgagaaggatgtatggcatctggacacttgggataaaactgagactcttatgaggaggtatattttaataaataacagctgttctcatactgtctatgactggcatggttgcgtgacatatttttatctcattttttagcttccagaagtcctgggataaggaactagaaaagcccaagccgtggcttttgagagcactgaacaacagccttgggggaag

SEQ ID NO: 175218 - DNA, 76 bp, Arabidopsis thaliana landsberg
atggggattgccaacacagaacgatgcagtacggccactggcactattaaaattctagaattatccgatgttcccg

SEQ ID NO: 175219 - DNA, 519 bp, Arabidopsis thaliana landsberg
atggtgcctcacatcgacgaacagtttctaagagatgtcgaagccgtgctcaccgctcctgatcgtggattgggtacatgggtcgacaaaaccactgttatgtggttcaaattcaatcaccaactagctgtcgcaattggtgatatactccagcgcaactttcaccatgcgtggccgacgtaccggatgattcccgttgttttcaaggcaaggtggtttttcctcctcacggtaagcatcgagtttttatataaagcacttcctgtaaaccgtagaccaaattcttactatttgctctctttgtagcgtatgcacacctgggattcaaggcacacgctgacggtgtggacgcagtttaatttggtggctagaacgttgtaccgggacaatatgcgggtgctgaaacggggatgggcgcgtggtttggataagccgaggtggatgacgacaacagtttggaatgatttggtggacatgtttactgaatttggcccggatgatgtcggtttcatgtcttga

SEQ ID NO: 175220 - DNA, 618 bp, Arabidopsis thaliana landsberg
gtcatagccaagaacttgcttttgttgatagagtgaaggcaaagcttgataccgcggataaccaagagttcttacgatgtcttaatctctattcaaaggagataatcagccaaccagaattgcagtctttggtatgcttttatgctgacttaagctttctcactgcatggttaagttggagaagtttgtgagaaaccttatggactttacctgtcaatgactcgtgaacatatatattcttgtattaggtgagtgatttaattggtgtatatccagaccttatggacgccttcaaagtctttttggctcagtgtgacaagaatggtaataaccagtccaactagtgctttctcttcttacactcgccagtcaaagaacttaagatttgaccttttttcttttttctttctgcagatggattactctctggtatcgtgtctaagagtaagtctagtaccttttataatatacttctgacatacctcttcggacgtattgaattgactctaaccattggattactgtaactacagaatccttgtggagtgaaggcaaatgtcctcaacctactaagtcacttgacaaagatacagaccgagaacgtgagaagattgaaag

SEQ ID NO: 175221 - DNA, 111 bp, Arabidopsis thaliana landsberg
aaaaaacaaaatgttttgagtggtaacggtcgggaatctgggaccgccatttggagaattcggttgattaaccggtttgatacgacacttttggtcattaaaccggattga

SEQ ID NO: 175222 - DNA, 118 bp, Arabidopsis thaliana landsberg
atgaagtttgataaaaggaatatcgttatcggaggaatgtgggaagaaaatcgagtgaaagagtcaaaaggacatgaatggttcaagactaaaaggaaggatgtagaaataatgatgg

SEQ ID NO: 175223 - DNA, 195 bp, Arabidopsis thaliana landsberg
gttcgagatatagatgggttaaacgagcagctaggggaggattcacggtgcttagagcatctacagcttcagctgctacaagagagaagcaagagaacagagattgaaagagagaacacaatgttgaaagagcaagttgatatgcttgtgaacatgatacaagaagatgaagaagaaggagctgaagaaccctaa

SEQ ID NO: 175224 - DNA, 156 bp, Arabidopsis thaliana landsberg
atgagtaggctctctttccggccacggccattagacattcataagaagcttcccattttaaaatcctttaaagactttgaagatgatgagactccaacttctaccactagaaattctcagttgctgcgtattgcttccgtagaagttgacaatgag

SEQ ID NO: 175225 - DNA, 295 bp, Arabidopsis thaliana landsberg
gaagtgaagactactcttttaagcacatgcgcaggaaccaatatgaagaaagcttgtttagatgtgaagatgataggttcgtttacaaaaagtattacacatttgatagcttttgtagtctttaagtaatttgtatgttaagattgtttacttgcttcttcttacagatttgagttggacatgctgttggaatctgtgggatctgctgccaaaagtgcagaagaattgttgaatattatcattgataagaaaataagttttgagggctccttccggattgaagaccatttcacag

SEQ ID NO: 175226 - DNA, 278 bp, Arabidopsis thaliana landsberg; identical to SEQ ID NO: 174900

SEQ ID NO: 175227 - DNA, 415 bp, Arabidopsis thaliana landsberg
caattcggtggaaatagccgcaaggctgtcgatgaagtgatcgggggatgggaagtgagccccatcgtctccatccgtactggctggccactgcctggacctgggggggctgacaactccggtaccttcggtcgtggaccccgagcggactgcttctccttgccgcccatcgtcaacacgccgttaccaggaataggccaacagtggttcgtcaacaatggaaatttcgctaacgcggcgctcggtaccttcggaaactgcgcagcgcaactcggaggtctgcgaacgccgcgttacaccgatgtggatgccagcatacataagaacttccaaatcacgcaacggtttcgagtgcagttccggaccgacttcctcaaccttttcaatcaccctcaattcaatgctccgaacatgg

SEQ ID NO: 175228 - DNA, 148 bp, Arabidopsis thaliana landsberg
atgcaggttgtctaccgcttgctgaagatcagcctggaaagctaccagctcgaatttcccgccgttatctgctgttatgccgcttataatttcgagcgcctgttgatagtcgctccgcgcctgttagaattcctggcggaagatgact

SEQ ID NO: 175229 - DNA, 241 bp, Arabidopsis thaliana landsberg
acaaggaggtatccggcggcgggtgggcattttcctgtacccggatgacttcgttggagagatgcaaagtcggcccataaaacagggcgctacccaacaggtataaaagataaccgccgcaggacaagcaaaatataaacagggctaccttcttttgtcttaccgttaaccgctgttcctgtttttgcaggtgacggcaaagggaaagctgagcggctataatcctatgggcgatccatga

SEQ ID NO: 175230 - DNA, 177 bp, Arabidopsis thaliana landsberg
tttctctcgtcggaacgtggttccttcgtgtcggccattttctccaccggagaacccgaatcgattcacagggttagcggatctcccgtgggtgttgctctcttcctcgtactgatcttgttcttactctactaccgcttctctatcttcggcggagatgatggttccgatgactga

SEQ ID NO: 175231 - DNA, 112 bp, Arabidopsis thaliana landsberg
actgcgatccgttttcgagcttggaggaatcgacagtcgagattcgacgaccaagtgatccagctttgcgagttctacgagattgaagaccttgagcagctatttgatgaag

SEQ ID NO: 175232 - DNA, 497 bp, Arabidopsis thaliana landsberg
ggcgggaattcgacgtccatacgtctggatcgccggtcgaggacatcgccatgctggacatttgtcggacaattgtccaccctgtcggaacgacaatgcgcaaagccgcatcgagcggaaccacgaggagagcgcggatgaccggcaacatcgccgtacgacgcctgggcacctgcctgggtctggccatgaccatgggctttgccatgcaggcgatggcagcgcccgaccaggcgaccacctggtcgggcaaggtggcgccattggccacgccgtggacggccgaggtctcgccaaccaatgccttgcccgactatccgcgcccgcaactggcgcgcccgtcgctggcgcatccgcagtggatgaacctcaacggcctgtggcaatacgcgccgggcgacggccatggtgcgccgccgttcggcaagacgctggcggacaaggtgctggtgccgtatccggtcgagtcggtgctctcgggcgtgcagaaaaattaa

SEQ ID NO: 175233 - DNA, 143 bp, Arabidopsis thaliana landsberg
atgtcttctcctgcgcttggaacggctgccaatgcgaggggaaagacgttaatggagaaagatgagtattctaagggaatagagaccaaacattcaagcgatgaaggcgataaagctcctagtcgtgttaagccacatggaag

SEQ ID NO: 175234 - DNA, 369 bp, Arabidopsis thaliana landsberg
ctgcaatatgacatcctgcccacactctgccatctgtcgcatgtatctctgcccgacgggccgctggacggagaagatatcagcggggctttgtttggacatcctcagaaaagagcccatgacctgaaatgggcttatggcctcaatcaggcttacctgaaaccgggtaatccgaggtaccgcagtcctgagctggctatcagggaaggggattggaaactgctggtaaatgaagacggtacggatccggaattgtataatctgaaggatgacatagccgaatcagacaatgtggcggcgcagcatcctcgcatagcaaaacgcttatcggataaattgatcaactggtggaaagccgtacatcaatga

SEQ ID NO: 175235 - DNA, 223 bp, Arabidopsis thaliana landsberg
atggtcgccctctctggtgctcacaccattggacgagcccaatgtgttacattcagaaaccgaatctacaacgcaagcaatatcgacacctctttcggcatctctaaacggaggaactgtcctgccaccagtggctccggagacaacaagaaagccaatcttgacgtccgctctcccgataggttcgaccacggcttgtacaagcaacttctgagcaaaaaag

SEQ ID NO: 175236 - DNA, 1016 bp, Arabidopsis thaliana landsberg
  unsure (1)..(1016): unsure at all n locations
atgccaggttttactgatttctctatgccaaaacaaattgatgattttactgctctggaacaggtaagatacttatttcttgcaccatcttttattttgttaatgtattgtcaattgctacttagtatggtcttctcatttagaagaactaagtggggaattgatctgatgttatataaagacgaccaaatcgtcaaagatattgagtggatgcctctcgctggctggatcataatcttcttaccttgtcttggattgctctttgatttttctttaggatgttagctaacactgtttgtctttgtacaccctttgtcctgtgacttttctgagctacagtttcatttttcacttgcagcatattgaggatttaacacaagaaaagttttcactgcaaagggatcttgatgcttcacgtgcactggcagaatccttagcatcagagaattcttcaatgacagacacttataaccagcaggtacatgcaagcttatggcatcctagttgaatactggccaactctgatttttgtactagaaaacaatcttgaccacttatagtagatgactaattatttgcatttatcatgcttaattattagcaagagtatactgtcatgtggttntaggatccttgggaaatggaaatataagaatatttattattcatgatgtggatggatgtgatttgagtctttcgttaaagcgttatgctcttgaattaaaccatgtttagactttgttgcgaaaacacacagtgttagactatgtgtttggagaaggtgcttcaggatgtctacctagttgacatttactgggcttgtctacttttgagaatgcatgatgttatatattgtttgctataagacatggtgtccactgagctttataatagtcacaaatcctcccaatgttttatgtaatacttgttctcgtttctatctcatacagagaggtcttgtcaaccaactaaaagatgacatggagaggctatatcaacagatccaagcccaaatg

SEQ ID NO: 175237 - DNA, 207 bp, Arabidopsis thaliana landsberg
ggcacccaaatagaggcaacaatcgggcctcgtttttctgccttctattatgacagaatcaaagagaatcaatggaaaacgattactacttttattgttcgaccaaactgcgaagcaataagaacaactcctcatgaatttcggattttgttcatggagcaaactggcgtgacttcctcaaccaccaaagaaaaccgttgtgcttaa

SEQ ID NO: 175238 - DNA, 340 bp, Arabidopsis thaliana landsberg
atgaatcaacagagaagacatccattttctgtagtagcccacaatgccacaagtagtgatggtacagaggagcagaaacaaataggcaatgtgaaagagagtgacggtgcgcaaaattcttcttcatgttgtgtttctattaagttgcaaacatagagagtcttattctattaagttgtgtttctgctaaataggtgaggataaaagtaaccaagaggtgtttcttaagaaggatgattcaaaggtgacagctttgatgcaacaagctgaacttctcagttcattggcccagaaagttaatgcagacaacacagaccaaagcatggagaatgcctggaag

SEQ ID NO: 175239 - DNA, 165 bp, Arabidopsis thaliana landsberg
gctgctcagtttaaagcagttgctagcgtaggagtttcgggtagccaccgcgggcttctccgtgatgaaagagtgtttgagctcattcaacaatggttaggagttgagcccaagaaggctaaacggaagcatttaaggactcacaaagtagttgattctggttaa

SEQ ID NO: 175240 - DNA, 397 bp, Arabidopsis thaliana landsberg
atgggtgtggattctcaggtgaaaggtcctgaagcagagctttctaggagggtgcaaagtctgcagacgatatctcgtgctcaagcaaattcaattgctgctggtagttccctttatctccctgggtcaactaaaatagacgagcagagcttgatagatatgcaggaggtatgatatacaacatcttttgtcactaatctctggattggcatatggatatttagatttttctttaggaagctacatcaggacactatgtaacggtttgtaacattgtaaataggtattgcaacaagagacagaagccataggaagacttgggaacgtattgaagcgagacatgagggatatggaaatcatggtggctgaagatacagaaatggcactagactcatag

SEQ ID NO: 175241 - DNA, 142 bp, Arabidopsis thaliana landsberg
gacaggcaaaggaaatcctcctgttacatttgcgattgctgcttctgagactcagaatgttaatgtaactgttttaccatgctttggattgtctgaagatagttcttttacagcgaaagatatgtgggatacaatggaacag

SEQ ID NO: 175242 - DNA, 790 bp, Arabidopsis thaliana landsberg
atggttgtctttcaatatggttctgctattcttttcaatgttgatgataatgatgttgaccgttatctcgacattgttcgtagacatgcttctggattgcttacagaaatgagaaaagatggttagcatccgtcctctcttacagcacttagcttgaaaccatagctttgtaaatgaactgatcttttgtggactttgttgtgttagattatgctgtgaaggagaagcctttgctgattgaggaaatgaaaggtggccctgactacattgttctcaaaactttggatactaatagcatccgtataattgggagtgtgctcggacaaagtattgctttggattactctgtttctcaggtaacttgttccttctcagtgttgtcaattgatacaagtatatggttaaatttgagatttgtatttatctcaggttaacaagttggtggaagagtttgctgatataaaccgttcaatggcgaaaaccggaacattcacaatgaccaggaaaaagctcttccaacttgtagggaaggcgaattctaatatagccgatgtgattctcaaagttggtttgtttgagaggtattctactaatgttaaatcactttatattgttgttttctatgatctctatatatatatgctgagactcatatgttctcttgttttctcatagatccgagattgcttggagagaagctagatatgctcagatatacgagtacctaagagaagagtacgagatctctcagagatttggggatctagactataagctaaagtttatagag

SEQ ID NO: 175243 - DNA, 491 bp, Arabidopsis thaliana landsberg
atgagtaactctgtagtgcataacttacttaaccggggtttgattcgtcctcttaactttgaacatcaaaacaagctcaactcctctgtgtaccaaacttcaacagcaaatccggctcttggcaagattggcagatcaaaactttacgggaaagatcttaagcaggcaggacgcagtctggtcactgaaacaggaggaagacctctctcatttgttccacgagctgtccttgccatggatcctcaggttattttcttatggatttacttttcaccactattgacattgtttggaatgtgatattttggttccaactactcaatgtatgttagacgtttcatgtccaaaactttttcattgacctgaatcatatgcattgttcttccaattgaatgcataagatagttattttatcgacatgtgtgctaaaaagtttcatcctttaacaggcagccgagaaatttagtcttgacggaaatatcgatttactg

SEQ ID NO: 175244 - DNA, 231 bp, Arabidopsis thaliana landsberg
catggctttgatcctttgaacggtggagctaatcaaggtattgactgtggtggcagaaacttccaggttggtatcaggagagtaactcggaccggagacaaggatctggaaagccacggtgaggagtgtatagctgccaccctcggcttcgccctcggaaggacggccgtcacgggagatcataaaaccggaagggaggattggaatggtggtaggatcgatatcgcctga

SEQ ID NO: 175245 - DNA, 454 bp, Arabidopsis thaliana landsberg
ggaaacattgttcattgcggactcagaaatggagccattgtgtcagttgatctacgtgagagaccaggtagaccttttccaaggctcactagacaccagatacgatatcaatcatcgagtaaaacctgtcaaacttctacaaagaaacaatggttcgaggtactgctaagatcatgtaacgactttgttctggtcacaacttttcattttttctcttgagctttcttcacaagtcacaacattctatttttgcagctccaaggaaacataaacccgtctcatgtaatctatatgccgtcatctcttacatggttggtacacgactgaaaccaaatatgaaatcctctttacttctttgtttttgtgactctattaatttgctccttccttctccagcctgaagacactaaaaacttctgatcaatacttaatggcaagctccatggatggaaca

SEQ ID NO: 175246 - DNA, 541 bp, Arabidopsis thaliana landsberg
atgcggaaccggacctcagtgaagacaaggcgcaacatcaatttaatgccatctccctctgccctgaacatcgacataggaggagccagagaagatgaacaagactatactcaagttgactatgagcaacatgagtattatactcaagctgactatgagcagcaagtcgaattccagttacgtagagagcaagaagaagttaagaacaatggagaagtcgccgaagagtatggctgctcaaatcaaggaattccagggcaagccaaggccaccgtctcccacccccgaagtaagaagaagcggttccacgagctcagctgcaaagagggctgaaaggatcgatcaactccgagcttcatcgtttgagcctcgggaagtgatctccgagttgagagagccaaggagtagacagagacgaggttccacacgctcaaccaactactcgaccggacagaacgagcaaaaccctccctcctcaacttcaacccctgcttatactcaagagagtatggacaattacgtctccatctacttcacctga

SEQ ID NO: 175247 - DNA, 72 bp, Arabidopsis thaliana landsberg
atatgggtcagatattagccatcgtgctgtgaaggataaaacttatgagacagaaggctcagctttagcttg

SEQ ID NO: 175248 - DNA, 150 bp, Arabidopsis thaliana landsberg
gacgaggccgcgagcgaggaggacaagggcaagttcgccaagttctacgccgagttcggcgccgtgctcaaggaaggcctgggcgaggacttcggccaccgcgagcgcatcgccaagctgctgcgcttcgcctcctcgacgaacgacgcc

SEQ ID NO: 175249 - DNA, 107 bp, Arabidopsis thaliana landsberg
atttgagattcggatcgggttcggatcggatatttcgggtttggattcggattacccgaagtttccaaaaatcaatgtttataaccaaagatgttatgcatcagtaa

SEQ ID NO: 175250 - DNA, 33 bp, Arabidopsis thaliana landsberg
atgactcatcgtgtcagccgatttatggccaag

SEQ ID NO: 175251 - DNA, 696 bp, Arabidopsis thaliana landsberg
atggagccatacaaagcaattatcctcatcggagttactgtttgttgttatacattctccggcgtatccaacgtccacgccaccggccgttcagtagaagagacatcccaagtccctgcttcctcacctgacccttcgctcatcgaaccacccgtatcatcaatctcggtcgtcccagcctccgcaccatcccccacctctgaagacattaacaccggatctaatttagctcccacggcggcagtctacgcacccggaccatcccaagaagacatagacatcaacttcgactctgtcacaaacatagctgatctagctcctaaatttgaacatataaacaaattcgatttctcgtcaatgaaaatcgacacgacggcgaaagatctctgcaaaaacacagactacaacaacgaatgcatcgccgcgattctcccggatctacagaaacaagcagaaggagaaggaggagacggaggaattgctcctaaggatgtgatgcgaatggaagctgaatctctgttaaaaaaagcgaacgcgactttggattacgcgaaacgtgtggtggaagatagcaaaacgccgatgccggtgaaagaggcgatgagtgtttgcgtcgagaattacgattcgttgatctcaggtcttgaagatgcgaagatggccatggaggagggagattacgggagattggattcg

SEQ ID NO: 175252 - DNA, 196 bp, Arabidopsis thaliana landsberg
atgtctgctacgagaggaggtcctgatcaagggccgtctcagcctcagcagcgggggattatacgaactcagactgctggtaatcttggagagtcattcgatagtgaagttgttccatcatctcttgttgagattgcccccattcttcgggttgctaatgaagttgaatctagtaatcctagggttgcgtatctct

SEQ ID NO: 175253 - DNA, 116 bp, Arabidopsis thaliana landsberg
atttatcatcatcatctaaaacctctggggatgcgtcagtatcatctaaaccctcttcagatgcatcatcatcatcatcattatcatccaaatcttcttcagatgaatcatcataa

SEQ ID NO: 175254 - DNA, 81 bp, Arabidopsis thaliana landsberg
atggtgaagggtgaagaagcttgcttgagaattggctctgttcagcttgtggctttggatttagaatccatctacattgag

SEQ ID NO: 175255 - DNA, 124 bp, Arabidopsis thaliana landsberg
atgggtgatcttcaaatcgtgccggtgtacaacaaggtggaagcacagtacgtagaaatgatggtgcctttgtattcttacggttgcgaccagaaagtcaagagggctctttatcatctcaaag

SEQ ID NO: 175256 - DNA, 477 bp, Arabidopsis thaliana landsberg
atgggcaccaacgatggcgcggtggatcatccgttgctcgtcggccgtacttaccggttgaccatcgtgcagaactacaccaatggttacatcttcaccaattggacgtatactgcggaaaacgtcgatccggataccatcctgcaatcctacacggaaaccaatacgttgatcctggattacgtgatgcgctcgaacatggtgttgaaagccaacttcgtgaccaacaagttccgcatctatcaaggcagctacaacggtctgttcgctgaaacggatgaaaaccgccagaacagctccggtttcatcacgttgaaagtgacggataaaaccgcagtcagcggcaagctgttgatcgatggcgaccaggtgagcttcagcggcaagctgaacatccacggcgcgaccaacctcatcgccaaacgcttcaaagcgatgaacaagagcgacctgaccgtcgcgctgaacatggacatc

SEQ ID NO: 175257 - DNA, 67 bp, Arabidopsis thaliana landsberg
atgaggaggccaccaacttggaaattaaggttggatttccgctgcatacagctaaaaggatttgaag

SEQ ID NO: 175258 - DNA, 152 bp, Arabidopsis thaliana landsberg
gcattataacatgaaccggatccgattagtttggtcccgcatatggaatgttctttctgatttcttcgtatcagttggcttgtcagagaatctctctgttgcaatatttgtcatggactcgcttcgtcagcttttcatgaaattcttggagc

SEQ ID NO: 175259 - DNA, 358 bp, Arabidopsis thaliana landsberg
atgaaggaaagtgtggagtctgctgacaataaagatgccgaaaatccagaaggagagcaagagaaagaatcaaaggaggagaaactggaaggagggaaagcaaatggaaacgaagaaggggatacggaagagaagttggtcggtggagacaaaggggacgatgtcgatgaggctgaaaaggtagagaatgtggatgaagatgacaaagaagaggcactgaaggagaagaatgaggccgaactggctgaagaggaggaaacaaataaaggagaggaagtgaaggaagcaaacaaagaagatgatgtggaggcagacactaaggtcgctgagccagaagtggaagacaaaaaaacggaga

SEQ ID NO: 175260 - DNA, 251 bp, Arabidopsis thaliana landsberg
atggtggacaagctcgacgactgggcggccgtcagccgtttcttcaaggcctaccgccagtgcgatgacggctatatcgccgaaggcagttccgacgccatcgcacaactgctggccacgcaatgggaaaccttgccgaagttgcaggcactgatccggcaggaaccggcgctgcgttccttcgtgctgggccacatcaacagcacgctggacaccaacgagctggaccggatcaagcacaacgcctcgga

SEQ ID NO: 175261 - DNA, 415 bp, Arabidopsis thaliana landsberg
gaaaatgaaaagcttgtgttgacaccattcgagaagaaccttgatatctggagacaactttggcgagtgcttgaacgtagtgatttggtatgtctgttttccaggatttcttttttcgtctcttagagctcattttgcatggtttagttaattttttaatatgattggctatttttttctctttcagattgttatggttgttgatgctagagatcctctgttttaccgctgccctgatcttgaggtaactctatctctgccaacttgctgatatctcttaattgaaccttcctgatccatatcaaacattaacgtggagatttgttctgaaacaggcatatgcacaagaaattgatgagcataaaaaaacaatgcttctggtcaacaaggcagatctgttaccttcttatgtcag

SEQ ID NO: 175262 - DNA, 157 bp, Arabidopsis thaliana landsberg
atgcgtggagattcaaagcaagagggagatgaagaaagcaagcttacagtgagctgtgctaatgacgtagaagggattcgcgtaaggaagagaggcgattccagagaagaagaagcaaagggattcaaatccctaaattggaactgggattttcaaa

SEQ ID NO: 175263 - DNA, 99 bp, Arabidopsis thaliana landsberg
ctggtaaagagtataccctaaaggtcagttctgtggagatatctccagacccggctaagcgtagcggtaatggagagattacgataaccggtgttacaa

SEQ ID NO: 175264 - DNA, 662 bp, Arabidopsis thaliana landsberg
catctgcgggttgaggaaaatccattgctgaagatttctcacttggaagcggcatccatactactcgtaggtcctaccttgaagaaattcaatgacagaggtactcttttgtagaacgaagtgctgtagtttgcttaagactgatcgtttcatgagaaagatgactagcatgtctaagttttcattcatcatatggccttccaagtaagaatttttctgatggtgaaatctgagcaatagcatgttagaagaggtaggagattttgcgatgttagatcaatggagataaacacaaatgattttatctttatcaattgtttttgataatctggatggaaactacttctgaacggttggatttcttggaattgtgggaataacacaactaacatactggctgtattttaaaaaataataaccgcaatgattaaatataaaagatttaggaatgaagtgttttactgatacattagaaagtattcagaagttgtttcttgggatgtagcttggcatttatctaggtctatgtggtccatgataaccttaaaatttttctttagatctctctcgtgaggaagtggcaattgccaagcgttatcctccacaaacagctctctgcctcagagaaggttgggagttttgcaagtctgatcttgcagcag

SEQ ID NO: 175265 - DNA, 207 bp, Arabidopsis thaliana landsberg
agtttggtagcaaaaacgttacattttgcgtacaccacacctaaaaagactcgagcttttcgaaactcgatcgatctcgaggaggtttcggattccaggcatcaagaggacgacatagagcctcctaatgcaccgaggcactatcgatggaccaaggctaagaggaaagagcaactctctagcgtctctgcggctttgtttacatga

SEQ ID NO: 175266 - DNA, 69 bp, Arabidopsis thaliana landsberg
atggctatagcaactgagactggtgtcccgtgggtcatgtgcaaagaagacgatgcccctgaccctgtg

SEQ ID NO: 175267 - DNA, 170 bp, Arabidopsis thaliana landsberg
taaggtgtcagtgattcagaattctgcaccagttcttgagaaattcgaagctgattcaagcgtcactgaaattagtattccttctcaacaagaaaacgggtaccctgtagaagcattttctatagatgtcgcccagtttgcactgggttttgtgtgtgatgatgaatatg

SEQ ID NO: 175268 - DNA, 665 bp, Arabidopsis thaliana landsberg
atgaagtaccagctctctccgacgagactccccggagaaaccttaagaaacctcccaaatggcgccaaaatccctactctcagatctaattactctctaaccgtcacgaattcttcacgattcggaggtaaaacttcgatcaacaacgtcgtagtccaagattctcctgtttttgacgacggatacgtcgtgatttacggatccgacgagtttttcacatcaccgacgaaaatctccgacgattcatcatcttcttcttcaatcccaagcactacttcatctactggttcaatccctatccctagctcagcgactcaaacacctccaagtcctaatatcgcttcggattccactcgaaatcttcccaatagatctaaaccagtgaatcgcttcaacatctttgaatcggcttcaagattgttaatgtcgagaggtttcgtgattatagctacgtttctcgctctgcaattagaagataatacttcagtaaacgacacgaagatcacagtctttgctccgatcgacgaagcaattccaaatccaactactaaattctccgattacgttactattttcagaggacatgttgtcagtcaacttctcttatggaaagatcttcagaaatttgctaaggaaggatcgattctgcagactgttcttaaagg

SEQ ID NO: 175269 - DNA, 173 bp, Arabidopsis thaliana landsberg
gtacttactaaaatagctattactagagaaagaggatctaattctagaagtgaaagggctgccaaaagacaaaagcagtctgatccaaaccattcagtgattgcagttggagtggatagtgacaagaacatgaagggaattcaacggcaaatgatcctttgtgacataatgag

SEQ ID NO: 175270 - DNA, 446 bp, Arabidopsis thaliana landsberg
gagtccgccgcgagctggtcgctgggtctgtgctcggcgaccagccatcaggtgcctccaatcgcgacggtgatccctcaagcagctgtgctgaaccgagtcgcacggccgcccagttgccggagatgtgctcagtcacaggggtcaccgcaccggtgggtgtggagccttccgaatcggatagcgccgggcgatagcagcggccgaattcacgtgccgtgatatcgcatacgacatccgatttgaactcatatcacccttcccctggcgttaccgatgtgctgcatgtgacggacgggaccacggcatcgggcataaggtgcggccgccctcagacgaccagatatccgagccgttgcgccgcgccagcgcgacccgcagtgccagcccggggtgcgtcaatggctgcgatagcaccgatcgaggcggcatgtcatcagaagcgg

SEQ ID NO: 175271 - DNA, 141 bp, Arabidopsis thaliana landsberg
gaaaaatttgggaactttcaagcattagcgaacttatgggtcaaaaaggctctaaaaaacactaacatagaccctaataacaaaaaccctgacaacaaaatcagacagaaagaagagaaacaaacagagaaacggcattga

SEQ ID NO: 175272 - DNA, 1449 bp, Arabidopsis thaliana landsberg
atggaggtacgtgcttacggtgtttcttagagtttgttgagacaatttttgtaaaccaataataatccattttgaaacgtgtaatacacgcttctctatgttattttttaatccttgtgtttgtagaaaacaaagaataaaactccaccaccacgtccagatgatgatgagctgagaagtattatgttggagagactttcaattgccgctgccagaggcgggttggagatggaggagaagctgaagtccagatttgttggccttgatattccatcatgcagctttgtgttccctaaaggtcgtgatcaccatatttacaagcaaaaaattgctgagtacaccaagtctcctcctcttcattctcctcctcctctcccaccgggcctagttgatcaatgctgtttaaagtataaccctctggagcaagttgctattatcgacgaactgtctgcgtttacagttagagtccctgaaggaggcatgacgcgcaaggaacttggtatcattaagttcacagcccaatttgtgttgcggtatgggcaatattttcggttggctctacgggatagagtgtctactgatactgagttcaagtttctggataagggagattcaagggctcactttttctctcttctttttcttgggtatagtcatctattaagggcttgggaatatcctctggttggtatggatgttcttgttgacggttttctcagtgctttgaattctttcaaggaaaagctagagggtgatgaggagctagtggacaagattaagactgataggcatgattttgttgtttgtgatgaatattttgctgacctcgagaacaaagcccttgaactcaaactcaaaacaatggctaggatgcatcatcctctgaataaacacgattctcagggtacactcagggtgccacctgtccttgtcttgtttagagttggaatccctcaaggaggcatgatgcgcaaggagcttggtttaatgaagtttacagccatgtttgtggtgcgttatgggaatgatttttgggatgctctgtgggatagagtgtctagtactgaaacagagtttcagtttctgaagaggaatcctggaaatgatagaggaatgcttcttttctctcagcttcttcttgcttttggtaatgtagtacaaccttggggactgtgcccgagagagagtaacccgcccgctcgtatggaagctgttctcgaggggtttttcactgcttttagtgctttcaagaaaaagcaagagggtgaggaggacgaggtggtgaacaagcttgtgactgataggcgtgattttgtggttagtgagacttttcagtattttcttgacatagaggagtctactcctctacctgaaaggcttccgctgcgtcaaacaggatctatgtttgctcgtcgacatccaatggtgcaacaaccacctcttctatga

SEQ ID NO: 175273 - DNA, 414 bp, Arabidopsis thaliana landsberg
atggtcgcggatttcggattcgcgcacctggcgccattggatgtcgctggggtggatgacttcgccgcgacgtttgtcgtccgcgagcacgggaaccgagacgagcttgtagatgcgcccggtcacgcgtgtccgcgcggcggccggatcgttggccggcacggcgacggtcgcgacgaaccgccccgtaccgtcatcgtaattcaagccctcgatcccgaccgtcgaaggtatatcggccgcgacatggaaattgatggccgaagccgccagctcgacctcgatatcggttccggcgccgcggtcgcgcagtgcactgacgagggcgtcatggatctcgtcgcgctgaatgatctggctcgcgcgttccacgacggcatgggtgttcatcgtgaacggccgccagttcagctt

SEQ ID NO: 175274 - DNA, 388 bp, Arabidopsis thaliana landsberg
atgtttactcccgatcccaatcccaatccaaatccaaatccttccgtctctgtagcagtatcgactccaatcgtcaccgcatctgaatctccggtgacacaacctaacacagtcataacgccgtcgtctcaacctcaacctcaaacaccagcttcgtcgtacagagccatagctccgcttcatcgtcatcatcctcatcaaaatatctacactaaccctttaccgattaggcgttcgaattccgttactaattcgcctcatcagcctcctcacccagacccgtctagtctgatatacccgtttggttcttcgggtcgagggtttccgacccgacccgttagacagaattccaattccgtcgctgatccagttggtagtcctagtccag

SEQ ID NO: 175275 - DNA, 51 bp, Arabidopsis thaliana landsberg
ggcgatgtgatcgaaggcgtggtcacggaagtcaaggacgagcgcgcctga

SEQ ID NO: 175276 - DNA, 136 bp, Arabidopsis thaliana landsberg
agtgattggccggcggtacaattggaacccatatgtcggcaaacgggatgacacgtggcggaatgagaatggaataattttggtggaaatcgaggaaagaaggaagaatgataagtggtcgcagccccctgattag

SEQ ID NO: 175277 - DNA, 111 bp, Arabidopsis thaliana landsberg
gtagagaataaccgaagaaaaaagaaagagttagtaatgactaaaatgactcgtcgttcttatctcaacgtcaacgtcatgagaatgctgacatcatcgccagctcgatag

SEQ ID NO: 175278 - DNA, 72 bp, Arabidopsis thaliana landsberg
actataccgttaaaacatttcaatgaacatcgtcgatactccattcccggttatcgcatttggaaactctga

SEQ ID NO: 175279 - DNA, 1231 bp, Arabidopsis thaliana landsberg
atggcgacgaggaatcgaacgacggtgtaccggaaacacagggatgcgtgtaagagcgcgcgtgctccattatctttatcggcgtctgattcgttcggtggtccggtgatcgaaatggttagcggttcattttcccggtccaatcactcctcttatgctcctttgaattcctatgatcctggtccatcaaggtaataatataatgtgttgtttgattctgcaaaacctgggaaattctatgaacttatatatagaaacgaattgtaatcatgggattgatttgagatacagaattagaaccctaaacgaattaggtaacagaatgagcaaatgatttaagtgttgttgtgaatgtttgcagtagtgatgccttcacaattggtatgccaccagcttgggttgatgattctgaggagataacttttaatatacaaaaggtgcgagacaaaatgaatgaactagcaaaggcacattcaaaggctcttatgcctacatttggagataacaaagggattcatcgtgaagtcgagatgctcactcatgagatcacagatttgttgaggaagtcagaaaagagattgcagatgttatctactagagggccttctgaagaatcaaatctcaggaaaaatgtgcaggtaggttgttggacactttttcagaatcgagcttgttaacaataaagaatgcatggtcattaccttttcttttgtgcttttagagaagaaagttaggaattttgggttaaatcactctcatatgttttgactacctatctagttgacattatcagtcagcaaaatgtatgaagtgtttttttttccctctatataatgtactttgggttattctatgttttgagtttgtagcatgaggataaagttctgtgtacatgtatagtggggctctccaatggacttgacctactttttggcatactgcttttgacagcgttctcttgcaacagatcttcagaacctttccatggagctccgcagaaaacagtctacttacttaaaacgtctgcagcagcagaaagaggtatgtttcctttattttcaagaaataaacaaaaaaaagtgttgattcttgagacatgcatgtaccgtaatatgatgttcttatttgtatttggcttctctaatcatagggtcaggatgaagtagatttagagtttaatgtgaatggaaagatgtcgagactggatgaagaggatgaacttggtgggatg

SEQ ID NO: 175280 - DNA, 290 bp, Arabidopsis thaliana landsberg
agaaaatcttggaatccctacatgaactagcaaccgctgcaaaatttaagaacaagattgaacatcctttgttttccgagaaaccaaaagccaaaagctttgttagtgtccgatcgatcaaatgtcatgatgatcatgtggtcataattattgaagatgatggtaataatgatgacacatcaaaaaatgataatggctcgaaggaggtttcgatccatgagaaacatgaagacgatgatacgcatgtagacgcaagatgtgtttcatgtggtcacaaagcgtttgtgtga

SEQ ID NO: 175281 - DNA, 69 bp, Arabidopsis thaliana landsberg
atgcagaaactcgaaatagccttaccggagatatattccgatgaaattatcggcgaagagaaagggaaa

SEQ ID NO: 175282 - DNA, 75 bp, Arabidopsis thaliana landsberg
aagaatcttgttgacattgttagaagcgtgctgctcaatgttacggatcggattcctgatgtctactcacagtaa

SEQ ID NO: 175283 - DNA, 333 bp, Arabidopsis thaliana landsberg
attgtgcgtgaacaagcagaaatagcatctgttcaagggcctcatgcggaaggcattattgatgcttctgaggtgctgactcgttctgacactgcatcgactgcagctccgactggtctaccaagccaaacttcaacctctgagggcgttgagaaactaactcttacttctgatttgaagcagccagcttcagttcctggaagttcttcaccggtcgaaaatgttgatcgagttcagatgagtgcagatgaaacatcacaattgtgtgatacttcagaaaccgatggtctttctgtccctgtgactgaaacttctgctgctacattgtactga

SEQ ID NO: 175284 - DNA, 88 bp, Arabidopsis thaliana landsberg
atgcagccactgagtgtagaatgcgaggcagcaaaaaacagtcgtgggagagcagttcgtaaggctatcagcaaggaatatgacacag

SEQ ID NO: 175285 - DNA, 476 bp, Arabidopsis thaliana landsberg
atgatcgccccaagcgatggccaactcatccgcatgcgggtggatgacatctcggtcatgggccgcaacacccagggcgtgcgcctgttcgccaccgatggctccaaggtccgcctggtcacgcgcctgcccgccagcatgctcaacctcggcacgccgaagtaagagaccgcgctggaagcggcggaaggcaccccgctgccgctgtaagaatccccgtaagcggaaaaacccgccaaggagtaacctccaaacgcaacaaagggcgccttgcggcgcccttcgtcattcgtgtcgcaggcccggtttaaaaccgggagaacaacgcgttggccgcagcccacgcatcatcttgggtcggttccggtcgagcgacatagccgggcttgaaggccgccagatccagcgcgtttgccggctgcatctgggccctttcggcgtttcggccgcgtgccaccacaatcgtgttggtggag

SEQ ID NO: 175286 - DNA, 43 bp, Arabidopsis thaliana landsberg
gtcggtacgcattgatgaagataacgatgatgtacgaatgtga

SEQ ID NO: 175287 - DNA, 343 bp, Arabidopsis thaliana landsberg
gtgtatgaaccgtagcaaaggctcatcacatctagtaaactaccacgaggatatcggaaggtttgaaagagagaacaagaaaaggaagcagttagcggttcagagagaagctgagatggctaatgttgttgatgatgatggactcaaatttgaaggagaacatcatggagtgtttcaggatccaccacctcctgatggaaatcttcctgctaatggtggaaacgctcccaatgcagctgctgccaactctgcctgtgcagctgctcgtgcagctgcgttgaatgctaggcctgcacctgatttttggggcagtatttcacacagtccaggacagctctcctga

SEQ ID NO: 175288 - DNA, 318 bp, Arabidopsis thaliana landsberg
gtgtacttgtggttcttgatgcgcatccggatggaatcatataccgagatctcatccctgactatgttaagtttgtaagaacaatatacgaaggtttgaacaactctataccttctctcatctcactcatcaatttgcttcattgtagatcacatttgattacacatacatacactcaaagtctcttaaagatttatgctctattgaaactttatgtcttatccttctccaccagatgatttgggaacaaccgcagttgatgtcaattacttgaatgtcggagctcacgaacctgactatcagcttttcatgtgctga

SEQ ID NO: 175289 - DNA, 147 bp, Arabidopsis thaliana landsberg
atggtggttggtccaccaggtaccggaaagactgatacagcagtgcaaattttgaatgttctataccacaactgtccttctcagaggacattgataatcactcattcaaatcaggctttgaatgatctttttgagaagataatggag

SEQ ID NO: 175290 - DNA, 189 bp, Arabidopsis thaliana landsberg
atggcgattcggaaggaggaagaaagtagagaagaacagagcaattcgcttcttcttgatgctctctactgcgaagaagagaaatgggacgatgaaggagaagaagttgaagaaaactcttccttgtcttcttcttcttctccattcgttgttttgcaacaagatttgttctgggaagatgaagatctg

SEQ ID NO: 175291 - DNA, 135 bp, Arabidopsis thaliana landsberg
tgtgtcctggatcttcgtcggagattattaagcgggtttaggtcaatgcctcgccgagcaagaaagcacgaagagacatctctccgagaaaaatccgcactcgatgatctctgtctgatcctgaaaacaatttga

SEQ ID NO: 175292 - DNA, 486 bp, Arabidopsis thaliana landsberg
atgaccttcgacgttgacggctaccggctggaccggccgttccgcgtgcgcaggcttggccacatcggtctcacctgcacgcagatcgacgaatgcttgcacgtctaccgcgacctcctggggtttcgcgtatcggaccggctcgacttcatggagcgttccgatgacccggatagcctcaaagggctcggcgacccgggcggctacttcatgcgccacggtaccgagcacctcagtttcgtcctgttcaacaagcgggtccgcgaggtctacgacaagaagcgggacttccgcccaggcgtgaccgtgaaccagatctcctggcaggttggctcgctgcgcgaggtggtcgacggggaaagctggctgcgcgagaccggcgagcacatccagcgggcaggccgagacacgcccggctcgaactggcacacctacttatatgaaccggacggccacaccaacgagctgttctacggcatggagcag

SEQ ID NO: 175293 - DNA, 176 bp, Arabidopsis thaliana landsberg
aattgaaagatgagagatctgcagaggggacagatctagaagcggaagaggagttgcctccatcggaaagggtatggtcacgggaaaggacgaaggaggtcgccgtcgatgatctctgcgaaacagaaaaaagcctccttcctgctactcgcagcatctctgctcaaatgggttaa

SEQ ID NO: 175294 - DNA, 1339 bp, Arabidopsis thaliana landsberg
cctatgtttcatgataatggaccaaaggatgttgttgaacctggcttagttggtacccatacaggggccgatgaaatagctgatgctgacacagagatggtagacaatccatcaagtttaccttcaacatctgcacaggtatgtgttagtcacttgttctttttccatatgtgtacgcccataagactttgaaacttatttttgtttcaggaagaagcaagagatgcttgtgctacgactgaagctaatggcagcgagtccgaagaaacttatgagccttctgatggagatacagctcacatacctggcacaagtgtacgtacatttttgtcactatggtctgtgtacatatatattgtttcaaacattactaaaaagttgctttcctttgataaattctacaggttgaggcggcaagagaatccaaattagtgacagggatggaagttgaaatacctgagaagacccacattgatcccccgtcaccatttcaagtagttaacaatgtaagccaactcttgctgaaaataaaatgtactattaactgttcaaatgtataaaatttatattatgcaggtcacacgagagttggataccaaagtcgttggtgatttgggtgcagccactgatgtggaggtaacaatttgtgtgtttcaattcctattttcggaatagcatacataggattatatgtgtacattatatatacttgtgtacgttaacttgcacaggtagtcatggaagagccgtgtattgtcgaggggtctgtagaaactgaggatcctaacccagggtcagatgaagcagacaagaccgatattcctaaaaataatgtatgtacctattttaaccatagaaaaacgtatgaaactgttgttgacaatcatatttgttaacaggatgaatcagacaatgctgctgctgtcgaagcaaaagaagaaaaaaaatcgtccccaaaggtcccaaagaaagtgaagaaacaacttgtctatgaacaggatgatgcccatcctcatggttttaaggcaaaaacagtattggtgcccgatgtaccagctcaacagatagaggttgttatcagggctggaaatgtctcatacaaccccctggacatggttgacccttcaaaagtagaggaattcagcaatatcattaaaggaccctctgtgtaagtacattatagtaaaatggattagttaatatctcaatcatcatttttaaggttgttatcaaatatttttctggattttacaggattcacactcttttcgggtttcgaaaagtgcccaacgacttttttgcgaaccttctaacacctggtgaatgggtcgaaagtacg

SEQ ID NO: 175295 - DNA, 1469 bp, Arabidopsis thaliana landsberg
atggttgaaggaaagggcttcctcgtgagctcagtgactgagcttcaccgtaaagagaaacagaagaagaaaggcaaatctggaggattcgagtcactaaatctcggacctaatgtcttcaatgcaatcaagaaaaagggttacaaagttcctacaccaattcagaggaagacgatgccgcttattctctctggcgtcgatgttgtcgctatggctcgaaccggttctggaaaaaccgcagcttttctcatccctatgcttgagaagctcaaacaacacgttcctcaaggaggtgttagagcactaatcttgtctcctactcgtgacttagctgagcagactctgaagttcaccaaggaacttggcaaatttacaggttggtttaatgaattcaatttacaaactttcccttttgttgttgaaaagggatagtgattaaggaaatttgttgtgtttgttatatcagatcttcgtgtatccttactggttggtggagatagtatggaagaccagtttgaagagttaacaaagggacctgatgtgattattgctactcctgggagacttatgcatcttttatctgaggttgatgatatgacgctaaggacggttgagtatgtagtttttgatgaggcagatagtctgtttggtatggggtttgctgaacagttacatcagattctaactcagttaagtgagaataggcagactttgctatttagtgccactttaccaagtgcccttgctgaatttgcaaaggctggtttgcgtgagcctcagcttgttcgtttagatgttgagaataagataagtcccgatttgaagctttcgtttttgactgtacgaccggaagagaagtattctgcattgctgtacttggttagggagcatataagttcagatcaacagaccttgatatttgtttcgacaaagcatcatgtggaatttgtcaactcattgtttaagttggagaatattgagccatctgtatgttatggtgatatggatcaagatgcacgtaagattcatgtatcaaggttcagagcgaggaagactatgttgttgattgtgacagatattgctgctaggggtattgacataccattgcttgataatgttataaactgggatttccctccgagaccgaagatttttgttcatcgtgtgggaagagctgccagggctggtcgtacaggctgtgcatattcctttgttacacctgaggatatgccatatatgttggatcttcatctgttcctctcaaaaccggtcaggccagcgcccactgaggatgaggtcttgaagaacatggaagaagtaatgaccaaaactagtcaagcaattgatagtggagtcaccgtctatggtcgtttcccacagaaaaccattgatcttatctttactagaaccagagaaatgattgattcatctgcaaaattagattcccttgaacgaacatccaccaaagc

SEQ ID NO: 175296 - DNA, 549 bp, Arabidopsis thaliana landsberg
atggtgaggcaacaaagagcctctaaggttcatgaagatagacatcccttgtgtcaaggtaaagatgagctggtgaagcatgatatgttggatccgccaaggtatcttcgaagatcgaaagaagatttccgcggaaaggcgctgagggttggggttttggattggaaacagtttgagaaatgcaaggatactaatgcagatggaaccaaagaagcgtgttgtagttacgcggaaacagctgcaagttcgttggagctagatttatcgaccggtgctgtcaaaagattggaggtagattcgaagtctcaacaaatgaggaatcagagtttctcagttagatcacaagcattttcagatgcaacggatgctgatacagtgatgagagtggatcaaaagggaaaacgagagcatcatcttctgagtatgaagcagaaagaactaagtcatgcctctgagcttagctcgtgtatctctccaggatcagagaaatttagaacagttgaatgtcaagacagaagaaatgatgtagaaggcgagtgttcaagtccg

SEQ ID NO: 175297 - DNA, 210 bp, Arabidopsis thaliana landsberg
gaaaaagaagactgaagttgcttctgacgctgtgggcaacgaacggatcaagggaatgagatcactaatggtttcatctgaacctgaagataattctgctgtaaacaaagaagaagaagaaagcaacttaccctcagatgaaaacaacaggtcgaacacagccgaagatgttttgcctttatcaagctcggaaaaacaaaccagcataag

SEQ ID NO: 175298 - DNA, 543 bp, Arabidopsis thaliana landsberg
atgttccatggtagtgtcatcctctttgcaattggtggcattggaagaagaagggcttttcctgtgagttacagagcttaaccaatttgataaacccaaaaagggtttgaattcagagttatcttgagacctcaatgaatcagaaggagatggttctgcatcactagacttattgcttctgttagagactgaaccttcaccatcgtctcgttgattgggcgtgatacgaagctttttgagaaatttcttcatgttcatcttcatactccaaatgttagagcagcgaacatcgacccgaaaactccttcatccctcgaatacacagaaaaacgagaactttgtgctaaaaccctaattccttggtaccacgacccggagatctggaactccgtccagatcaacggctcgtcaaaatctaataactgcagcaaaagaattctcgagaaaaccttaaatcggaatccaaatcaagcagcaagactctcaatggagatcagatttcgatttcaagaaaatactttttttttttatctccggagctga

SEQ ID NO: 175299 - DNA, 413 bp, Arabidopsis thaliana landsberg
ctgttttacttctccggtcaagaattacccatgttcgacaaccttgtttatctatcgatcgcgagtgacaagaagcaaggatggcaaattctgccacttctgatcaagaactctccaaatcttgaaacacttgtcttcaaggtatctcatgacatatatatatacaaacctatcctcaacgccatatataccaatatgtctataactttgtctcctctatgcttcagggtctagagcactacacaactaaacaatgtggggatgcatgtgtttgttctggcattttggggaagagctcgtcttgtctgtcatcatctcgagtaaaggttctggagatatggagctatcaaggaacttcgaaagagctgaaacaaatggggcatttcctaatgaagttacaatttcttgagctg

SEQ ID NO: 175300 - DNA, 162 bp, Arabidopsis thaliana landsberg
atggggtcaaaggatctatcagaacctttgcgttcacataaagatcttgataaagatgcggctccgttctataagaaagcggagaaattttatgatgcgctcgcaaaccaactggttaaccaaggacatgtactggacctttttgcatccgcacttgatcag

SEQ ID NO: 175301 - DNA, 633 bp, Arabidopsis thaliana landsberg
atgggagattcagatattggaaaggttctagaagcttccacagggcgatctttaatcagggcatcttctatagatagtagagaaggcggatctcagacgaagctgacggggcggttctctgaaaagattagggttcaagaacagagacaagttgggtcttccttgcagaagaaggaacatgtggttcttcctaaatctggatctcgttcggctccggggaagattcaagaagcttccacaaaacgtggtttgatccgggcaccttctttgccgcctcagatagaaaaacgagagatggaccgcgaggcaaagaagatgatcaataagctgacaaggcagttctctgagaagattagggttctagaaccgacgaggcctggtgagcatttcttgcagaaaaaggaaacaattgctcgagacaaagggattactgaaagttctagaagcaacaaaacaggaagtagcagtagttatagtagtgtcaagatcagtttgcaaagaactcaaacgatgccaaataacatgggaagagaagaagataacgaggaagacgagtttgaagatcaagaaagcgactcaagaatgggattcttgatccgtgaagccctcgctagttcacattatgttccaaag

SEQ ID NO: 175302 - DNA, 1048 bp, Arabidopsis thaliana landsberg
ttttgtggatcctggtccacatggaaccggtagacatatggaacacatgttaccagaaatcgccaaggaagattttagaaagggtgctcaggtaaagacaagctttaatctctaagagcttcttttaatcagtatgctgctactgccatgaaacaaaacaaaattgagttcttggcaccttttgttgtgttattgttctctgttcttcttgccagtggttcacaatgaagcgacaacacgccattatagtgatggccgatggtctttactactcaaaattccgcgagtattgtggggtaagtttgtcctgcagctgaacatttttggttttcatatcgtagcttcttgatctcttatcttttgatatagaattcaataatagttttcagttctcatccttttgagttctgattctgacattaagtttctataaattcagcctggaatagaggccgacaagaactgcattgctgatgaacattacttgccaacattcttcaatgttagtctattcttcttcacacccccatctcttccaatcttttaagccttcttgatgctgaaaagtgtttatttgccactcttatttcagatgattgatcccatgggtatctcaaactggtcagtgacgtttgttgattggtctgaacgaaggtggcatccaaagacatacggaggaaacgagatttcattagaattcatgaaaaatgttacggtatgtttcaaaacgcagtcttttcgaaaaatgtcacaatcgacatcttattatacttatatcttttctcgcttgcgcagtctgaggacatgagtgtacacgttaccagtgtgggcaaggtatgctcttgtgactctcccttgcagcctctattatttttctctcactttaatacttttacttgtgcttttgaagcatggagatgagctgcattggccttgtacatggaacgggattaaacggccttgttatctatttgcaagaaagttccatcctgatactctcgacacattggtcaacctcttcccaaactacacaagcacagctgtctga

SEQ ID NO: 175303 - DNA, 736 bp, Arabidopsis thaliana landsberg
atggtttacgtacacgacggcggcggtggtaagcgtcgcaaaaagtcttccggcatgtctaagcaagaacagatggatgctgctgctcagtctcttgctcagatgcaggctatgctgtcaggtcaacccgttatgccttatgtcgatcctcagattcacattaaggcttcgggcggtcctcgtaatactgatggaactcgtcctctcccggaaggcaataacactaactacggagccggaaacggatatcatccgtctccttcttctgacgacagttcttcgtcttccaagaataagaatcgcggccctagcgctatccagcaaatgagggctcaactctttgatgctattcaatctgctgcaaatactccttctgtagcgggttattctgcctccgatattaagcaacttcttggtggtgtcggagacgttggcgcacctatgacagcacaaatcaagacgattcgtcacatgaatcaaggtgctcgtcaagatgctaaccaaggaactaagcgtattgaggctatgtatcgtgctctcgcacaatccgatgcctctgccggaaagcaagcagaacttcgacaaaagcaacttgctgatcaaattacgcaaatggccgctacaggaaatgcaacggatcaacagcacgtccaagagttaatggcaggaaatcaaaagtatggtggcgacattgctgctcagttaaatactgacattgcaaagactgccgctacag

SEQ ID NO: 175304 - DNA, 58 bp, Arabidopsis thaliana landsberg
atggggcacgtttttgaaggctatcttaaaaaacctcatggcgagtccgtgatccaag

SEQ ID NO: 175305 - DNA, 358 bp, Arabidopsis thaliana landsberg
atgggagatgggactgagtttgtggttaggtcagatagggaagataagaagcttgctgaggatagaattagtgatgagcaagtagtgaagaatgagttggtgagatctgatgaagtaagggatgataacgaggacgaggtttttgaggaagcgattggttcagagaatgatgagcaggaggaggaggatccaaaacgtgaattgtttgaatctgatgatttgcctttagtggaaactcttaaaaattctatggttgagcatgaagtggaggattttgaagaggcagtgggtgatttggatgaaacgagtagcaatgaagggggtgttaaagattttaccgctgttggagagagccatg

SEQ ID NO: 175306 - DNA, 116 bp, Arabidopsis thaliana landsberg
ctcaaatcaagatcaatgatttcgagaaggaactgaagaatttgagagaagataaagaagagaagggcagtgtcttcccgtggaaaacgcaacaggaaatggaaatcatgccatag

SEQ ID NO: 175307 - DNA, 174 bp, Arabidopsis thaliana landsberg
gaggatggtaatgctaataatgtggacggaatttgtggaagaagaagtaaacggctccgtattctttctagcaagttggatgggcgataccagtatgataagaaaaccaaagtattagttggtcatccatctcctggtatcaagcaactcaacgtttatgttgacccggagtag

SEQ ID NO: 175308 - DNA, 103 bp, Arabidopsis thaliana landsberg
atgtggaaaccggtggacttgaaagaactcgatagcgtgggaagcctttgcaatgcaataactccagcagcgaaagcagcaacagacgccaaaacaaacgccg

SEQ ID NO: 175309 - DNA, 207 bp, Arabidopsis thaliana landsberg
atggcggcggcgaaaaaaccgactctacaagacgttgtttccgatgaactaaactatgaactctgggctccaaccttgaaaaatgctctaactgaaaaaggactttgggatgttgttgaaaatctaatgccggcggatctatcgaagagtccagagctagcgacggagattctaccggaagatcttctgaaatggagtgattttatg

SEQ ID NO: 175310 - DNA, 204 bp, Arabidopsis thaliana landsberg
atggaggagttctttgcatatgctttgcagcagcaacagaggctattcatggagaagtaagcttattctttattttatttttgtgtcattacgaagagggtgaacaacactcatgtgttttcaataatcttcaggtacaacttcgacattgtgaatgatatccccctcagcggacgttacgaatgggtgcaagtcaaaccatga

SEQ ID NO: 175311 - DNA, 85 bp, Arabidopsis thaliana landsberg
atgaagaagctcaagaaccgggacttggacctctccgagatctttgtcgccgcacatccgaccgcagaccaatttcacgacgagg

SEQ ID NO: 175312 - DNA, 292 bp, Arabidopsis thaliana landsberg
atgttgcgagttcttgtaactattatcgtgcttgtctctgtttcctctgtttctgctacagagaaagggaagaaactcaagaaaggtgcttatgatgcggcttcaacgaactataatgttttgtatccacttggctcgggccaagagcgagttcaatgcttggctagaggatcgtgtaaccagaaaatcctcacttgtcctaaggaatgccccgagagaaaaccaaaaatgaacaagaagaaaaaagcttgtttcatcgattgtagcagcaaatgtgaagtcacctgcaaat

SEQ ID NO: 175313 - DNA, 131 bp, Arabidopsis thaliana landsberg
atggagtccaagatcgcagagattgaagccgagttgagtgtgcccttgacaaggttttatggctgcctgggttctatgcgattccgccggaaattcagattgctggctccaaggcttatcagcaaggacag

SEQ ID NO: 175314 - DNA, 462 bp, Arabidopsis thaliana landsberg
gtacatagaggaaggggacttactggtgaacgcaagcgttgggtacctcgaagagggaaaactcctttagatcccgatgcttctggttttatatactcaaaccctattgaaacatcctttaaacagagatgccttgaagattggaaagttcaccataggaagctcttgagaaccttacagagtgaaggtcttccagttctaggagatgcatcagaatctgattacatgagagtggtggagagattacggaacataataaaaggtcctgcactgaatcttttgaagccgaaagcagcaagcaagatggttgtatcagagttaaaggaagaactcgaagctcagggtttgccaattgatggaacaagaaatgtgctttaccagcgtgtccaaaaagcaaggagaataaacaaatctcgaggtcgacctctttgggttcctccaattgaagaagaagaggaggag

SEQ ID NO: 175315 - DNA, 412 bp, Arabidopsis thaliana landsberg
atgaggtatatgttaatttagggttcgtttaattctgggtttcggattgggatttcgcgttcttggttttcctctcttttaatttcttttgttcgtttgtagtggattcgactgtctaaaactgaatataaagtacggaggagaggtctcctttgtcgatgagtcgttcacttaccttggaggattcgagaagagggacatgtcgatggatcccgatctgatgacgtggtcgatcttccccgtgctcggggacgtcctcctggagttaagaatggtcaagccaagaacgttggcaagggacgtagaaaaggatctgaggaagcagctccaagacctccggtcttctttatgtccccttggactgataaggtcttcgatgtttggagacctgagaggaagtagtattgattga

SEQ ID NO: 175316 - DNA, 359 bp, Arabidopsis thaliana landsberg
agctggagcctgtggaccagcaccttgggccggaagcgttcgcccgagcagttgcagaggcactgttcacttgggacaccacgaccgggcttacgccgtcggactatgcgcaggtgctcgcggatgccgcgcacggcagcgaggccgacgccttcgtcggtgatgtccgcgcctacctgccgacgaacgatacgtgggcgcagctgcgcacctacgcgactcggcagtggctgaccatcgatgaggtgttcgtcccggaggcgtgggagaccgccgtcgagcaggccgcccccggccagatacccgacggggcggtcgcgtacaccatctcggggacacggcaccgggacggcatctga

SEQ ID NO: 175317 - DNA, 73 bp, Arabidopsis thaliana landsberg
atgtcgtctaaattagactcagaagataaagactttggaatcgatttatttgatgaaaatctaagtaacacaa

SEQ ID NO: 175318 - DNA, 126 bp, Arabidopsis thaliana landsberg
aatccggcgaacaagaaggagattcactgcgatgataagttgaagacgattttcgatggcaaagacaaagtcggaatcacagagatcatgaagctcctctcaccacatttccctaaatccgtctga

SEQ ID NO: 175319 - DNA, 491 bp, Arabidopsis thaliana landsberg
ttttgttcacgtccaagaagataccaccaacgagaccaaaatctccaaaactcgggcgaaagaagactgcttctggagcagattctgaagaaactcaaacccctcgccttggtaggctaagcctagatgagagagcttctaaagataacccaactgcaaagggaattatgccaacagttgatctgaagaagcaacctgtgcgcaagtcacttccaagattgccatctcagaaaacagttctccccgatggaaaacccgccccagcaaaagctgccataatcccagcaaaggtaagacctgagaaaaagaaacttgaaaaagatgcagaaaccgtaaaccagacttcacatcccacagaagaggaagcacaagtgacagtatcatccaatgctgatgtagaagattcacatgagactgtatctccaaggatgaatgaagacagagccgacaagtccattgaggtatctgaagcggttgctgttgagcattaa

SEQ ID NO: 175320 - DNA, 93 bp, Arabidopsis thaliana landsberg
gttctttctagcgacaatcctaaacgcggttacaacgctgcaactggcaaatacaaagatctaatggctacaaaaatcatcgatacaaccaaa

SEQ ID NO: 175321 - DNA, 443 bp, Arabidopsis thaliana landsberg
  unsure (1)..(443): unsure at all n locations
ctatctgcgcatcgagcgcatcatcgaagttgcgcagcagtccggcgcgcaggcgatccatcccggctacggctttttgtccgagaacgaagcgttctgcgccgcctgcgatgcggccgggatcgtgttcatcggcccgccggtgtcgagcattcgcgcgatgggctcgaagtccgcggccaaatcgctgatggccaaagccaaggtgccgnnnnnnnnnnnnnnnnnnnnnnnnnnnnnaggccccgcgcatttgcagcgcgaagccgacgccatcgggtatccggtgctgaacaaggcatcggccggtggcggcggcaagggcatgcgtgtggtcaacgccagtggcgaattcgccgccgcgctgctgtcgtgccaacgcgaagcgcgcgccagtttctgcgacgatcgcgtgctgatcgagaaatacctgcagcgcccgc

SEQ ID NO: 175322 - DNA, 107 bp, Arabidopsis thaliana landsberg
gtagagaagctcatgtgatgacatttgaagttggagctgtcctagaagacgagaaatggcaggctcctgtatattgtttccacaatgagaagaaagaagtacaatga

SEQ ID NO: 175323 - DNA, 455 bp, Arabidopsis thaliana landsberg
agacgccaacgtcaagtggcgccgcagcggcggagagggtcacaactgctccgacggctaccacagcctcatcgacggcgatgtcgttgagtacaccgtcgacagcggcaaaggaggtcctaactgcacccacccccgccaccgaaaggtgatgcgggggcgtgtccagctccatcccgccgcccactccggaggagactgaggtggtttttgggcggcggctccggtccggcgccgagccagaagcaatgatggttcccctcccctgggtgatgtctcgtgcccatcaggctcttcatgagactgaggcggcgatcctgcgggagtgggaggcgcttgaggccgaacaccagcgccttagcgactggcgtacccagatggaggagcacaccaaggcggcgtcccaccagttcgcctcccagcgatccgagcttgagcgggaccgcgaagactaa

SEQ ID NO: 175324 - DNA, 88 bp, Arabidopsis thaliana landsberg
atggtggagaatatagaaggttctcaaggagaagaaggaagaagaatgaagaagaagaagattgaagaagataaaaactataaaaaag

SEQ ID NO: 175325 - DNA, 50 bp, Arabidopsis thaliana landsberg
atgaagctgagcaggatcagcgtcatcagggccggcctggcgatcggcag

SEQ ID NO: 175326 - DNA, 176 bp, Arabidopsis thaliana landsberg
cgctcaacggtctccttgtgaaccacaaaaccatcacttcccggagaaatctgagggaattgagtctcgaggagttcaaatttgtgaaattgatcgacatgaatcaaagaggaagatccaccaatcgtagatcaaggagcttctctagatccagactcgccgttgaaggccattga

SEQ ID NO: 175327 - DNA, 339 bp, Arabidopsis thaliana landsberg
  unsure (1)..(339): unsure at all n locations
cgccaagcgcgtggggcgcgaggagcgcaagaagctgtcgctgtggaagcaccgcaacctggtctggggcgtgccggcgatcttcatgtacctgatctgcgagatcggcgtcggcagcctgttcatcaacttcctcaagctgcccgagatcggcaacatgaccgccgccgatgccggcggctggccgctgaccgccctgtggggcggcatggcggtgggccgcttcgtgnnnnnnnnnnnnnnnnnnnnnntcgaggccgagaccgtgctggccggagctgccgtcggcgccttcggccttttgatggtgactggtgtcggcaacggcccgatggcgat

SEQ ID NO: 175328 - DNA, 138 bp, Arabidopsis thaliana landsberg
gtagagaaagaggctgaagctaaaggtgtagctatgggtcaagcgctagacccacctattcctcctccacggcctaagcgtaaaccaaacaatccttatcctcgaaagacgggaagtggaacgatccttatgtcataa

SEQ ID NO: 175329 - DNA, 153 bp, Arabidopsis thaliana landsberg
agactggatgatgaagaaatcaaaccaaaacctcatcaagaaacacaagccggaatcacttttagacttgcaccagaacgcaaggaacccaatggtcttgtcatcaccaaacccaacatcgttttagctcgataccgaatacgagcccaataa

SEQ ID NO: 175330 - DNA, 99 bp, Arabidopsis thaliana landsberg
agattgagatttgagagtttggctctatcggtgaacgaacaaaatcaacaggacgatttaccgaacagtccaccaaaaatgatagacgtaccaaactaa

SEQ ID NO: 175331 - DNA, 228 bp, Arabidopsis thaliana landsberg
atgaattgtaatactctcgccgctctggccctggccgccagcccgctcgcgcaggcggcgccactggtggatgtttacgccggcggctacctctggaatccggaggccagcggcaccattgcctccgggggcggcgacatcgacgtgcacgatgacctgggcttcgacgacgccagccagtcggtgctgttcatcggtctggaacatccgctgccgctgctgcccaat

SEQ ID NO: 175332 - DNA, 427 bp, Arabidopsis thaliana landsberg
ctcttgcgatctcgttggcgccatgtcgcacgcgcgcaaggctacatcgaaagcttgaaagtcgagaacttgacgctccctgcgcaaacggcgagccgcgtgccgtacctcgacagcaataagaaaatggtcacgttgagcgtcaccgcaaccgagctaggctatctctctggcgtaacgagcggtgtgcaaacgcagctcgacggcctctcaaacgacatcgccgcaacctcgctcggcatgctccccgtcggcggctcgagcggccaggtgctcgcgaagtcgagcgcaagcgattacgatgtcggctgggtcgaccgcttcactacgccgatgacgacaaacggcgacatgatctatcaagcgtcaggcgtgcctgcgcgactcgccatcggaacgagcggctacatccttacgagcaacggaa

SEQ ID NO: 175333 - DNA, 637 bp, Arabidopsis thaliana landsberg
aacaaatgcaatgtgggatatgctttcatcaatcttattgaacctgaaaagattgtcccattttttaaggtacagtctcatattgctgctttttcttatggcttttgtccttttgggagagcattggctaaaagctcttaaaaaaacattcacaggcatttaatggcaaaaagtgggaaaagttcaatagcgagaaggtggcaacgcttacgtatgctcgtatccaagggaaaacagctcttattgcccatttccagaactcaagcttaatgaacgaagacaaacgttgccgacctattctcttccacactgatggtccaaatgctggtgatcaggtaaagattaaagcttcatacaattccgtcttgtttggttcccattatccatatgcacttccttcacttcaagtgtgatttcattatatcataagattagtgagtaaaagaagattcatatgatttcctttgttgttatatcaccacaggaaccatttccaatgggaagcaacatacggtcaagaccaggcaagccacgaagcagtagcattgacaactacaacagctttagcatctcttccgtttctgaaaaccgagaagaaactcctaatggaactgatccgttcttgaaggagaactaa

SEQ ID NO: 175334 - DNA, 198 bp, Arabidopsis thaliana landsberg
ccgggcagcgactatgcgctataccagaagggcatcatctccgtagttaccggggacaattccagtaaggtctccgtattgcagcagttatcccggcagtatccccaatctactttcaacagtgacgccaattaccaaatagccgttacctatatgaacagccagcaatataatcaagccattccttatctgcagaag

SEQ ID NO: 175335 - DNA, 197 bp, Arabidopsis thaliana landsberg
atgtccaatgagcaagaggttaaagttattgatgaagctgccccaataaaacgaaaacgggggaggcctccaagggcacaggctaatacgccgttgcatattcgtccacccccaccgccgccgaagaaggaagacaaggaagaagatgtttgctttatttgcttcgacggtggagaccttgttctctgtgatcgccg

SEQ ID NO: 175336 - DNA, 123 bp, Arabidopsis thaliana landsberg
aaacagacaaaacaggaagcaaagtggagtcgtagctccaacaattacaagcaaggaaaatatgaacgagatggttatgatcctaaacataaggagaacagattctctcttatttctaattga

SEQ ID NO: 175337 - DNA, 156 bp, Arabidopsis thaliana landsberg
atggcactgagcagagatttcaagcagaccgtggtggagcgcgtgcagcgcgagccggcgtttgcccgcgcattgctggacgaggcggcctcgctgtttctcaacggcgatccggcgacggcgcgggtgatcctgcgcgacctggtcaacgccacc

SEQ ID NO: 175338 - DNA, 160 bp, Arabidopsis thaliana landsberg
tacacggccgaggtgaccgaccctggaacggtgccggaagcggtagccaacgcgttccgcatcgcctcggcggagccgcggggagcggcggccctggtgctggccgatgacgtgatggccgcgttcaccggggccacggagatcgccgcaccgcccgccg

SEQ ID NO: 175339 - DNA, 428 bp, Arabidopsis thaliana landsberg
atggttaagcttcttcaaggcccgattacacctaacaaggagctgctgaagaagatgatagagctagagaaaagtcaggagcatctaatgcaggagatgtctcggctcaaggtctccacggagcttcggaaggagagccgtatccagtgttccatgaatctgagaccatcgccctggaagttcactcataaacagtatctcaatattttgcagtccatggcacaatctgttcatgccttcgatctcaatatgcgaattatcttttggtgagtgagttctttggccttcctatactgttcacgtcttagctggtcctcaagagagtgatttcatggatacttttgcatggttccaggaatgctatggcggaaaaggtttatgggtactctgctgcagaagcagttggacagaaccctattgacgttatg

SEQ ID NO: 175340 - DNA, 144 bp, Arabidopsis thaliana landsberg
agcgacctcatcaccgccggcggtctgtacatgacagcgctggccgacaagctggcggcggcggtcgaagccgacgtactcgacgccggggtttcccatgtcgtcatccagaacgtcctcgacgtgaccaagacacaacgctaa

SEQ ID NO: 175341 - DNA, 398 bp, Arabidopsis thaliana landsberg
gtagatacagagttctcagaggttatagctttcagacatgctcacaacgttgcatttgagaaatctgatctgttcttcatctgtatgttgagaccactctctgataagataatcatcgatgctcttgagatcaaagccgcaaaggtaaatgtaataaagagtcttcgttggaatgctccagttgtacatgctacaagacggtcctgattacaatgattgttgtgttttttcagtggatgccattggctgaatttgtggagcaaccgatgataagaggggacaaaatgtttaagagagtgattgaaatctgcgaggcaagattaagccatcggtactgcggtctttctcctcatcgacttgtctctacttttgatggcaaaccttcttctctctattaa

SEQ ID NO: 175342 - DNA, 241 bp, Arabidopsis thaliana landsberg
atgccaaagtgcaagaatctgttgctaacctcgaagcgacgtaaatccaaatccaaaagacaaaagctccatcagcatgaacctgagtctctgcttccagagaaggatgtagaagaggaagatgaagatgaaggaggcttcaagctgaaaattgcagctccttctcaagagcatggagttcaacccttgggaaacctatatttcaatcctggagcggtcaatgtgcgaaacactggattag

SEQ ID NO: 175343 - DNA, 64 bp, Arabidopsis thaliana landsberg
atgaatctaacatcagacattgaacgctacacatcaaaaataaatcgagccaacgcatttaatt

SEQ ID NO: 175344 - DNA, 659 bp, Arabidopsis thaliana landsberg
atggagaagaacgttgagatcttatcaagagaaatagtcaaaccgtcttctccaactccagatgataagagaattctcaatctctctcttcttgatatcctcagctcaccaatgtacacaggagctcttctcttttacgcagctgatcctcagaaccttctaggtttttcaacagaggagacttccttgaagctcaagaaatctctgtctaaaaccttaccaatcttctaccctcttgccggaagaatcataggaagtttcgtcgaatgtaatgatgaaggagctgtgtttatagaagctcgagttgaccatcttctctcggagtttctcaagtgccctgttcctgaatcattggaattactcattcctgttgaagctaagtcaagagaagctgttacatggcctgtgttgttaatccaagctaatttcttcagctgtggaggattggttatcacaatctgcgtttctcataagatcactgatgctacctctttagcaatgttcatcagaggatgggctgagtcctcaagaggtttagggattactttgattcctagtttcaccgcttctgaagtctttcctaaaccacttgatgagcttccttcaaaaccgatggatcgcaaagaagaggctgaagagatgagttgtgtgacaaagag

SEQ ID NO: 175345 - DNA, 364 bp, Arabidopsis thaliana landsberg
gcatgacggctggtattatattgccacctcaaccttcgaatggtggccgggggtgcagatcaaccgctcccgcgatctcgccaactgggaaatctccggttatgcgctcacgcgcaccagccagatagaccttcggggcgtgccggattcgggcggtgtctgggcccccgccctcagccatcacgacggcctgttctggctggtttactccgacatgaaggcctttgccgggccgaccaaggatgtgcgcaactatctcgtgaccgccccggtcatcgacggaccgtggtccgaacgcacttatctcaacagcagcggattcgacccctcgctcttccacgacgacgacggccggcaatggctc

SEQ ID NO: 175346 - DNA, 324 bp, Arabidopsis thaliana landsberg
acggtcgtggacgtcacggcctgcctgcgtgaggaacgtcacaccctcatgtacgcgtacgccctcggtggacggatccggctgatcgtccccgacggagtcgaggtggtggtgcatggcaccaccattaccggacggcaccggggcgggacggagctcaccattccagagaccccggaccgtccagtcattgaggtacacgcgttctgcgtcatgggcgatgacctattcaagaccacgccgaagaccctccgctgtctccccctaatccgtctgaaccggtgcatcggagagtccaaaggccgcatcagggccaactcctga

SEQ ID NO: 175347 - DNA, 817 bp, Arabidopsis thaliana landsberg
atgcagttgcagatgtctgatgttctcttaactggagatggatctgaccacacaaatatgctggctttgggaaaaacagcttcacatctgcttacacaacttgaggtatatatatatatattctgatgtttccacttgcgtgtgttggtgtgtgtgctgaaactttctttggttcttcagaagagaaacatttcacgtaaaacctcgctcggggataatcaaagttccatggatgtcaatcttgcttgcaatcatagcgacagagaaactctgacttcaaattctatcgaaattcaaagtacattgattccaggtaagcactgttaattacattgagtgattcttcttttcttcttccgtatatttttgtatccggagttctgcatttcatggtttaatgtgtttcagttattggacctataaacatgaagaaaggcgggcctcgtggaactctacatgagttttgcaagaagcatctgtggccaatgcctactttcgatacctcggaagagaaatccaggtgacttctcattttggttcctgttttctctgctctcatgtatcctgagtcctgaccaacctgagactgataactttcttttgtctgcacagaactccgtttgaattcgtagatggcggtgagaagcggactagcttcagcagtttcacatcgaccataaccctaagaatacccaatcgtgaggctgtgatgtatgctggagaagcaaggcctgacaagaagagttccttcgactctgcagtcgtggaattgctttatgagctcgagcgccgcaagatcgtcataatacaaaagtag

SEQ ID NO: 175348 - DNA, 599 bp, Arabidopsis thaliana landsberg
ctcccttgagtggcccactggtcatagcagaaacgctaggtgaccttaagagctctaaaaaacccacaaaggttaaggtctctaaaaaaaaagacaagtatcttctcaaacgaagggatgaagctggtgataagtctgttcagtttggcgaaattgaagcaagttcagaagcttctcatatccagggaattgatggatctttggatggggattttgggctgcagagaagagctccgacgcttcaaactccaatgaaagatgagaagtctgggatcgtcagcatggattttgcctcttcaaatgcagctattcctggtaaagaattttcagcttcaaagccctctcttgatgaacaaaagggtctagctgaaaaatcaaaggagagaatggaagaaagagctgctgtacttccagagcatgggaaatctgaagctatggcgagtcttaaacctaaagaagaagctggaacagatcttggatcagctggaagttctctccagcctctgcttgagtctcatacctcagcatctgaggggaaaagttccacagggtctgtaatcaagaaatcaaagttgctaaacgatcttcaagtgaaatga

SEQ ID NO: 175349 - DNA, 143 bp, Arabidopsis thaliana landsberg
ggtgccgaggtaaactgcagaatagcaaagtgatttgtgatgcaatgttgaagtttgaaatagaggagatgcgctcgttgaacaaacaatctaatagggctgaagtgattgaagacttcacagaagatgtggatgaagattag

SEQ ID NO: 175350 - DNA, 271 bp, Arabidopsis thaliana landsberg
tctcaaccggtggaggttaatgtcgtgagccatcctgtccagaggtttgcagtttggtttggaggctctgtgctttcatcaactcctgagtttttcgcggtatgcaaactagtttagagatccgctagtttgaagctaaacctcatggcttgatcgtgttttgaaacaagatgtatttttgttgttgcagagttgcagaacgaaagaggagtatgaggaatatggagcaagcatatgccgcacgaatccggtgttcaagggaatgtattga

SEQ ID NO: 175351 - DNA, 383 bp, Arabidopsis thaliana landsberg
atgtccaaatcggtgtattcaaatgcctcggctcgggaaaagaatggtggtgatgcatccgatttggtcctggatcgtctaatacgaatcccctcgatgtccggtaagagaatagttatggtacataataattggtcccgtatttttcaatttaaatgcctttgttagaaaaccctaattgggaaagacagaaagagtgtggtgcatgatacgatggtcccggtcctagatttttcgaaaaattgccttggttataaaccagatcggttttaaaatgcctcggctcggttatagatggggaagaattggtggtggtgcataaaaagttgtcccttttctattcaaatgcctcggttcaaaaaccctttctaaagcttatcacg

SEQ ID NO: 175352 - DNA, 785 bp, Arabidopsis thaliana landsberg
atgagcaacctccacctctacacctccgcacggttccgcaatttcccgacaacattctccctccgtcaccaccacaacgaccccaacaaccaacgccgtcgatccatcttctccaagctccgtgacaaaactctcgaccctggcggtgacctaatcacgagatggaaccacattttcctcatcacatgcctcctcgctctcttcctcgatcctctctacttctatctccccattgtccaagccggaaccgcatgtatgtccatcgacgtccgtttcggcattttcgtcacattcttccgaaacctagccgatctctccttcctcatccacattctcctcaaattcaaaaccgcttttgtatccaaatcctctagagtctttggtcgtggagagcttgttatggaccgccgtgaaatcgctatccgttacctcaaatctgagttcgtcatcgacctagccgccacccttcctcttcctcaggttcaattcagcttatttttattttcctagggctcatataggtaacaatggcagaatagtgttactgatgaaacatttcaaaaccaaccggtgacaaattcaaggccaagaattattgatattatgttctgttctttaaattgaaatctctctgtttttctcagataatgatttggtttgtgatacccaaatgctggagaattcagatacgcagctcaccagaaccacacactttcattgatcgtccttatacaatatgtgcctcgcttcctcgtcatgcttcctctcaaccgtcgaatcattaa

SEQ ID NO: 175353 - DNA, 81 bp, Arabidopsis thaliana landsberg
aaattgagcatcgaatggaggatattccggcggcacgacgaggagttgggtggattgaattggagggaaacggaggattga

SEQ ID NO: 175354 - DNA, 103 bp, Arabidopsis thaliana landsberg
aaatactgcaacgctcaattcccaattccccgaacatggtttggaccagagaatcacttctcaattccccgaacatggtttggacctctctcgtcttggttga

SEQ ID NO: 175355 - DNA, 417 bp, Arabidopsis thaliana landsberg
cggatgcagcaagcttcctgcgggtgcccttcttcccacgcgacgatgccacactcaacggccgcccgcgggaaacgtttcgtgatctgcgcttactgacggtgaagcagacgtctgcctacaccctagcgctagctgacacccctgtctaccaggacatgtggcagcgttatatggccgatgcgcagcgctgttatgatgcactggttcaacattacggccaggatgcggtggatgcgctgtccatgcaacagcgcggtgttgtgccgccgccaacgttgaaggagcggttgttcaacctcaaccccaaggcggatgcagcgacggcacgactggtggaggcactggtggggcagaagcgcctctccccccaggaagaagcgctggtgcacgggctaaccaacagcctactgtcgg

SEQ ID NO: 175356 - DNA, 417 bp, Arabidopsis thaliana landsberg
gtatgttgctcctgagtatgcgaataccggacttttgaatcaagagagtgatgtgtacagctctggtgtcttggtcttagaagcaataaccggaagagatcctgtggattacgcgcggcctgctaatgaggtagatagaacatggagagatgaatggatttgataaatatgatgagttttgagcctcatcaacattattttgcaggtgaatttggttgagtggttgaagatgatggtaggatctaagagattagaagaagtcattgatccgaacatagcagttaggccagcgactagagcactgaaacgagtacttcttacagcacttagatgcattgatcctgattctgaaaagagacctaaaatgagtcaagttgtgcgtatgctggagtctgaggaatatcctgtccaagagag

SEQ ID NO: 175357 - DNA, 159 bp, Arabidopsis thaliana landsberg
atattgggaagctcattgagaagacagttaggtcagagcactaccgtttcccaaatagacccatttatatagttggagaatctattggagcttctcttgctctggatgttgcagccagtaaccctgacattgatcttgtcttgattctggctaatccag

SEQ ID NO: 175358 - DNA, 44 bp, Arabidopsis thaliana landsberg
atgaccctcaaaaaggatctctatgctctaaatatgggactctt

SEQ ID NO: 175359 - DNA, 93 bp, Arabidopsis thaliana landsberg
atggaggtcctcgcggacatcctgcagaactccaatctcgaccaggcccgcattgaacgtgagcgcgaagtgatcctacgagagatggaggag

SEQ ID NO: 175360 - DNA, 394 bp, Arabidopsis thaliana landsberg
  unsure (1)..(394): unsure at all n locations
atgaacgatcgccgccgcgaaattctcatttcgttgcatgaggccggcctgaaggtcgtgcatctcttcaacgtctatggtgccgaacgcgatgcggcgatcgcgcgcgccaagatcgtcatcaatatccatcactatgccagcggcgttttcgagatcgtccgcatctcctatctgctcgccaatcgcgtctgcgtgttgaccgagggcgatatcgaggatccggatctcgatccgttcatcggcgggctcgccgtcgagccctatgacgatctcgtcgagcgctgcaaggaattgctcgccgaccaggcggaacgcgaacagatcgccgagaacggctataatgccatgcgggcacgctcccaggcggctatgctgatgagcgtgatgcang

SEQ ID NO: 175361 - DNA, 754 bp, Arabidopsis thaliana landsberg
atgccaaacgggtggatcaaatcattgcaatgcaaatcaaaagctttcgatgatgtctacaatttcaacagtaaatcactaatgtcgtcgtcgagttacaattgtagtcgaaagagctcacattgcgtcaaagacgtgatcgatacccggttaagcaagaaaaaccagaaacccgacccgaatctaaggcgtttcaagtcttgtcgaaccgaaacagagttacttaacccgccaaaccggacccgacgaagcaaatctgcccgaacatcagacgcactgaccgagctgcccgatggtcacccgtcaagaaacgtagtggagattatatttcattcaagctggagctccgacgagtttccgggtcggatcgagatgattttcaaagtggaacacgggtcaaggactgtgacccggttcgaggagtatagagaggttgtgaagtcacgtgcgggttttaacggaggcacgtgtgaagaagaggatgcacggtgtttggctgatggtaatgagatgatgaggttttatccggttcttgatgggtttaacggtggcgcgtgtgtttttgccggtgggaaaggtcaggctgtgtgtacgttttcgggtagtggtgaagcgtacgtgagtagtggaggtggcggaggaaggaaggcgatgatgatttgtagagtgatagcgggtcgggttgatgatgtaatcgggttcgggtcggactcggtagctggtcgtgacggcgagttgtttgtctttgatacac

SEQ ID NO: 175362 - DNA, 440 bp, Arabidopsis thaliana landsberg
gggagcgtcccggcgtcgtcgccgacacgatccttgcggtagccgcccaggcccgggccggcgatgactgcggctctgccgagcgacggtcgccgcggaccccgccgtcagccagcaaggagatgaacaggatgttcgcgcgcgtgatcacggccgaagcggggaccgaggaactcagcagcttcctgcgcctcgcccgccggcagcttcccggtgcccgccagctgcccggattcagcggctactacgtcctcaccgaccccgggaccggcaagctcatggtcatctcgctgtgggagacccgcgagcagatggaagcggtcgcggccgggacaggtgaatccggtatccgcgacgagggcatcccgcccgcggcactcacgtcgctgagcctcgaaacctacgaagtcgcattgcaggccacctcgagcacgccatga

SEQ ID NO: 175363 - DNA, 696 bp, Arabidopsis thaliana landsberg
  unsure (1)..(696): unsure at all n locations
tcaactcgtcctatctgaaacctcggattgaagatctctccaagatattctccaaggagctcgatgtcaaatcttcacaggtgagccaaactgataaacacacaacaacttgtaagccttaagcactattttcgccaatattgagtgaaaatgtgtctgtnnnnnnnnnnnnnnnnnnnnnnnnnnnccaaaggaaacgagtctctcgtcagaatggttgtcctcccacctgaaccttctacttggttttcaaatgtcacagcaacggtaatgattacacaaaagacttctccttacattgctcaatattttatcttctcacatgacatattccattatgcttcttgtagaatatagtttctcggtttacaaatcatcaaataaagcttcctgaaatcttcggaaactatcagctggttaattacaaactcgagcctccaagaaaacggtaatcgccattcattctcaaccgtagctaaaagattatcattccattgtctcaaaaagaaaattcttttccattcgttttttaggacgaataacaacattgtcgtgatcgcgattggaatcatcgctgtaatcgtcgggttatcagcttatggagcttggttgatatggaaacggaaacaaacatcaattccatacaagcctgttgatgaagctatagtagctgagcaagaacttcaacctatataa

SEQ ID NO: 175364 - DNA, 1081 bp, Arabidopsis thaliana landsberg
atgaaggatgagtataaagcttctgacaaagagcatgtcacgaaagatacattaaggcatgctaaacagagaaagagaagggactaccctggtgaagaaagttcttcccatcatagaggacatgaagacttctctgcacggacagacaacattgttaacaatgagaaaaaaccaaggcaggagaggacaggtgctaaaattgataagtttattgatactttggatggccagcgattgcaagacagaaaacataaagattctagacgaaagattaaagaacagcgagagggcacagaatcacttagcaagcaaggggagcaaaatggcagttccgtagtgacagtatgctccatcagcctatgattattttttgtatctcatccaagttttgcaaactgcacatagcatgtttatcgtgaatgcaatatatcccgcaaagttttatgttctgttgcgtaacttacctaagatattacatggtttggtcagttttattctgcttcacggtcagtactgatgtttctttcatatcttccagggatcaaaaggaaccaacgacgcaaggaattgcaggagtgagatcccacatcagcctaacaccgccaaaagacacaaggaaaatgcatcctctggtgatgagatacacgattcaaagagaggacgtacaaaactggagcgttgggcaagccacaaagagagagaagatgctgtctctgccaagtcatcatccatttcctcaaaactagaagaaaaggaaaacaacactaatggccgtcttagtgaacctgttcatggttctattggaaagagccgggatgtaactgaagagaaaattggccatgatcttgcagacacaaaagatggaagcgagaagggaccaggagaccggcacttggatacggttgagaaactcaagaaacgcagtgaaaggttcaagcttccaatgcccacggagaaagacaccacgggagtaaagaaaatggagtctgagacactgccctccgcaaaaattgaaggccctgtggattcagaggtgaaagcagagcggccagcaaggaaaagacggtggacgagtagctga

SEQ ID NO: 175365 - DNA, 102 bp, Arabidopsis thaliana landsberg
acctcggacggctatgcatatgcaccaaataacttaacaggatccgtccgattgccccaaagacatcggataaaccacttacaaccagaaccgcgggattaa

SEQ ID NO: 175366 - DNA, 265 bp, Arabidopsis thaliana landsberg
attgagaattctacaagagatgaattggatcatatcaggccaatttttgatcttccatctaagcttcgatgtcgtgttgtggctattgatcgtaaggtatgtctttaaatgttcaagagttaacacataagttacaatttattattttgcatgctttatttcactgtagaaagatctaattttgttgcttgctttatgtttattataggtagacaaaaatacagatgaagtctatgctcagatttcgttaatgcctgatacaaca

SEQ ID NO: 175367 - DNA, 147 bp, Arabidopsis thaliana landsberg
atgaagaatagctgcggacctgtaactgctgcaaaaaccgtctatgaggacgaagaagcttatctggtcgtaaaaactctaccatttgtggatttgaacaccgtgaaggtttcatggaggaacaatatcacaaatggaatagtgaag

SEQ ID NO: 175368 - DNA, 165 bp, Arabidopsis thaliana landsberg
ggtgatcctctttatgtgaaagtgaacaaattatcgtctacaaagactcagcttccttatgatttctactacctgaattactgtaagcctccgaagatcttgaataccggcgaaaatttgggggaggttctcagaggagatcgcattgagaattcggtttatact

SEQ ID NO: 175369 - DNA, 61 bp, Arabidopsis thaliana landsberg
atgagaaggctgcgagtggatgtgtttggtaaattgattggtcttgatcatgacgttgcag

SEQ ID NO: 175370 - DNA, 37 bp, Arabidopsis thaliana landsberg
atggtagatacgatcagctggactcgagctcataaca

SEQ ID NO: 175371 - DNA, 258 bp, Arabidopsis thaliana landsberg
gagctgcgcgagcgccgccccgaccaccccatcgagaccaacgtcgagttctgggccgccgtcatcctcgacttcgccgaggtcccgccgcacatgatgccggccatgttcaccagtgcccgcaccgccggctggtcggcgcacatcatggagcagaagcgcgagtccaagctcgtccgcccgtcggcccagtacatcggccccggcccgcgcaagcccgaggacgtcgagggctggaccgagatcgcccacagctga

SEQ ID NO: 175372 - DNA, 198 bp, Arabidopsis thaliana landsberg
accggaaaccgaaagctcaaatttttcgagaaaatagactccggagaagacacaagaaggccacgagtttgggaactgacgtttaatctagcagctgacctcgaaattgcttgtttagcaatgtttctccacatggggaaggattgggaaactgggtttggagaagaaataaagggtttatgcaatggaatcaagtga

SEQ ID NO: 175373 - DNA, 324 bp, Arabidopsis thaliana landsberg
gatccgaaccttcgaaaactccgtaatggagaacctacgatttcaaaagcgaaaacacacacaccattcaaaatttcgaacattctagaatccatctgcactaatcactcaacgggaaaagatcaggatagagattcaaatatacaattccgtctttcgatcgaacatcttgaacggaaaatttcaaatccgaaccggagaaaacaattaaaccggtgtctgacggctggccaccaccttgtggatgaaacaccgctgattctagtattagagctatgcgtccatcttgcgcctgaatcagagagtgaaggattcaagcattga

SEQ ID NO: 175374 - DNA, 1317 bp, Arabidopsis thaliana landsberg
atgaaccggttgaaggagcaaaaggggccgaagttcgacggcgaagaatcacctccacctgattttgatgaagatcgaagtgtgggtgaggtagacggaggagatcacacgccattcgctggaggtaaagtcagaaggaaagcgtctcgctatagagagcatcgtggtgactatcttcacgtttcttctcgtcctggattgatgcgaattctggagaaacaaggttaggtttctccaaacttttggtttttatttgatgaatttgagattgagaggcaatttgtgaatcgaagaacttggaggaatagttgaatcagctgtagaattgtggcatcgatttatagtttcttatgtggttgtttggattgctaatgattggattcaccttgaattgcatgtgtttgatgttgagaaggtgattcattgttgttataggtgatacatcgattctttttgctgataaagttttgaagttcaccggctcggggaagatgaaacggcgtatttttatcctcactgattttgcgatctatctaattgatcccgagactgaagctatgaccaggagaattgctttgtcatcagtagagaagatgtgtttaagcaaattgagtgataacttcttcgctatcattattcccacggaatatgatctcttcatggccagcactaggaagactgagcttgttcaggtcatggtagatgtcactaaaagtgcttctgactatgaacttgaagtgcttctctctaacaggtaactatgaccgcaatttttggtttttgatgtctcctctttgaatgctaataccatgcacatgagaattgtttattttcatctcatttcctgatattgacactacaggtattgtgttactgagaactgatgtgggtctttttagtctctgaaacttagtgagctctgtttcttaagtgacttggctattagttagtggtgagaccagaggatccacttgtacctattaatcatatctatatttatggaagaagataaagaattaacacttttaggagataactactgaaattagtacgttgagatacaaatggttacaactatattttaaatactgttagatgacatattctagttttgattgaaactgttctcaaatggcaatcacgataatagtccgtagaaacattttgtatatctcccatatcgtaaaactcagctattggtttatatgtgcagtttgtgttttatactgataatggtttctccttgtgttcattccagatttgagtacaatgcatctgcctcattagtaaaggaagtttcttttgaggaatctgaag

SEQ ID NO: 175375 - DNA, 180 bp, Arabidopsis thaliana landsberg
ggactttccgttaatgtcgccggcgacggaaactcaggaatgtcggttctctgtgatctcgattccgacgaaaaggcagcaaatttgcagccgtgtcagccgcagagagcatccccttcttctcgtaaccgcagcagccgcagaaactccgacaaaaacgccatcgtttcgatacagtaa

SEQ ID NO: 175376 - DNA, 128 bp, Arabidopsis thaliana landsberg
acctgcatctggagacaataattgtacgcgtgggaagtgaccttaatgaaacaaggtttaaagaactgcatcaggtggattcaacacttcctcgcagcaataatgtctccattgtgatattagattaa

SEQ ID NO: 175377 - DNA, 1578 bp, Arabidopsis thaliana landsberg
atggaggagtggattccactattcgacattttcttgaagagtccatctccggaggctgaggcttcgctgtggttagaccaggcttcgaacccttcttcttcctcctcctctgcggcggcgccgatcaaccggagctcgtttgtttcattgctgagggaacaatgcgaccagaattcatctccggttacgaagaagtaatacccagatttcaatttggattttgttttgtttttctatatgttatggaccgatttgggttgctgatgaaattgtttttgtttctccgttagggttcttttcattgagacattaccgaacatggttcagtcaaagattctatctttccttcttttcgagtatcagaggttttgcgttagtgatttggtttggctggctagagaaatgttgggtagtggtggtaataaagttgtcgatttctgggttcagagagatgcacataacctgctcgacagaattcctaaaccaaaatttgaatggatatctaatctagatttggattcagctgatgaagacagcatgaagcaggtatttgactctgtacctgattggctcagtgagaaacttggttctgctggtacaattcttccatggcttcctgtatcctgtgatgatgtagattcagaaatgctggttgttgattcttggaatgggaaggagataactcaaatcaaagaggatatggaagaagatcagagagaagttgtgcataacattgatcataccatgactgttgggttacaagctcatgatcatgaaatggctgtgaatcttagagctcagatttcgaactttgagtctacttctgaagttttaaccttgtgtaacgacattcggagactttgcttggagaagggtaaggactctttgagagttttggctttgattgagccttggaatgcagatgatgagactgctgcagttttactttcgagtttgcataatggaagtgaggaagaagagcttggttggccaagccatgttctatgttcgatcgtgcttccaaagtttttgtctcttgagaagtctgcctctcgtgtgctgatgtcttcaacaatcgagttttgcaagatccaccaaagagcagctgagtatgcattggtgttccctttaatactcaggaaagaagggataaacaatttcatttgtgaggtgatttcaagggttttgaaagagtgcttgcacttgggtcaaatctctggtttttgccagaagttgctttgtggaagaacacaagagcggaggtttatgttccttccctgccatcgagatctcatatcggatgaactgacatggaatgaatatctgtttatccttttccagaacatattgatccatggcatccctttatcccaagattccgtcgattgtcttgtttccaaggttcaggagttggcggaaaggtattcgaaatcgctaaaatttggaaacttcttgctacattttactgccaaatgtgctccgatgctacaggctcataagtatcagctgatcgaatcagttaagtgcaccaacagtctagttacaaaatctatcctatcgaaactcaatgccctgtag

SEQ ID NO: 175378 - DNA, 178 bp, Arabidopsis thaliana landsberg
ttgcatcgacggcacgttaacgaccggacaagaccgggaattagcgctcattacggacgtacgctatatgtcgatgacggaaatctccgctttaccacaagatcaagtgcacggcatttttcatatcgcccgcactacaatagatttgcaacaattaaaaggcttcatccgcatctag

SEQ ID NO: 175379 - DNA, 123 bp, Arabidopsis thaliana landsberg
gatatcgatataaccgatggtggtcgtgtatctcgttcttcaaagcggaaaactgaaacattatgccatagcatcagaacattgcaaaaatctttccagtctccaccgttgattacaatatag

SEQ ID NO: 175380 - DNA, 107 bp, Arabidopsis thaliana landsberg
ggccgacttcttttgcacccattatcgaaagggccatgacgattgtggaagaaagtggagggcagtatcatgttcatgtgatcagctttcattattataagatttag

SEQ ID NO: 175381 - DNA, 295 bp, Arabidopsis thaliana landsberg
atgcgcctcagacaactgtaagtcatagatcttgtcccatctcagccaactgcattgtttccaaggaataagaaagtatagaaataatggttctatgtcttctctaggggtcctggaagcggagatgacacactagacccgttgtcacacaacaggatagatgttctgaaagaatgggtttctggagaccaagcttgtgtagaaggaaatggaagcgcggactggaagtcgcttgagtctattcataggaaccaagtagcaccaatcattgatgatactgaagacttgggttcag

SEQ ID NO: 175382 - DNA, 286 bp, Arabidopsis thaliana landsberg
  unsure (1)..(286): unsure at all n locations
atggtgaccagcccgccttggtnnnnnnnnnnnnnnnnnnnngttgcgaccgagacccggtcgaggtcagcggtccacgacaccagtgcgaccacttcgagcaagcgccgaacccggcgtccgcggacgcggttcaaccagtcctgcaccgtcacggttggcgacccgctcgagcgtcgaagggcgcgcacgagtgaaagaagtgtcaggttcacggcggccagcaccaccgtcggcgaccagggccgcacccaacgaccgccgagcacgatcccgggcatgggcg

SEQ ID NO: 175383 - DNA, 1239 bp, Arabidopsis thaliana landsberg
atgacggtggagatgtcggcgttaaaacgggcgagacttcctcgttggacgagacaagagattctggttctgattcaagggaagagagtggcggagaacagagtccggcgagggagagcggcgggtatggctctcgggtcgggtcaaatggagcctaaatgggcttctgtttcgtcttactgtaaacgtcacggtgtaaatcgtgggccggttcagtgccggaaaagatggagcaatctcgccggagattataagaagattaaagaatgggagtctcagattaaggaagagactgagtcctattgggttatgaggaatgatgttcgtagagagaagaagcttcctggttttttcgataaggaggtttatgatattgttgacggtggtgtgattcctccggcggttccggttctttcgcttggattggctccggcgtcggacgagggattgttgtctgatttagatcggagagaaagtcctgagaagttgaattctactccggtggctaaatcagttactggtaaaattcagatcaaagtttaagtttttattttgtatgttcatcagaatgattccatttcttatgaagttcaatttttttgatgaagatgttatagacaaagagaagcaagaagcttgtgtagcagatcaaggtttgtttatctctctgtgtgtatttgcttgatctattgctctatatactaatctcaaactagttttagagctctagagtgtgtttctcttgagtcttgactatgtagttatgttgtcatgtagataaatgatgttttcgtattctaaaatgcatctcaaattgtgttataaaagtagtttaacaatcttccctatggtgtgtgatcttttcgtttatgttgaagggtctctatgttcttgtttttatactaaaatgttgagtttgaacttgaaggtagagtgaaagagaaacagccagaagcagcaaacgtggaaggtggatcgacatcacaagaagagaggaagcgtaaacggacatcttttggtgaaaaggaagaggaagaagaagaaggagaaacaaagaagatgcagaatcagttgatagagatactagaaagaaacgggcagttgttggcggcacagcttgaggttcagaatttaaacttaaaactagacagagagcaaagaaaagatcacggtgatagcttagtcgctgttctcaataagctcgctgatgctgtggcaaaaatcgcggataagatgtag

SEQ ID NO: 175384 - DNA, 75 bp, Arabidopsis thaliana landsberg
atggcattacaactggtaccggtagtacagaaacccatcgaggaaaaatatctcctgcagtttgattacacgcag

SEQ ID NO: 175385 - DNA, 490 bp, Arabidopsis thaliana landsberg
atggcacgctatggcatcggcaagagcggctgggataagctgagggcgggcgcagccaggatcgaggatggaacctatatcagctttgacggcatcgaagatgaggcgctaaggcatcgcgcgcgggcgatgatcagtgatctgatggacaatgcgacctcggaaggccgggcgcgcgagcgtcgcgatatggcgttcggatcggtgcgcggatcggcctttggcgaagtcatgcgcgccctgttgcagttcaagagtttccccctgacctattacaaccgcacccttgttccggcagcctcgaaggcgcgggcgggcaatatcgcgccgctggccaatctgatcgtctcgaccatgttgctgggctatgtgtccttgcaggccaaggagttggtcaaggggcggacgccgaggccgctcaactggaaaaccgtggcggcgtcgataatgcagggcggcggccttggcatctatggcgatttcctgttcg

SEQ ID NO: 175386 - DNA, 180 bp, Arabidopsis thaliana landsberg
atgaaggtttccgctaccctcgctgccagcgccctcgccgttggcgcctcggccaagaactacctcggcttcaactccggtgccaccctcgccgaccgatccgccaagttcaaggccgacttcaaggccgagttcgagactgcccagaacctcaagggcgcccccggcgacttcagcgcc

SEQ ID NO: 175387 - DNA, 52 bp, Arabidopsis thaliana landsberg
atgcttagtgtggttcgtcgaaaatggaaaatatgcaaggccatctggaaag

SEQ ID NO: 175388 - DNA, 147 bp, Arabidopsis thaliana landsberg
acaacccgcatcacctcgttcgccggcgacaaccgtggcaagctcgaccccctaaaggagcccgaacgtctggaaaccgccctgaagcgcttccaccccatggacatcaagaaggctgtctcccatgactgggtttctgatccttaa

SEQ ID NO: 175389 - DNA, 349 bp, Arabidopsis thaliana landsberg
atggcgcttggcttccgccacgccttccaggccgtcatctctttcggcaaggacgacatgatcatccccgaaaccaatgagaaggaggtcgaggagacccgtcttgtggtgaaggacttcgagcagcagtatcaggacggcctgatcacgcagcaggagaagtacaacaaggtgatcgacgcctggtctcctttcggcgaccgcgtggcggccgagatgatgaaagacatctcgggggtcaataagggccccgacggccgcgagaagcccatcaacgccatctacatgatggcgcactccggtgcccgtcttagcgccgcgcacatcaagcagctcgccggcatgcgcg

SEQ ID NO: 175390 - DNA, 125 bp, Arabidopsis thaliana landsberg
atgatcatcatcatcaaaactgcgacaaagcctttactcaatttcaaagagatggagatgcaaacaaaatgcgacttggaacttcgccttcttacttcttcttatgattctgatttccatagctc

SEQ ID NO: 175391 - DNA, 525 bp, Arabidopsis thaliana landsberg
atgactcgcgcttttcgatgcttgaccgaattctcgatccatatgactcttgtcagaacccagctggggagcggctacgagctggacgtccaaactagtgtgtcgcccatcatcccgcagaagacaccagtgaccattcacctgttctccatttacatggcactgtgtcgtccgacgtgggcgggtgggaatgtgcactatgtgcgggcggcattcgaaagagccgttggtgagcagtcggacttgctacgtcattcccatggcaagaacaaggtccagagctctggcgatgacagtgcatgctcaaacatcactgtctggaaattatacattctgtttgagctcgatcgagctcaggacatcaaggccgcaaaggccgtcttctaccgagcgctccgcgcctgcccctggtccaaggagctggtgatgctcgcctttgaacgtctcggtgaagagcatgttctgggcttcgacgagctccggggggtgtacaacatccttaatgaaaaggaactccggcttcat

SEQ ID NO: 175392 - DNA, 55 bp, Arabidopsis thaliana landsberg
atgctcggtcttaagctttacatggccactgaccctcaagatccagatcaaaagc

SEQ ID NO: 175393 - DNA, 315 bp, Arabidopsis thaliana landsberg
cacatcgcggccacggtcgacaagctggccgcgaaggacgccgtcttcaccgctgacgtcggcaccccgtgcatgtgggccgcccgttacctgcacatgaacggcacccgccggctgatcggctcgttcaaccacgggtccatggctaacgcgctgtcgcacgccataggcgcccaggccgccagcccgggccgccaggtcatcgcgctggccggcgacggcggtcttgcgatgctgctcggcgagctgctcaccttgcgccagcagcagctcccggtcccgatcgtcgtgttcagcaacggcaagctgtcaaac

SEQ ID NO: 175394 - DNA, 331 bp, Arabidopsis thaliana landsberg
cgtcaccagcttcacgaaactgcgtcgcgacggcctggccgtggaacgcgccaaccgcctgaagcctggccagaagccacagcagacctacgtcgagcagtgcctgaacggtcgcaagggcccggtcatcgcctccaccgactacatgaagctgttcgccgagcagattcgccagtgggtaccgagcaaagagttcaaggtcctgggtacggacggttacggtcgcagcgacagccgcaagaagctgcgtcacttcttcgaactcgacccccactttgtggtgctggctgccctggaagccctaactgaccgtggcgagatcgaaccacag

SEQ ID NO: 175395 - DNA, 310 bp, Arabidopsis thaliana landsberg
atggaagcgcatttaggagatttcggtcttgccaaggtcttaactgagaactgtgataccaacacagattcaaatacctggtttgcatgctcttatggctacattgctccaggtactcatcttctctttcttagctttcttgcatattcactgttttaatatctaaagatttgaaattgtgtgtctagagtatgcttactcgttgaaggcgactgataagagcgacgtttacagtatggggatcgtgttgatggagattgtgactgggaaaatgccaaccgactcagtgtttggtgcagagatggacatg

SEQ ID NO: 175396 - DNA, 65 bp, Arabidopsis thaliana landsberg
atgtgttgtgagaaaattcgacatgatcgaaatgttaatctctatagaaagcattccaatgtgat

SEQ ID NO: 175397 - DNA, 104 bp, Arabidopsis thaliana landsberg
ctttggattcgccgcctttcatttcgaagtttctgcaattgaagaatgacaaagaaacgaagaagaagaagaagatcgttagagaattgtttgactcggactga

SEQ ID NO: 175398 - DNA, 52 bp, Arabidopsis thaliana landsberg
atggcaaatgagaagaagatgctcccaaaacgcatcatactaatgcgtcacg

SEQ ID NO: 175399 - DNA, 322 bp, Arabidopsis thaliana landsberg
atgatgggtcagctccaaaaggcgggcgatcccaaaaccacgctgctcctcgcaataaggggctcgcgaccaatacacccagtgcctcggccaatcgatccgacacctcctgatcaacgtggggagacaggttgtcgcccattgtaccgatcgcctcatcgagcgaaatcgacagtcgaaagagcacgtcgaaattctctcgtgtttcatccttcttcaaggctgcttgcgcgtgcttaaccgcttcactgggctggagaacggcggcggcggctggcgcttggatatcgacgccctcgtgctgcagccaatgacgatctga

SEQ ID NO: 175400 - DNA, 156 bp, Arabidopsis thaliana landsberg
tttgatgtggctcagtacaaaaaatttcattatggagcaaagggaaatcttaacatctgggaacccgaagtttcacctaatcaattcagtcttgcaagtatcactatctctgcaggatcaaatgaacagtttcaaggcattagagctggatggata

SEQ ID NO: 175401 - DNA, 426 bp, Arabidopsis thaliana landsberg
atgtcggtccggccgtggctcggcctgctcgccgtctgcgcgctccccagcgtcgtggtcaccgcgcgacgtgcgccagccgagaagcgggcggagctggcgggcgcggccgaccggcggctggcgcggagcctgttcgtcctcggcgccaccgccgcgagcagcaaggagctgcgggtggcgggcacgcaggaattcgtgcggcggctgcgagccggggcgtgggagcgccagcaccggctgctggcccgcgagcggtggatcagcgccgtctgcgcggccggggcctgggcggtgttcggggcggcgttcgtggtgagcaccgtcatcgtcgccctcgcgcccgggccgcgcgcggtcaccgtcggctcggtggtcctggtcgtgaccgcgggcacgcggctctcgcagtacgtggggcagacg

SEQ ID NO: 175402 - DNA, 76 bp, Arabidopsis thaliana landsberg
atgaagcaaatctatatcaaacaagttgatacggaatgtagagagattacagaaaatgtgatggttaccctcatgt

SEQ ID NO: 175403 - DNA, 383 bp, Arabidopsis thaliana landsberg
atggttttctcctccatccaagcctatcttgattcatccaactggcaacaggtaaatgctttacaattccttatatagtagctagacacacaatttcgtcttgctttgcaattagcatgatctaattttggaatcaaactcaaaaagagtactaatattaattcaaagaatgaaaaagaaaagacacaaaagttcttcttgcttagcatgttcttgaatattcttgttaaatatcaatccttcttgttttgttttgtaactttaggctcctccgagcaattataatcatgacggaacaggcgcctcagcaaatggaggtcatgttcttcgtcctcagctgcagccacaacagcagccgcatcctaatgggagcgggggaggag

SEQ ID NO: 175404 - DNA, 192 bp, Arabidopsis thaliana landsberg
gatagcgatatatactcggattacatcggatttccacatctggaggaacggagaaaggtcttgtgtttatcggctatattgaattccatcgaaaatctagagacttatcgtgactcttgggacgatgatgatcttcttcaagaaactcttcaagacccttactttacccaactttcaattccttctgtttga

SEQ ID NO: 175405 - DNA, 892 bp, Arabidopsis thaliana landsberg
taaatccgaacatgatacaacggaagtagcttcccaaggtagtgctcaaaccaaagagccagcttcctctaaaattgcaattacgagttcaagaggacggtcaaatactcgagctgttaaaaggggaaggtcttctacaaactcactgcaacgagtacagagacgcagaggcaagcagccgtctaagataagcggagatgaaacagaggaaagtgatgcttctgaagaaaaggtttcaacaagactcagtgatatagcagaagagacggattcgtttggtgaggctcaaagaaactctagcagaggaaaatgtgcgaagagaggaaagtctcgtgtgggacaaacccaaagagtacagagatcacgcagaggcaagaaagctgcgaagataggaggagatgagtctgatgaaaatgatgaattagatggcaataacaatgtgtcagcagatgcggaagagggtaatgcagctggtagatctgtggaaaacgaagaaacccgagagcctgacatagcgaagtacacagaatcacagcaaagagacaacacagtagcagttgaagaggccttacaagattctagaaatgcaaagacggagatggatatgaaagagaagttacaaatccatgaggatccactacaagctatgttaatgaaaatgttccctattcccagtcaaaaaaccacagagacatcaaaccgaaccactggggaatatagaaaggctaatgtttctggtgaatgtgagtcttcagagaaaagaaaactcgacgctgagactgataatacatctgtgaacgcaggcgcagaatcagacgtagttcctcctctagtgaagaaaaagaaagtcagctaccgggatgttgccggagaactgctcaaagactggtga

SEQ ID NO: 175406 - DNA, 457 bp, Arabidopsis thaliana landsberg
gtaacagtagggagcaaaactattaccagcgacaaaactttagaccggtatggttaccaacccggtaattgggcacatatagcagtggaatataatgctactgacagcaccgtgtctgccttctatgatttccaggccgtaattgataaggcacaggtagccggttacaatggtacagggcctctcgtattcggacggagcattagtaaacagggaaattattttgccggtaaaatacatgaagcccgcatctggacacagcttataccggctactactttgcaggtaaacagtctggtcagcttttcgggttctgaagacgggttactggcttactacccgatggacgaaggcagaagcactattatttttgataaagcacatggcgataatgctacacttgtcggcacgtggaactctcctcctgagaaagccaatctctcaaggaaacggacat

SEQ ID NO: 175407 - DNA, 721 bp, Arabidopsis thaliana landsberg
atgaaaaagtatggccttcgtcttggaacgttaaagggtgaattatttagaatgcttaatgggcaaggcaataatggcttgaaaatatccgagttagccgatgctccagaggtaagttggtgttaaattattatcagcttctgtttgtaaataaagtgagaaatttggactaaatttggttggtcgtttacttgtactatttggctgctctctgaaaccctagatgatatctaatggaatatgctgatggtgtgtggttttgtaggttgctgtgctaaatcttgcaactgtaccagaagaacgagagaattcaatatgttcaactctagcaagtgatattacattattcgaaaagatatcagaatcaacgtatcgtgtacgtgttaattgtttctctgaggaccctgacaagagccagtctgattcggacgactccgggagtgttgatgatgaatctgatgattgctcaattagttctggtgatgaaattgaacatgtttcagaaaatcctgcacttcgaaaagttaagtgtaggaaaaggcggaagcataaaagtaaaatgcgggaagtatgtagtgagattgatgaaagccatcccggagaaccatggctgttggggctaatggaaggcgaatattcagacctaagcgttgaagagaagttagatgtttttgtggctttgattgatcttcttagttctggttccactatcagaatggag

SEQ ID NO: 175408 - DNA, 154 bp, Arabidopsis thaliana landsberg
atgcccactgtatacattgatgaatttgtcggtatttccaaccggtttgaggccttgccacttgcgtttgccatccagaagaagtttggtcaaaaaattgtgctggattggcacgaactggactcatttaggtgcagggaaccgcccgagcaag

SEQ ID NO: 175409 - DNA, 138 bp, Arabidopsis thaliana landsberg
atgggtttcaacaactggaactccacccattgccgcgccgaattcaatgaggcgatgatccgcggcatcgcagacaagttcatcagcctgggcttgcgcgacgccggctatcgctacgtcaacatcgatgactgctag

SEQ ID NO: 175410 - DNA, 524 bp, Arabidopsis thaliana landsberg
atgcggagcgagttatttgattcagatgaagcagaaacaaaatcgagaacaaatctctcgcaagaagtcgaagaatatatcaaagatacaattgatcattctttaggtcttccgatctccatggaatctcttcagaagaagctttatacggctgaagaatctcaacgccgtcttcgcgaacagtatcagggtctgatttcgcgattaaaggagaaagatcatgtaatcgatcgtgttagggttagtaatttctttctgggtatctttcgttttctgggatttgattgatttgaatctgaatcttttttttttttttttttttttataagcctgaagcgagtatgaatgcgcaagcgttgaagaagtttgttgaagagaatcagaaattggctagtgagtgtgggaatttgttgagtcagtgtaagaaattggagaaagagtgtttgctttatcatcaagatcgtgatgcgttgatggagtttgggaatgaatctgatgagagagctagagaagcaaaagctagg

SEQ ID NO: 175411 - DNA, 69 bp, Arabidopsis thaliana landsberg
gagttgggagtaggggaatgtgaagtagtagtggtggcccaagttgtgtttccaaacaaacgccaataa

SEQ ID NO: 175412 - DNA, 416 bp, Arabidopsis thaliana landsberg
atgtttgttgagctctaccagcaggatattcaagctctgacgatcaccgcaagtccaaagattccgggtgcggaggatattcccgcaataggtggacaagaactcctgagtttggtttctttggtggagatgattgaaaacatggataagaagatggtagaccagctgaatgaaattataacaatgatttcagatttggataaaagagttgaatcgttggaagcattcaaagatgagcagaaagaagaggagagaaaggtatgtattgataattgcgtaatactgagtaacattgtgatactagagtataactgcgtaatactgatataactttgttcaattgcagaatcaagaagagatggaccaagagaaggatggtgatccaaaagagaaggatggtgttcaagagaaagatg

SEQ ID NO: 175413 - DNA, 545 bp, Arabidopsis thaliana landsberg
atggttttttctcctcgattttctcaagagtcaggggattataaagaacggaaatacaaatttgaagtcacaaggatacttacccacgactcaatcatgcgactcacagccgtcggaggcagacgtattcgacggagccaaggatttcacgcgccaattctcccgacaacgaccgacgtacggaatacaacaaaaacaaaacaaaactccgactccgatagaagtggaacgataagggtcattgatttctttaagatggggcccatcacttcattaaaccgcttcgatatcgccacgtcacttctccttttggatattaaaaataaggtaaaattccaaaataaatcacaactatttaaaatttgcgagaaaaaaacttcaattttttaaattgctaaaagaaaatattggcagatttattcttttttttttttcactagaatattatctttattattgatccaaacaagcttacaagcttaaagttaaagcccaaggcccaaaacgattacatcaaagaaaagaacgacaactcttgcatctaa

SEQ ID NO: 175414 - DNA, 439 bp, Arabidopsis thaliana landsberg
atgttcatctacgtcatcgtgccgctctgctactggcagttcaacacgttcgacgcccgcaggttccccatcttctccaaccagctcttcacggcgtcgggccagaagtacgacaccaccaaggtgctcaccaaggacttcgacctcaacgtcgccgcctacgacaactacgggaagctctaccttagcccgctcttcgccatctccatcggctccggcttcctgcggttcacggccaccatcgtccacgtcctgctcttccatggcaggtattttatactgcatcagccctttctctcccactttgatggaccgtcgcatccatgagcggtgtgctgaccagttgtcgctgtacgtgctccttgacacagcgacatgtggaagcagacaagtcggccatgaacgcggtgaactggacgtgacgccaactgatgcagag

SEQ ID NO: 175415 - DNA, 51 bp, Arabidopsis thaliana landsberg
gtgatcaatcacaaggctcctcgagaagaagaagatctcaaatccgattaa

SEQ ID NO: 175416 - DNA, 221 bp, Arabidopsis thaliana landsberg
agcagaagtacgtccacttcgtgctcaaccagcgaaccatcccgctgggcctgagtttccctgagtgcgatgccagccgcaaggacggctggtgcgaatttgacacctttatcaaaatccaggagggcatgacggcaaaggccaatttcgaccatgcctgcttcggggattatcttaaagagccgtatggcaaaattactgacggcgcccccatcttctaa

SEQ ID NO: 175417 - DNA, 219 bp, Arabidopsis thaliana landsberg
gaagcagagaagcatctatctgaaatggttgtgtccaaagccttgatagcaaaaatcgacagaccatcaggaataatctgcttccagattgttaaagacagcaacgaaatcctcaactcgtgggcaacaaacttggagaagcttttggatcttgttgaaaagagttgtcaccaaattcacaaagaaacaatggttcataaagttgcactaagagcttga

SEQ ID NO: 175418 - DNA, 265 bp, Arabidopsis thaliana landsberg
gttattatctggaagaatcaaatctgaaaatgtccctgaaaataaggatgggtcagacgacgacgacgatgacgacgacgatgaagacaatgacgatgagggtggtgacgacgatgatgatgctgaggaggaattctctggagaagaagatgggggtgatgacgatgatgaagatgatgatcctgaagctaatggtgaaggaggaagtgacacgacaatgatgacgacgaagatggtgatgatgatggcgatgaggacgacgagg

SEQ ID NO: 175419 - DNA, 453 bp, Arabidopsis thaliana landsberg
atgattcgcattgcggatcacgagttccgcatcattggcgtgctgcggccgtgggcgccacagccgcgcttctacgcaatacatcttggcggacgcgactacggcaaaggccaggcgatgtttctgccgttgcaggctgcgcgtgccgacggcctgatgccgaatatggtgttgggttatggcggggcattcgatgtacaacacttggaaacggccccggcgatctggctgggcctgtgggtacaactgcggcatgccgccgatgtctcggcctaccggttgttcctcgaaaattatgcgaaagagcaggtcgcactggggcgctaccagcattccgacacggccttgtccggtttgatggcatggatgcgcagcgaacatgtggtgccgaatgacgtgcgcttgcaggccgggctggcgttcggtttcctgctgatctgcgtggtgaatacg

SEQ ID NO: 175420 - DNA, 381 bp, Arabidopsis thaliana landsberg
atgaacgttcggtcgattacgctcctgcggtcgaatggattaaaaatagcgatttcgaagcctgcaggttcggcaaggtgggtgtccggcttgatgtcgatagagcatctggccgacaacacatggaagtactacaacccaaacggaaatcgggagatctacagcgagtacggctacatactctcggtcaaggatcgctatggcgttggctggacgttccagtacaacggcgatccctatacgacgcatctgtatagaatcacgcacagctcgggccgacatgtcgacattcaatggtccggacttcgagttgcttcagttgccgatcccgccggccaactgtatcagtacgggtacgacggaaatgatgtgctgtcgagc

SEQ ID NO: 175421 - DNA, 467 bp, Arabidopsis thaliana landsberg
cgagcggacggtggcggagtacctgctgacggaggtgctggaccgccagcccgcggcggtgcggcgactgctgctgcggacctcgatcctggaccaggtgaacggggagctcgccgacctgctgaccggggacgagggcggggagcggatcttgctggacctggaggacgcgaacgcgttcgtggtgccgctggacccggcgcgttcgtggttccgttaccaccagctgttcgccgggctgctgcggctggagctgcgccggtccgcgccgggggaggtggccgcgctgcacggcgccgcttcgggctggttcgcggcgcgcgggtacctggcggaggcgatccggcacgcccaggccgccggggactgggggctggcggcccggctgctctccgatcactggcccggcctgcacctggacgcgcagcccgccgtcacgcatgatctgctaaaggaaaatccggccg

SEQ ID NO: 175422 - DNA, 426 bp, Arabidopsis thaliana landsberg
gatcttaagcatgtatgatattcaggaggaggatcttgatggatttactgagcatccacattttctggtgtcacttgaaacattttcactgcaaacgcagctgccaattatagaattactaaaagtactaatttaatttgttgctttgttttctcttaccacattggactcatctcaagtagacatgcagtatgcagtatataattggttccacgtttttcttttaccaggatttcatgagtgggaaagctctctataggaacctcatgggtatccttcaggttggggtcaattccatcatcagcgagcgattgagtaaaacttatgggaagatcttagaaaaggctgtacaactttctttggccatccccctactcgtctttagaaggataaaatgtaaccgatgtttggcgtccgctgtaccag

SEQ ID NO: 175423 - DNA, 146 bp, Arabidopsis thaliana landsberg
gacccgtttctgcagatatgcatgactccgtggtgaagaacccatcagcaataggagaaatgaacgacgataacaatgggtcagcagctacattggatgatgaggaagacgatactatacacgaagatcctccaaagaggctctga

SEQ ID NO: 175424 - DNA, 335 bp, Arabidopsis thaliana landsberg
gcggtggaacccagcacatcgtcgaccacccgttgtgggtacgcgacgccgaagaccggccgctggacttcgcggcattggcatgtctgtcggacgtgttcttccctcgggtgttcttgcgcagcggccgcttcctgccagccggcactatctccctgaccacttacttccacgccgaccagagcgaaatcgatgcgctcggaagcgatttcctgctcgccagcgcgcacgccaatcgcttctcgcgtggatacttcgatcagagtgcacacctgtggtcgcgggcgggccagctgctggccagcacgcatcagctggtgtatttcaaggactga

SEQ ID NO: 175425 - DNA, 302 bp, Arabidopsis thaliana landsberg
gcggctacacaattccaaatgattctgaggttttcatcaatgtgtgggcgattcatagaaatccgaacgtatgggagaatccgttggagtgtaatcctgataggcttcttgataaaggttacgactttagtggtaatgactatagttatttcccgtttggatctggccggagaatttgtgcgggaatggccatggccgagaaagttgttctttacaatcttgcaacgcttttgcattcttttgattggagaattggggaaggagagaaagtggagctcgaggagaagtttgggattttatga

SEQ ID NO: 175426 - DNA, 136 bp, Arabidopsis thaliana landsberg
aaagcgaaacagagcggaaaaggcagatgtgaggaagaagatgagcttcgagaaggtaaaaatctccacgaaaccctaagtttcttcatgattctaattgatagtttatccgcattacttgatgatgtaggaagag

SEQ ID NO: 175427 - DNA, 252 bp, Arabidopsis thaliana landsberg
gatgcatttgaagattatggagcattctggagcaaaatagacaacttaacctgcaacagcaatccagagacgaaaattgacgtaggtgtcgatcgacacaacccctggtgtcgagcgacaccaatacctgacggcaattcaattgcgcaatttattgatgtttctaaatttggcccagaacttttccttatttctaagaaggcccatcaaggaatgggaactaatctattgttttttatgggcattgcttag

SEQ ID NO: 175428 - DNA, 134 bp, Arabidopsis thaliana landsberg
gtgtgttggaaatttgagggcaaaaagtacgatcttgcaaagaagtttggtacagtagtagtgaatcatcgatgggtgcaagaatgtgtaaaggaagggagcagagtttccgagacgccttatatgtttcatag

SEQ ID NO: 175429 - DNA, 63 bp, Arabidopsis thaliana landsberg
atgggcgcggtggcggcatcggtcctgcggcgagactcgccgaagacgaggaggctggccacg

SEQ ID NO: 175430 - DNA, 307 bp, Arabidopsis thaliana landsberg
gtattatcaaactaattggctgagtgaaaagagtgatgtttatagttttggaattgtattactggagatcataacaaactgccctataatccagcatacgcgtgaaaaaactcacatagtcgaatggattgcgcttatgcttcaaaaaggagatattagaaatataattgatccaacccttcaacaagattatgacagcacttcagtctggaaggcgcttgaattagccatgtcttgtgttaatccttcttcagcaaaaagaccaaacatgtctcgagtcgtaaatgacctcaaaagattgtcttaa

SEQ ID NO: 175431 - DNA, 285 bp, Arabidopsis thaliana landsberg
ctcctctatcacctccgccacgtcaccacttgttgtgaactgagccggacccgaaactttacccggatcaccagtggatttggtcactttagcatctgcgccgtccacgtgttcgattcctattttattcatcaccaaaaaagggaatctcctcaacgaaatagcagccgttggatcgaaatcgcgtctgatctccgtaggaaccctaacgccccaccggaaattcaaaacggcgcgtcctctcacaggcagagacgtcctcgccgcaacctcaacgccagataa

SEQ ID NO: 175432 - DNA, 205 bp, Arabidopsis thaliana landsberg
gaacaatatgaaaaccagcaaccccgccagtattcccggaaatggccctgcaaaaagggtgataatgcgctgttgtcgcgaaacgacctttggctcgcccgaaacaaaggcgcccaaaaaagggataaaaaaaagccgcacatctttgtaaccaaaacttttcatggcaataaaatggccggcttcatgcaaaagaatgacgcag

SEQ ID NO: 175433 - DNA, 146 bp, Arabidopsis thaliana landsberg
aggggacagggggcaatcttgaaggccgattggactgcagggccgaggctggaccaaatggggatcaacctgatctaactgaagcttttggtctccatgtttgccgaaagttccctctcattgcatttccatcttccgttatttaa

SEQ ID NO: 175434 - DNA, 425 bp, Arabidopsis thaliana landsberg
  unsure (1)..(425): unsure at all n locations
atgaactcctgcaacccgtggtcgccgccgcgctcgcgacgatnganagtgttggaaaaagagaacgtccacgagaagctgttccgccaggggcagcgcctgatggaagggctgcgcgaagcggccaagaagcacaatgtgccgctgctggtgcaggggatgggaccgatgttccatgccggcttcaccaccgccgagaaagtcaccgactatcgcggcacgctttcctacgataaggccaaatacgccaagttcgttttcgccatgcaggagcgcggtatccgccttatcggtcgcggcctgtggtacatctccggcgcgcataccgatgaagaaatcgaacattgtattcgcgtcgccgacgaagtcctcccggaactgacgctaacaggaaccgagctaaaaaatgtcttacaccgccaaac

SEQ ID NO: 175435 - DNA, 135 bp, Arabidopsis thaliana landsberg
gaatgggactccgacgagagctccactgactcctcttccgacgaggacgccgccaacatcgccatcaacaagggcctcctcttccccaacgtcggccacaagtgcatcatggctaaggacgacaagaaaaagaag

SEQ ID NO: 175436 - DNA, 581 bp, Arabidopsis thaliana landsberg
agcaagctacaaaaaacgacaatgttgaagaagattcttcaggactctaaagaaagtgttggagaatcagacatcagaagcaaaatgaataacctcaaggagcagctcaccaacacagtgaatcatctacactcggtttgtgagacgcatgtcttcatcgcattgtctagaggatattgggatcgtatgggacaggtaactatttttaatggcctctcctctcctgacattttgttttgcgttgttggagagctaattattcttgtgtgcgtgatagattgttttaagctttttggagaacaggaaagagaacagagcttggtacaagggttctagagttgctgtctcggtaagtcccaataaaaaaactgctcttacttagattgtatgagtcacctgatcttacatggaatgatgcgtattttcagatattagacgatacatttgcagcacagatgcaacagctgcttggcaactcgctaagagagcaagacctggagcctccgagatcgatcatggaggtccggtcaattctttgcaaggaccctgcagataataaagccaaatcgttctactactga

SEQ ID NO: 175437 - DNA, 411 bp, Arabidopsis thaliana landsberg
ttggtttaagtggttctttatttgaatctctcaacgatgatggaattgatcattatggtgaattatcccaacaagagaatgctttagaggctgctggattcactgatgattatgctgaaagccaacagtcccaatttagttttggtggagctgtggcctttgctggtggaagtgctgatgaattggctgaagatgaagattcccaaaaagatgattctattgctgctggagttttctctgaagttaatgctgatgttgattcttctgaagctgctgaagccttttcttctgcttcttctgatgctgatttggatgcttctattgaagaattcttaaaggctgatttaagtgcccaactaggagctgaagccttctcttctgtttctgctgatgaagattctactacaacta

SEQ ID NO: 175438 - DNA, 122 bp, Arabidopsis thaliana landsberg
agtgctgtgttgaatacacacgtgtctattctacagcggccactaacactcgcgagggtgattctcatacgttggagtttcaaagcacctgtccaggggagcttagtcggatccataactga

SEQ ID NO: 175439 - DNA, 146 bp, Arabidopsis thaliana landsberg
taatgtatcgacaatatgactatgtctatgtcgatataaataaaggtttcataccgatttccccaacgagaatggagttcaaggatgataaattgttcttgaagggatatgtctccacggcggatatccggccggagataatttag

SEQ ID NO: 175440 - DNA, 185 bp, Arabidopsis thaliana landsberg
atgaatacgaggtcgaacgtatactcaaacacaagaagctgcctgataaatcgatacgcttcctagtgaaatgggccggttatcccaagtctaagagcacatggcaaacactcgatgatctccgtaatgctcaagagtgtcttcaagagtaccgtaagacgcttcgcaagccggacctcttctaa

SEQ ID NO: 175441 - DNA, 321 bp, Arabidopsis thaliana landsberg
cgttccatcatcgacaacgtgatactcaccgaccgtgagtccatctggcccctggcaatcgggctgctgatcgccgcggccgcgaactacggcggcacttacagccggcgctaccgcggcggccagctggcgctcgacgtgcagcacgaactgcgcaccgagctgttcgactccctgaccaggctggacgggagcaggcaggacgagatccacaccggccagctggtcggtcggtcgatctccgacatcaacatggtgcagcagctggtgcagtggctgcccctcaccctcagcagcgtgctcctgttcgacttctcgatg

SEQ ID NO: 175442 - DNA, 162 bp, Arabidopsis thaliana landsberg
atggccggtggtgtagacacatcccacgaggccacgattgccgtcagtgaaggtttgcgcaaaattttgcttgaggccatccgcgcccaagacaccaagggcaaattgaaagccctgatgaaaattcgccccaagcccctggcgccacttccccagcctacg

SEQ ID NO: 175443 - DNA, 297 bp, Arabidopsis thaliana landsberg
gaagtggaagaatggctcaaccgctgggacaacgcatataacgagcttcttgaagccgggtttgaggatccaaaggaggcaagcctatggttcgccgacttcacgcaggccctaagccgaagctgctacgaaacttggatctactcatatcattcctcccacttgacggaaatgagaaagaacacccttacaccatcggaggtcctccttgacaagcgattcttcttgactagcgttgcaaatgatcagacgataactcgtgaaaaggccacgaaaggagcctttggccatacctga

SEQ ID NO: 175444 - DNA, 104 bp, Arabidopsis thaliana landsberg
gctgtgtgtatttgatggttcagcttttggagattttgtatcctctacaaaatccccgccctctcgtgataaagagtgtcagcccaggaaaagaaacaatatct

SEQ ID NO: 175445 - DNA, 444 bp, Arabidopsis thaliana landsberg
atgtctaccggagaagaaggtcacatggcgatggcagatagaggctctagaaagagaagagtcggcgttaagaaaggtactaaagcggcgaggaacaaaaagcaaaaatcaaaaccttctacttccgataggtttaaggttacaatgaagaatcaaaagctatttcagaagagagcacgagattacaattccgatgacgatgaagaagaagatgatgaatcgaagaaacaaccagaagtaacaattcgtgagaagatcttctctgatgctaacatgggaccaaattacgaagagattgaagaagaagataatgatgagaattcagatggtgaagatcatggagagattgaatctggaatcactaagtttgctactgatggatgtaatgctttcaaaatcgcttttaaagctattatgaagaagactaaagaaaatgatacattg

SEQ ID NO: 175446 - DNA, 266 bp, Arabidopsis thaliana landsberg
gtaaatggccagggatttttacatgcccaaggaaagaagatcgtggatggaaacgggcaagagattttgttaaaaggcatcggcctgggcggctggatgctgcaggagccttatatgctgaagctatcgggggtggcagttaaccagcatgatattagggcaaagatcgctgcgctcatcggccctgaaaaaacaaaatccttttatcatgaatggctgaaagacggcatgcaaaaatcagatgtggattcgctgaaagcctgggg

SEQ ID NO: 175447 - DNA, 553 bp, Arabidopsis thaliana landsberg
aaaacctttaagcagctctatcgatgacatcaacgcaacaaaaacgatgaagaaacctcatttcttgaagaatccagtgtttttcctacttctactcatcactgtttcttccctaactatactaatcttctcctttctcaaattaccggaaacacctctcgccgccggtaaccatctccgcaaactccgttacgagctcaccgatgaactcggtttattcgggaagatgatgatcgaaatgctaccagaagatctggttttcactgccttcgtaccgtcggaaaaatcattcagccgagatctagggctgaaattaaacactagccgtccaattaaatcccacgaagaagacgacgacggagataacacatacgccgtcgtatcgaggatcatgagtttcgcggtggttccttacaaagtagaagaagtagacaaagggaacgacgaaacggcgtcgtatgagtcgttgagtggtttcacacttcagattcggagaaaaagaaatggtggtggattagtcgttatggcgttgagactgagaagatgggattaa

SEQ ID NO: 175448 - DNA, 74 bp, Arabidopsis thaliana landsberg
atgactctcttggacagttcgatactggctcagcatgaccgctggcagcatgcgtaccacatgctagtcgcacg

SEQ ID NO: 175449 - DNA, 586 bp, Arabidopsis thaliana landsberg
gttcccgctcttttttatcgatcgaggcgccaaaacacaaagaatcgattatttgttgtcatctttcagattgtcaattcaaagaagacgatcagatctaattgactcgagagagagagacgtatgtttgggaggctgagaccaccgccgtcgccgccggattgtctggagagatatccggcgaagatcatcaaagacgatcctctctcggtctacggtataataaatacacactctttccattttcatgtgattctgattgtccaatagaaatctctaggttttgaaatccttggtttcttttaatggcattgtagagtcaacactgttgaaacttaagcaagggtcaacaagacaggacactacttcatcagaaacagaaggtgaagagaatctgtcatcaacatcatcgtctcatgtcttgtcttcggatacacaattaggagacactcatgatgcaatggctatagactcgtgtgaaagctcgaaacagataaagagcaagaacccatcagtactatccatgtttagcaagtacaagaatcaagctcaagcacgaaacatgaagacagagactcaggaatga

SEQ ID NO: 175450 - DNA, 774 bp, Arabidopsis thaliana landsberg
atgaaaactcaactcgactccagttctagcgcatcggtggctgtgaccgtgacatcacatcatcacagtttttctgaaagagctgaatgtaggttttttatgaacactggaacttgtaaatatggtgatgattgcaaatacagtcatccgaaagaaagattgttacaatcaccaccaactctcttgaaccctattgttcttccagcaagaccagtaagtctcttgtccttctttgttattttttgccaacttgacatttccgcaactcgttctgtttattctgttaaagccaacaagctttggtgacactaatttctctcattttgctgtgttcagggacagccagcatgtggtaacttcaaggcctacggattttgcaagtttggagcaaactgcaaatttgatcactcaatgctgctaaacccttataacaatacgggcttggccatgtcttctctgcctactccttatccttatgctccacctgtttcaactaatttgaggatctcatcgccaccaagcccctctgatatgactaccctatccaatggtaaacccgctgctgcagaagctcaaagcttggagactgagaaacaagacgatagtccaacagaaccagaaaaatcagaagtggaggactcattgccaccaaacggctctgattcaacctccctgcccaatgataaacctgatgcagagactgagaaacaagacgatgattctgcagaactggacagctcaaaagtgcaggattcatctgataaatctacatga

SEQ ID NO: 175451 - DNA, 1093 bp, Arabidopsis thaliana landsberg
ggaatatctgttcaacgatcagatttggtgggtctgattattcgtcgcaatgaacttgcaaatgacattcttgtggcgtcaacaacccagcaactgccgccgatgttacgggtatgctctgatgtccagcgatgacaatttctcttgggaatattagataattaaattatttattattttgatgctagaacccaaacatatgccggaactgtcgccatctggatgtttgcacaatttatcataaggtattttctcgtttctatgattaataatgctcgaagtcaaatatttacattttagggtattaggttctacatgtttaagcatatggggttaacattttaatatgcatgttatgatctgacttgatggatgtattccactcgctaaataagtaatcaaccgttgatttaaatcacattcttgatactagtcacctgaaactgaatttccattttgttatttgttgcggtatattatagtaagctttttcttagtcatagttattttgcatgtaattcctgagagtacactacatttttcaagcatttttggggaggtgttgaacgttcatcttcatggtattgaaccgtcatcttttgaagcttctaaaacatcttgtctgcttgccccaggcagatggtggaaacacagagagtagcggacttggtgatgtctttgacacacatgtttctcatctatcaactttacatttcaatttcctccgacactgggacaggctaattgacttggaaggtagagagatgcaggtcagccttgaatacaaagttgattgtttactggagtacaaagttaaggatttttccttacttggcgatcttatgtctatgtttgttttcagcttctacggaaagatattgcgcatccacatggttcaaagggcagccactcagctagttatctttcttcaatggttcttgacgtgacaaatgggtttcagcatcataactctcataaagaaactagattcatctatcgttttgtacgtcaaaaatcatctgaatctagagaaagagtaaccagtgaagatatgattaggactggaaaccttgcaactgatgacctggattga

SEQ ID NO: 175452 - DNA, 440 bp, Arabidopsis thaliana landsberg
ggatgggattcccggggtgaggccaccgttgatcgtcgccttgctccattttacgaagaccgattcgttgaaaatgagtggaagacgatcacctctttcttggtccgtaaggcaactgactcagtcagagcaacaaagcatgaatacggcatattgtttatggatcggaccgtcgtcgttgaggccccaccgagatcaccaccagttccagatttcgatttcactcccttcgactacattttggaaaaatctgcttacaagaacgttttagtcggtgaggaggaatactcccgatgcttcatttattacatttttgaaattttttgattattatctttgtttctccatcatctagatgtcgctggagcgatggttgatgttggcggattaactacagactattacggtctcaaaatgagtttcaagataaaagatagata

SEQ ID NO: 175453 - DNA, 73 bp, Arabidopsis thaliana landsberg
atgaagattggggtatgtgatgcaaacatcaaggatattcgaaaaaagttggcacgcgatatgttcatggaag

SEQ ID NO: 175454 - DNA, 177 bp, Arabidopsis thaliana landsberg
tctctatctggatcaaaacgagagcatcatttccttgtcaatgtcgaactcaacgccctgcatcactccctttccggtcaccaagactccgtagcggcaccagccacggtggtggagggtgtcaacgacgcgaattcaacgcccatctctccctttccggtcaccaagactgcgtag

SEQ ID NO: 175455 - DNA, 150 bp, Arabidopsis thaliana landsberg
atgcagttcaagctcttcgttgcccctctccttgtcgccctggccatggctgctccctctttcgaggacggccatctcgccaagcgtacctgcggcacccttaccggcgagaagctgaagatctgccaggaagcttgcaaggccatttgc

SEQ ID NO: 175456 - DNA, 105 bp, Arabidopsis thaliana landsberg
gatgataacaaaactcgccgaattgcaattgatacccaatttttccgatatgggataatgcgacagtggaatcagactccagtgaaaatagacttcaccagttga

SEQ ID NO: 175457 - DNA, 237 bp, Arabidopsis thaliana landsberg
acagagatgcgagcttacattccgaatggagctttcgggaacacaggagatgtaaagatggggagatttgaaagcttcttgtctaggacaggaagtaatagcagtttggatgctcatgtgctgaagacaattgttctcgtggctacaaaagcgttgtgcaatgaggaactgatgctgaattacaggctgagcaattccgagaaaagactcgagtggtatattccacttgatgaataa

SEQ ID NO: 175458 - DNA, 69 bp, Arabidopsis thaliana landsberg
gtccgtgacaatgaaagcaaatggctaaaggagaagcgaaatttagatgggagtctggcgggaatttaa

SEQ ID NO: 175459 - DNA, 159 bp, Arabidopsis thaliana landsberg
gcatattaccgcattaagtattcgtttttgcggaccggattggatgcgatacatatttggaatcttaggtccatgactgatgactacgactcgtttttattaagtacgcatcatcggaagagattcggatccaccgaatatcgatgtcgtcgaagatag

SEQ ID NO: 175460 - DNA, 629 bp, Arabidopsis thaliana landsberg
gaaaatggtgttgtggaatttgtcgccgagagattgacagtgattatggggcatacagttgcaatgtgtgtaaggactacgctgttcacacaagatgtgcattgcgtaaggatatatgggatggcattgaactcgaaggagtaccagaagacaaagatgttgagcttccgttctacaggatagctgatggaatcatacttcacttttctcatggttgtcatatgaaatttgaaaccaatggagtttacaaagaaaacgagttttgtcaagcttgtgtccttccaatcaacgaggaaaacttttatgtctgtgtgaaatgtgactttattctacatgaaaaatgtgcggatgccccccggaagaaggttcatccattacatccacatccaattgaacaaaaggttgtccatgaaaaccatgaattcgaatgtgctgcttgtatgcgtaagagtagtggttttggatatgtgtgtaccatcaatggttgtgactacgagctagatgcagtgtgtgcttcggcttctgagccatttaattatcaagtccatccacaccctttatttctggctttagacccaaagaaacgacagtatgccacatttgcaagtcaacaggagttcaaaaggtag

SEQ ID NO: 175461 - DNA, 150 bp, Arabidopsis thaliana landsberg
  unsure (1)..(150): unsure at all n locations
atgcccccgatcgtgaccctgatcccaggcnnnnnnnnnnnnnnnnnnnnnnnnntgtcccagataaagatcaaccgattccgggagtcgctatacggactcacatgtcgacaagctagcttcgttcaacatctaaaaaaagaattagtg

SEQ ID NO: 175462 - DNA, 418 bp, Arabidopsis thaliana landsberg
atgttaattacggacgactcgcagcgcagccgccaccgtcgtgacacagcaggtgcactcctcggtccacgcacgtgagcttacacgccctcgctgtcgggacaagaccattaattaattcaaattagcaaatgcatctcttagtttggtaacggcaattgttatagtatttaaactgaaatcataaatgaaccaaaagcttagacctctcaactaaattttgcaaagagcagaaataaactctttctaaaaagcatttgtgttttttaaccaaaagcaaaaccaccgtcgtcgatgaccaggatacggaggtctccgtgtctactactcctcattatctggttcatgtgtattgccggttcggttcaggtggttcaatctcaaaaccaaaccggagccactactcatcccgacgaag

SEQ ID NO: 175463 - DNA, 55 bp, Arabidopsis thaliana landsberg
atgatcggggttaagcgatatgcctcacttgtgggatgtctgggtgcaccgggag

SEQ ID NO: 175464 - DNA, 166 bp, Arabidopsis thaliana landsberg
atgctcaccgtagaggatgtgagtgcgaaattacaggtttttcagtggatggtacatcaactcatgcgaagcggtcgattggcaagtgtgaagattggtgcgcgacgtttgattccccgacattcgttggatgcctacgagaaacagcttgaagataatgaggaag

SEQ ID NO: 175465 - DNA, 204 bp, Arabidopsis thaliana landsberg
ttccttcgtgctccttctctcccaccgccatttctgattcctttacactactactttgaaaatcaaactacagaatctatcgttgatgatgaagttagaattcttcgtaaggattcgcctacttgccgcctgatctgggattcgttggagaaggaggaggagacttcttcgaatatcgtgaaggagaggccaaaatatgtgtga

SEQ ID NO: 175466 - DNA, 694 bp, Arabidopsis thaliana landsberg
atgatccatacacaaaccgggtcgagtcgtcggattctgacctttccggcggtgaatccatgcgaatcgatctctttaaccactctcgtcgactcacttttacaaatagccggcgagattcttagcttcaaaccaaaacacttctctaccaacaaaagaagtgttaaagaaactctccgacatgttcaaactcttgtgatattctttgaagagctccggattcaaatccgggtcgggtcaataccggcgggtcgttcagtaatcttgagcctttcagagcttcacgtcatcttccagaaactcaaattcctactagacgactgtacaagagatggagctaagctatatatgttaatgaactccggtcaagtctcggctcatttccgtgctttgacccgatccatatccactagcctcgacacgtttccagtcaggtctgttgacttacctggagaagtcaatgagctaatctatctagtaatgcgtcagactcgaaaaaccgaggcaagacccgaccgagacgacaaacgagctatagactctgtttattggttctttaatctgttcgagaacagaattaatccgaactcggatgaaattctccgagttcttgatcacattggtgtaagaaaatggagagattgtgtcaaagagatcgattttttacgagaagagatctccgtggagaagaaga

SEQ ID NO: 175467 - DNA, 111 bp, Arabidopsis thaliana landsberg
atgccttgtctttacattacaacaaacgtcaattttgacggcgttaacaccgatccgttatactccgaagtcaccaaagccgtcgcttccatcgtcggacgacctcaaaac

SEQ ID NO: 175468 - DNA, 421 bp, Arabidopsis thaliana landsberg
tgctgcggtgaactcagtgactggagagaaagtggctattaagaagatcggtaatgcttttgataacatcatcgatgctaagagaacgctacgtgaaattaaacttctcaggcatatggatcatgagaacgtaagccttaagcatcatttctcacatttgaaaacatcttttaagtttctcaaatttgctagatctatcaagtgttcctgatcttcagggtcaaatgctctttatatataatttcgcttactctaatcttcaagcctcggtttgattctttaggttataaccatcaaagatattgtaagacctccgcaacgagatatcttcaatgatgtctacattgtctatgagttaatggacactgatcttcagcgaatcctccgttctaaccaaacactgaccagtgatcaatgccgt

SEQ ID NO: 175469 - DNA, 116 bp, Arabidopsis thaliana landsberg
gaaagtcttcagggcttctcaaagacttggtagaaaacgtgaattcccttggcagcaataagagtgtcgatcgacaccagcttctgaaaaacgtccttcaagatctttattgctga

SEQ ID NO: 175470 - DNA, 396 bp, Arabidopsis thaliana landsberg
taatcttgggagtttagcagagattgttaaggatggtactaggaatcatcctcccccaaatcagaaacaaccacaagtgcttcagcaacagttacatctgcagcaacaagcttctctccgattaccgcaacaagtatgtacataatggttgttgttgctcttatcatttggcattgtaattgttcatataaatggattgttattttcatggtttaccttctctgagttcttgattcgatgttattgcagattcagaggcaaatgcatccacagatgcagcaaatggttaatccccaaaattttcagcagcagcaacagctagaaagaatgcgtaggcgtccagttacatcaccgcgacccaacatggatatggaaaaggatcggccgctggttcag

SEQ ID NO: 175471 - DNA, 563 bp, Arabidopsis thaliana landsberg
gatgagtatctcaaagcttactacgccgaacttatgaagctgcaagagcttgctgcaaggcgaaatcaacaagaatccgctggtgaaccaacttctggcattcagtcgggtactgtatactcaggtcgtcaggttagtatgaaggccaaacgtgaagaggatgaagacgaagatgaagaagaagtagaatgggaagaaaaggctcctgttactggtcagtttgagtttatttacttcatttccatttcgcatactcgttgatcaaatgaaacgacacactagttagttagaataaaaggaaccttgtttagtagtatatattgaaatcgcagagcttcaacaagaagaaacttgttaagacatgctcataattaagttagattacacaggtctgtcatggttatatgatgtaaaaagattatgatatgctcgatttggtaacttaacattttacgactcttgcagctaatggaaactataaggtggacttgaatgtggaagcagaagcttcgggtggtgaagaagaagaagaggaagacgacgtcgattgggaagaaggctga

SEQ ID NO: 175472 - DNA, 243 bp, Arabidopsis thaliana landsberg
  unsure (1)..(243): unsure at all n locations
gacatcgcccggaccgtggacagcagcaaacagaagcccggcgatgaaggtgaaatggtcgacgtaaaannnnnnnnnnnnnnnnnnccccggccagtgcgacggtccatgaaaggcgaaggcgaggaagagcacataggcggcggcaagcaccgccgcttccgaaaaccacgctcccgtcaagaatgccaatacgagcgccacttcgaagagagcggctgtccacgccatcggcagggctag

SEQ ID NO: 175473 - DNA, 823 bp, Arabidopsis thaliana landsberg
atgagcaatcccacagcggctgcaatcacgcatgtcctgcacaacaagcaggagtttccgtttgtgcgaggtgttgaggatttgcttgtgttgtctcttggtatgggtcagttgcttgatgttagctatgagtatgatcggattatcaagtggaaggctaagcattgggctcgccccgcagctcttatttctaatgacggtgctgctgacactgtcgatcaagctgtggccatggcttttggtcactgccgcagtagtaactatgtccggattcaggtatgggccacactgcagaattgcatttgataacttcaaaaattatttttgattttcttgaatacctagtatttctttcgatttaatgaaatttgtgataggtaataatcttcgtgttatataagttcatttccaaatcctacttgttgtatatgagcttagtaggattgttggatgatataaagtatgcacttgtaggtttttcacaaataatagtaatatgtttgtgcaggcgaatgggtcgaacttaggaccttggagtcctaacatggacacagaccctagtgggagcaatgtgaatatgctgatgggagtagcagaggagatgcttaaacaaaagaatgttgaatctgttttgtttggaggtaaaagaatcgatgaacagagcaacttcgagaagcttgactggttagctggggaacttgttctcgagcatcaaaggagaaatagcagaatcgctccaaccgtagcgttcaagcaatccgtgcatagagcagatcaaaagacaagtgataaagatatcggtgtgaccgcaagagaacgatga

SEQ ID NO: 175474 - DNA, 123 bp, Arabidopsis thaliana landsberg
atggaggagaaaaactacgacgacggagacacggtgacggttgatgatgattatcagatgggatgcacgacgcctacacgtgatgattgccggataccagcatatccgccttgtccacccccg

SEQ ID NO: 175475 - DNA, 498 bp, Arabidopsis thaliana landsberg
atgcgcctgaagaaacgcgccaccgccgcggtggtgggattgagcctgctcgccctgtcgggttgctcgctgaacaagttcatgagcgaccaggaatccgtgaactacaagagcacggtctccggcgaacctctcagcatcccgccggatctcacgcaggccaacagtgatccgcattaccgggctcctgcgggcaccgccacgtacagcaagtaccagcaaggccaggccgcccgcgacgccaagggcccggatgacagcatcctgccggtcacgccgggcatgcaagtcatgcgcgacggcgacatccactggctggtggtggacaaacccgcccaggatctctaccccaaggtcgtcgaattctggggggaccagggtttcaccatccactcgcaagaccccaaggccgggcttatccagacggactgggccgagaataaagccaagattcccgaaggctggatccgctcggcgctcggcgggctgctggaccag

SEQ ID NO: 175476 - DNA, 215 bp, Arabidopsis thaliana landsberg
gtttgtacgctttgttagtaccccagaggttctggaattggttagcgctttggatgtggaaatgtctcagttggaggctgctcggaaaatatatggcgaggtacttcactttttttaagtccaagtaaagcagatcctgtgttagtgggatgtttttattgattttgatattatctttctataggggactagtgatcagcgatctagtgcaaaag

SEQ ID NO: 175477 - DNA, 1158 bp, Arabidopsis thaliana landsberg
atgaacgattgggctagtttgggaataggttctattgggggagctgtgttttccaagctcctgaaagttgtgattgatgaagcaaaaaagttcaaagctttcaaacccttgtccaaggatctcgtatcaacaatggagatattgtttccgttaactcaaaagattgattcgatgcaaaaagagcttgactttggtgtaaaggaactaaaggaacttagggatacgatcgaaagagctgatgtagctgttagaaagtttccaagagtcaagtggtacgagaaatctaaatatactagaaaaattgagagaatcaataaggatatgcttaagttctgtcagattgatcttcagcttcttcagcataggaatcagttgacgttgttgggtttgacgggaaaccttgtgaattcggttgatggtttaagtaaaagaatggaccttttgagtgttcctgcgcctgtttttagggatctttgttcggttcccaagcttgataaggttattgttggattggattggccattgggggagttaaagaagagactccttgacgattctgtggttactcttgtggtttctgctcctcctggttgcgggaaaaccacgctggttagtcggctttgtgacgatccagatatcaaaggtatgtattgttgatccacattaagtcttaaagtttcaatttttactcgtgaatagttgagctggtttctcatgtagtttcctttggcagggaagttcaagcatatcttctttaatgttgtgtcaaatactcctaacttcagggtaatagtacagaatttactccagcacaacggttacaatgcacttacatttgagaatgattctcaagcagaagttggcttaagaaaactgctggaggaacttaaagaaaatggtcctatattgttggtgttggatgatgtgtggcggggagcggattctttccttcagaaatttcaaattaagttaccaaattataagattttggtgacttctcggtttgactttccgagttttgattccaattatcgtttgaaacctttggaagatgatgatgctagagcccttctcattcattgggcatcgcgaccttgtaacacgtctcctgatgagtacgaagatctcctccagaaggttgttgtttcattcatctag

SEQ ID NO: 175478 - DNA, 162 bp, Arabidopsis thaliana landsberg
atgagattgcttggtgaagactgtctcattaatttcgacacaacggctcttgttgctctcgtttccggaatcagtaatgggtgtgcagagagactcgtggatatccctgagatcgaattagaagaaaagtttaagggcaataccgtttttgtgattgctcag

SEQ ID NO: 175479 - DNA, 264 bp, Arabidopsis thaliana landsberg
  unsure (1)..(264): unsure at all n locations
atgtcgtcgattccgccgccggcggcggnattgtcggccgccattgtcgttgtcgcgcggcggtggaaggagtatcatgtcgtagctgccgtcgaaggacatgaactcaagactcccgaaacggagcaccgtcccgggccggagaggttgctggagactgcccatctggagcttgacgggaagctgttcgtcagcacgcagcaggcccctacctggcgcgccaactgtcggcgtttcgagaccggggggtccctgagccgacga

SEQ ID NO: 175480 - DNA, 211 bp, Arabidopsis thaliana landsberg
atgaagacaccggtggatagtaccgagccaaatggccgaccagttggaagactgaaaggttttatggttaggattgatgaaaaaaaggagaagctagttcagagcccgctgaagctgaccttcgggtttactagacctcagtgcaacatgacaccagggacatcatgcccaaatgctgtggacgaatttagagttgtgtctgaacatattg

SEQ ID NO: 175481 - DNA, 526 bp, Arabidopsis thaliana landsberg
aatcctcgtgaagaagaagaagttacacgcgaaactcgaagttaccatagtatcattcaccagaactcgttaatcggtgcctcctcgacagctttctctcgcaatcgctctgttttccaatctccagcgacaatttcatcggatcgattcatttcgactttcaatttctctggttccggtgacgctgtcatcgattggttgttgcaatctgtggtttcgaggagttatgagttacataatgttgctgatgttcttgtttctcttaaccatttgcttgcattgatgaattctttcacattttctcaatggtaaggtttcacaatattacgtagatgattcataagaaacatgtttgatacgcttagattgagtatccttgctttgttcttgcaggtgggtgtttatcatcgtagcatcgcttttgattcgaggaatcacagttccggatatggatgatatgcttaacaacattggaaagttttttaaggaaaagtttcttcctttatgtaatgcttcacagagatag

SEQ ID NO: 175482 - DNA, 314 bp, Arabidopsis thaliana landsberg
atgacagggcagcgtgcattgcgcgtaaaagttcttacaaaactggtatcagaggcttggtatcggcattccggtcgaagacaaagggttcaaagtttgggagtaagccgtttggtggcgatagagacttctcgttgtgaaagatgatagtagaagatcagatgggagaacagggcttgaagaacagccgtttggactgtacgtggacggaagctgttcctgtggtaaagaaagaagataaagaatcagaatctgatgatgatgcgtctgactcaaagaagacgatcataagaaccagatccgatcagacttga

SEQ ID NO: 175483 - DNA, 592 bp, Arabidopsis thaliana landsberg
atggtgtgcgttgatgagacttgtccatggcatttgactgctcgcgtcgtgaaggattcagaaagtttcaaaatcactttgtatgctacgacacatacgtgtaacatcgactctcggaagaactacaataaacatgctaattataagctcctcggagaagttgtgaggagcagatacaattctacgcaggatgggccgcgagctgtcgatttagcacagctgctcctaaatgatctgaatgtgcggatttcatattctaccgcttggagagcaaaagaggttgcagtggaaaatgtaaggggggatgagatagcaaattacaggtttttgccgacctatctgtatcttctccaattagctaatccgggtacaataacacatctacactatacactagaagatgatggtaaacagcgcttcaagtatgtctttgtctctcttggcgcttctatcaaaggtctgatatatatgaggaaggtagttgtggtagatggaacgcaactagtcggaccttacaaaggatgtctccttattgcatatgcccaagatgggaacttccaaatattcccaatagcttttggtgttgttgatg

SEQ ID NO: 175484 - DNA, 514 bp, Arabidopsis thaliana landsberg
ttgcctccaatgaaagagctgaggaaattgatgagaaatcaagcattacgttgcaatgcagtttactgccaaaatggagctaggcttaatgtaatccctgttcttgcatcacgatctcaggcccttaggtaaattttccatcataaaccattatatctacgcatcatcaagttttcactttcttggatttgagctctcactgatcgtagtgcatttgtattcctctgttttcaggtatttgctagtgcgatggggcattgacttatcgaacatggtggtgttcgtgggagattcaggtgacacggattacgaaggcttgcttggaggaattcacaaaacagtgatacttaaaggcttagccagtgacttgcgtgagcaacccggcaacagaagctacccaatggaggatgtgactccactgaacagtcccaacatcaccgaggctaaagaatgtggtcgtgacgccattaaggtcgctctagagaagcttgggatcagtctcctcaagccttga

SEQ ID NO: 175485 - DNA, 78 bp, Arabidopsis thaliana landsberg
atgggtgatgagacgctcggggagcttttttcggaacggatagagatcgtgcagcataagatcaagtttatggataag

SEQ ID NO: 175486 - DNA, 241 bp, Arabidopsis thaliana landsberg
atggctctagtcactaaagaacgtgaaagaaccggtccttggtattttgacagtggatgttctcgtcatatgacaagaacgagagactatctagaagacatcaaagagataaagggaggaaaagtgacttttggtgatggaggacgtggagatattcaaggcaaaggaaaaacaagcgaaatagtcccctcaccttatgaatgtctatctagttcatggtttaaaggcaaatctgataagt

SEQ ID NO: 175487 - DNA, 77 bp, Arabidopsis thaliana landsberg
gtaaattccgcattcgttatatcaaagaaaccgtaatgaaagttaatgcgataaataagattcggattgaagcatag

SEQ ID NO: 175488 - DNA, 206 bp, Arabidopsis thaliana landsberg
tgtatacagtgttgatgatacgtcagtttggacagcaatgccctgaagaagcagaagggtcgatcaggagaagaagctcaccatccgcgcgtatccactcctttctctcctttgtaaaagagaaagaagaagacgccaaggctaggtcctctagggaaaggcagcttgaagatatctctgcaaatggttcaagtcgctgcaactaa

SEQ ID NO: 175489 - DNA, 105 bp, Arabidopsis thaliana landsberg
gctgctgtggaagaaggtattgttgttggcggaggatgtactctgttaagacttgcatcgaaagtgaacgttattaaagagactttagcaaacgatgaagaaaag

SEQ ID NO: 175490 - DNA, 126 bp, Arabidopsis thaliana landsberg
gctactgacagtagcgccatcttgatggccaatgggttaagggatgttgtacatgtaatacgaagagtcgatctgaagttgacctctggaaagactctctttgaagaatgtgtaggacgttcctga

SEQ ID NO: 175491 - DNA, 123 bp, Arabidopsis thaliana landsberg
tatctccttgtccaaacgttccaaatcgataaccgggatattgatatccttgccctggacaataaccggtgttgctggaggattttcgtcgttggttacacgccggaaagccggtggatatga

SEQ ID NO: 175492 - DNA, 90 bp, Arabidopsis thaliana landsberg
gtttctgctgatcacagaggggtttggtatgaatcggatgctaaggagcggcgaaagatgcagactgagacactttctgctgatttttga

SEQ ID NO: 175493 - DNA, 192 bp, Arabidopsis thaliana landsberg
atgaagcaacggattttactaccttttgacattgcttccattatatttccaacacaaaaagtatctgaaaacaatgcaagtgatttcatcaaagctctacgcgtaacttcaaattccaaaagaagcttctcgcgaaaatacctatttatgttatgtttcactttcacacgcaaagtaaaattcgatatttaa

SEQ ID NO: 175494 - DNA, 177 bp, Arabidopsis thaliana landsberg
aaagtcaaggatgaggtacagagaaggaagaagcagtgtaacatatctagcagccataacaacgatcacaacgagttccatgagcgtctaagtccagctcggttttcatgcgtagactctcaacttcaaccaaagttattggtcaatggtcactcttgtgatgatcggtccctgtga

SEQ ID NO: 175495 - DNA, 263 bp, Arabidopsis thaliana landsberg
ggaaatatgtgagtggactaacactggtggtagatgcagaactgtgtcttagcaaacctcgccatttggccaaagaagcggtgaaacaactctctcgtgcagtggcgaagaagtctagggccaagcgaatgattattactatgttttggtgcatattatacaaagaatgtagtattaaaaccaaaaacgtctttggtgctttggtgcatattatacaagaaaattctcaccaaaaacgtctacgaggaagcaaaaacgtctaa

SEQ ID NO: 175496 - DNA, 366 bp, Arabidopsis thaliana landsberg
ccttcgcctttcgacatcgtgcgccggttcggccaggagctgccggccgggggcaagtcgccgggcctgaccctgcgcaccgagaagggacagtctgtcagcgcgcccgcggccggaaccgtcgagtacgccggcgccctgaacgggtggggcgcggtgctgagggtgcgctcgcaaggcgcctatcacatcgtgctcgccgggctcgatcagataacggcgtcgtccggacaatctgtcgcggcgggcgcccccatcggaaagatgcccgatcatgtatccttggagccggaactttatctggaggtccgcgagaactgcgctccgacggatcccgagcactggcttaaacaagagtcgcggtag

SEQ ID NO: 175497 - DNA, 476 bp, Arabidopsis thaliana landsberg
atgcggtcagtccgcgccgccaccgggacaggcccgagcgctgtgagtgggatgacatgagaccggttctccctcagaggggcggagggtgggggagtgcccgcacgttcctgccggggagcaagcgtccggacgcctgccgaagagcatccggtcatgacggtccacggtcaacgtccgagttccgtcgaggcgacggcgatgtgaacacaggcgcctgcgtttgtgaacaccgtggcctacactgcgtcctccctggcctgccgccccggcaccggctcgaagacggcagtgaaaatccacaccgcgcaccggccggggacgaaggcaggaggaagcaggtggcccgctccgacggcagaaccgcggccgaccgtgctgcaagcgaagtccacttgcaggaagcgctgcgcacaggaccgttctccctcgctctgcacaccgcgctggccgcccgcgggctggctctgcaccgg

SEQ ID NO: 175498 - DNA, 627 bp, Arabidopsis thaliana landsberg
gaattgaaaaagaagttaaagaaaacaaagaatccagaagaaatcgacgaattgaagaaccagttaacttacgttgtgagtgatcctttctttacctctcctgttgtaactctctgatcattagtttgtttactcacctttaaatctgttatttgtatatatatcaggagaaaatgttgaagtatgagccatcaacacagaacaaaggagcagcaatactaacagaacacaaaaagaaagaacgagaagccgcaaaagaaggaaaaaggccttactatctcaaaaaatgtatgtctcctgagtcttttactcaaaagtcccacgtttaggttgaacattacagttttgcgtttctctttttctacaatttactgaatccttttctcttttcttatgcagcggaaatccgaaagcaaacactcatcgaaaagtacaacagtctcaaggtatataaatcagttttgactaccaatatgtaaaatgtttgtatgaaaacagaatcactgaatcagttctttttgaacaatccaggaatctgggaagcttacatcgtatcttgacaaacggaggaagaagaatgcaacaaaggatcataggttcatgccctatcgtcgagcagaggaatag

SEQ ID NO: 175499 - DNA, 232 bp, Arabidopsis thaliana landsberg
atggcgactgttcatgctgcattacatgcggcggatgcttcttcttcgggatcgagttctccagtgacggcgtcgttatatgtcggagacttacacccttccgtcaccgaaggtatactctacgacgcgttcgccgagttcaagagcttaacttctgttcgcctttggaaagacccttcgtctggtcgctctctttgttatggctacgctaactttttttcgcgtcaagacg

SEQ ID NO: 175500 - DNA, 317 bp, Arabidopsis thaliana landsberg
aggccacagttcttgtcaacttggggcaatctccattttattacggcccggcaaacgggcagcggacatcaaacccatgtgctggtgctgtagccgggctcgaggacagcaaagagctcttctccattggaagaatagattctcactatttaagtaattttttcattaaccgaggaaatagtgacgagattgcaagcgggagggccaccgtgggaaatagtcatagacgtaagcttgactatgacgaagaatccgatgctgatctttttgagattgcgcttgaacggtctggaaaactaaatccgtccaagttataa

SEQ ID NO: 175501 - DNA, 270 bp, Arabidopsis thaliana landsberg
atggagcagaagttgacaagctatccaaaagaaaagatcaatatcctcttactggaaaacatcagtgatgctgctgtagccgagtttaagaatgcgggctattccaatacccgccggcttacgaaggcattgagtgaggaagagctgatcgaagaaattaaggatgtgcatttactgggtatccggtccaaaacacagattacggctaaagtgctggctgccgccaaaaagctgcaggccatcggctgtttctgtatcggcactaaccag

SEQ ID NO: 175502 - DNA, 273 bp, Arabidopsis thaliana landsberg
agtattctgcctgagaaattcatcaaagggttagctacagcgagtttgcaaggacgagcacaggtcgtccctgatcaatatactgaatctcggacttcaggagatctagtattttatctggatggagctcacagtccagaaagcatggaagcatgcgccaaatggttttcggttgcggttaagggagacaaccagtcagggagttcaggacatttggttaatggctctgcaggatcctctcatgataaatggtcaaatgaaacctgtgaacag

SEQ ID NO: 175503 - DNA, 381 bp, Arabidopsis thaliana landsberg
atgaagatcctgcatgtgctgcaggagaaccatccggacctgccggtcatcgtgcgcacggtggacgacaccaatatggaggccttccgcgccgctggcgcgaccgaagtggtgccggaagtgctcgaaggtagcctgatgctggcctcgcatgcgctggtactgctcggcgtaccgctgacgcgcgtcatcaagcgcatccgcagtttccgcgaggagcattacaagatgttccgcggcttcttccacggtgccacggacgccgagcaggaggccctggaaaagagccagccgcgcctgcattcggtggtgatcccggcttcggcctattgcatcggcaagcgcgtcatggacatgggcaagcaaggctatggcgtcgag

SEQ ID NO: 175504 - DNA, 80 bp, Arabidopsis thaliana landsberg
atggcaagcccatcggtccacacagatgtccatgaatcagtaaatagctccaacggatgccgcagcccatgcttcttcag

SEQ ID NO: 175505 - DNA, 42 bp, Arabidopsis thaliana landsberg
atggcagctgctcttcagtcgcttcaacgccctaatttccag

SEQ ID NO: 175506 - DNA, 297 bp, Arabidopsis thaliana landsberg
gttaaaaccaccaagacgcgtgttcaaaagaaagcagtatcaatccaaggtcaggaaactgaagtccctgcccgtgaagcagaacctgcatcaactaagaaacagaagaatggacagaaaccaaaaaggttgttcttttgccaatctttatttcttctttctctgtctcttcttttcgggtttacttaaattgaaaacctttgctcttgtatcaggagactccaacctgcttcttctgtgttattaacaagagaaataaacaccttggaaatagaggatgatatcgccgagccaaag

SEQ ID NO: 175507 - DNA, 384 bp, Arabidopsis thaliana landsberg
gatttcttggagaagaaaagagattattctttcagaagagaaagttctcctgagccaaatgaagatttagttctgtctgatccgtcgtctgatgagcgagactcagatggttcaagagaagattcaccagtgttaggccataacatcagtatgcttcttaattcttatcctagaccatataaaaactggaggatcttattttcttcttaacagaatccatgttttgcttattctattgatcttctgattcaggccccgaagaaagagaaactgccaattggactaatgagagatctatgttaggccctagctcagttaaacggaactctaaccttaagggcattggacgtgtcgtgttaagtcctcccacccctttgtcaaaag

SEQ ID NO: 175508 - DNA, 54 bp, Arabidopsis thaliana landsberg
atgccgcgctactgttactctatatacttatgcattgtcatcattaacgcgtat

SEQ ID NO: 175509 - DNA, 84 bp, Arabidopsis thaliana landsberg
atggtagcgcgtgaacgccgtatgctgtcgttgctcagtttagttcaaaccgattatggtctttgttatattaacacagtgcag

SEQ ID NO: 175510 - DNA, 500 bp, Arabidopsis thaliana landsberg
atggtcggggcccatgacggcttcacgacggcacatgctttgctgccggcagcatcggcgttggagtctcctcgatctgccgccgccacaacatcgggctccacgtcttgcttcgccgcttacaacactgactgctgctcctcgacaagcctctacacgagttgtagccacgatgacaggtggagcccaattacaaatctatatgtgttctatttaaatgtaggctctacttgcgagtgaatatgcaaaaaggaattacatgcagtcttgtttggttttattcaaagttcagaaggttaataatgcaatttgaagtacaaacatgctgctagaattatttacctgatttgtgttctccttgttgatacattctttataaatgtagaccggaagtgtaaccggaattgccctgggtgtggctctattcttttcagtctacatgttagttgtatttgccatgcagataatgtccatatgtctttctctgcagctgttattga

SEQ ID NO: 175511 - DNA, 195 bp, Arabidopsis thaliana landsberg
gcacagtgcttggtttgtttgaagacagccggtatgagtctgagtcgaagaaaccatcactcaaatctgtagatatcattggctttggctctggacctgaactagagaagaagctcaagtctgctgaacatgtttcttatggcgttattttggggaaagaactcgttaattctccagccaatgttctcactcctg

SEQ ID NO: 175512 - DNA, 380 bp, Arabidopsis thaliana landsberg
tacgacctctacggccgctcctggccggaccgcggcgctgaggtggaggagcgcatcacggccgtgctcgacgcctgggcctccggccgcatcacgcccgcgccgtactcccggccgcacccgttcctcttctacggcggcggctcgccggcggccgcgcgccgggccggccggctggggctcaacttccagccccagcacggcggcggcgagctcaaggagatctacgaggcggcctgccgggaggccgggcgcgagcccggcttcgtgctgcaggcacccgacggcggcccggcgaacgtgttctgcgccgagcgcccggaggagttctgggagcgcgacggcgaccacctgctggcggacgcgatcgcctaccagga

SEQ ID NO: 175513 - DNA, 87 bp, Arabidopsis thaliana landsberg
gcaatcttggctttgaagaaaggtgcacagcttttgaaatgtcgaagaagaggaaacccaaagttttgtccttttaaactctcaatg

SEQ ID NO: 175514 - DNA, 453 bp, Arabidopsis thaliana landsberg
atggttcacaacacacttatcaaaatggcgagacaaagaattcaaaagagcatgaaagaaagtgtgatgaatcagcacatcttcaaggtaaataattttaaattcattcttaaaaaagttagcttattggtaagttcattacaatttatatttaaccatcgtcactttttatttaacgagtttgataagcattttcaaaacctgtccttcatctgccgatgcagatgtggttatgttcatctttgattttattgattgaggattttttcagaatttcgattcatacttgtctgtaatatatcatccatgttgttttgtaatcagttaattcacttattttatttttaacttttattgtaacagataattcacaaaccacccataaaaaaaaggagaagaagaattcaaaagaaaagcatggaataaagcattctgaatcagaacatcttcaag

SEQ ID NO: 175515 - DNA, 185 bp, Arabidopsis thaliana landsberg
acaacaaccaccaaaaaagggggaacataaagacaacataccggcggcgccaccagccacgaaacacggcaaccaaaaaaaaaaaaaacaagaccaagaaccgggaggcggcggccacaacaacgacagaagaaaaccgcaggacgaaaaaaaagaagcggcagccgccagaaccgccaaactag

SEQ ID NO: 175516 - DNA, 129 bp, Arabidopsis thaliana landsberg
atggaagaaatcggcgatccgcagacaggtccaattctgattctggaagacaaccagagagcaatcgcaatcgtcaacaatcctgagtcccacgacaagaccaagcacattgccattcgccatcactat

SEQ ID NO: 175517 - DNA, 455 bp, Arabidopsis thaliana landsberg
ttacacagttgaagcaaatggtcctattaaggacttaacattcatagctgaatatacaggggatgttgattacttgaaaaaccgagaaaaagacgattgtgacagcatcatgactctccttttatcagaagatccttcaaagactcttgttatctgtccagacaagtttggaaacatatctcgcttcattaatggcattaacaatcacaatccgtaagcaacaaattcaaaattgttttccccccactaaactggtttataacattgaatcatcacatcacactgattgttgcagggttgctaagaagaagcagaactgcaaatgcgtgaggtatagcataaacggcgaatgtcgagttcttctagtggctacacgcgatatatcgaaaggggaaaggctctattatgactacaatggttatgaacatgagtatcctactcatcacttcctctga

SEQ ID NO: 175518 - DNA, 63 bp, Arabidopsis thaliana landsberg
gcaaggttaaatatcatcgagtacgagggacaatttgtcatagaaccagatagacagacttaa

SEQ ID NO: 175519 - DNA, 55 bp, Arabidopsis thaliana landsberg
atgttcatagtctcagaaggcacactcgagtgggcctatcgccaagcaaaagcag

SEQ ID NO: 175520 - DNA, 77 bp, Arabidopsis thaliana landsberg
cgtgccgtgatatctccgttaacggaaaaataacggaactacttttccgcttacagctcaaactgacgtcgttttaa

SEQ ID NO: 175521 - DNA, 139 bp, Arabidopsis thaliana landsberg
atggatccaagcaaactcgcatacattcgcaactccaaaggaccgacacatacgccagcaagcagcagctgcgttgaaattgccttatattatcgacaattcattaaatcgtgttctaacattaccaaatttatcatag

SEQ ID NO: 175522 - DNA, 175 bp, Arabidopsis thaliana landsberg
atggattccgggtcgggtttcgatccggatactggtaataataagggtaatggaagtggtggtggtaatggttatggcgagagaaagtttggtgctctcttcaacagagtggaaccctttttacctaaaaaggatttgaatccgagagacttaagatcttgggcgaagaaaactg

SEQ ID NO: 175523 - DNA, 205 bp, Arabidopsis thaliana landsberg
atgtcacggccatgaacaagaagacgtttacaaagagagcaagatcttagaaaatcttcagaataatcacttgagtgtcttctctgtgtacctcttggtgagaccatcgctaaaagccgttgatctaacaatctttgatgaacttgacgatgttcatcaacgttcacaagctgaatctgatgatcggatggttcttgttcgctag

SEQ ID NO: 175524 - DNA, 101 bp, Arabidopsis thaliana landsberg
ataaaggacgacatctacgagccatccgggatgacgttgaagagaaactcgggcctgtgacgcacgaacactcacctagtagtgtagtatacaagatttaa

SEQ ID NO: 175525 - DNA, 372 bp, Arabidopsis thaliana landsberg
gtatctaggacccaaattatagtggacactggactcttggttatcagcggtgaagatacccgtaaaaattattataatgaaccatttgagaagaattgggtcgctgtatgcgaggaaaaatacgagatcgcggttaatagttttcagaaggctcgagtagttggagagaaaatgaacaagtcattaacggaccgtatggaaatgtcccaactcactgaagctggctttgaggctgtgctcgattgccaagacgaatggacaaagattctagaacatgaacaagcgtgtcctttttcttactggtaccataaagttcgaaaactaattaaaattactcgtgttattgtcaaaaggcttaacgcctacgcctag

SEQ ID NO: 175526 - DNA, 292 bp, Arabidopsis thaliana landsberg
atggcttcctccgccgcccaaattcacatcctcggcggaatcggattccctacttcgtcttcttcctcctccaccaaaaacctcgacaacaaaaccaattccattccacgaagcgtcttcttcggcaacagaacaagtcctttcactactccaacctccgccttccttcgtatgggacgaagaaacaacaacgcttcccgatacaccgttggtccagtccgtgtggttaacgagaaagtcgtcggaatcgatttaggcacgacgaattcagctgttgctgctatggaaggag

SEQ ID NO: 175527 - DNA, 56 bp, Arabidopsis thaliana landsberg
tcagccgcacataccgtaactcagccgtaactgccgctgtatcgcgttacggctga

SEQ ID NO: 175528 - DNA, 68 bp, Arabidopsis thaliana landsberg
atgagatggcatgaacgtcgactgatctgccatggatgtcgagatataattcacacgagcatcaccat

SEQ ID NO: 175529 - DNA, 243 bp, Arabidopsis thaliana landsberg
atgagcggatcacgcctcgatcgcctgctgctgggctttgccgacaccgccgcgctgagcggcatcgtcgtttccgggctcacgctcaattcgcgcgacgcccgggcgggcgttgccttcgtcgcgctgcgcggcacccgccagcacggcatcgactttgccgccgacgcagtggcgcgcggcgccatcgcggtgatcgccgatgccccggcgccgcacgatgcgccagcgctcgacgtgccg

SEQ ID NO: 175530 - DNA, 1945 bp, Arabidopsis thaliana landsberg
atggcgagaggagggaaagaggaaggagaaaaacacatagggttactaaagctggcgcaaacgctgtcgtttttgctaattttcatggctggaatcatcatcggtctcgccgcaagttctcacatcgatcgctacttcaattctttgccgaggatgttctcatcaaccactaacctccaatcgattcctttttcgactcctgattactccaattgcacaatcatccaccgagactgcacaggtaacgacgacaacgagagcgacgacggaggagtcaaggcggagaaaccaaaggttcgagattgttggagcattgatgggtttgttcggccagagaatctgagtcatggaatgactgatgatgagttgttctggagagcttcgatggttccggtgaaggaagagtatccgtacgatagggttccgaaagtggcgtttatgtttctgacgagagggcctttacctatgcttccgctttgggagaagttttttaaaggcaatgaaaagtacttgtccgtttatgttcatacgcctcctggatacgacatgaatgtctctcgtgattctcccttttacgaccgccagatccccagccaggtacgttttgatgcaggacagtgaactttttgtgtcttgcttgtgttcttcagtggatcagaacaaaacaaatacttagtttcaccagtgacttaatcttgtatacaagaacagagtaatagataagtagataagaaatatagtcattctggatcatggagatctagttctctagaggaacaacatgtagatctaatcggcatgatggaatccaagttacactggcgcgtgactatttgagattgtttataggatttgaaccttttaattgtttcttccactgtcagctacatctgtttcaaggttgtgtataagatgaagctttgttgctaattttgctatatggtgattatttggaacatagctggttttagtttaatgttcgggaacagcttttattataaaggtgatctgttaagctgtgatctgcttagctgtgaactaggaaactataagagactaattcatagacacattagataagcttctcttgttgatttttacaccttttattgtagtaatccctttaattttctctgtatgtcacaatgatcctggtaattgcataacgctttgtttggttcttcaacttggtcatctgatgaatcatggatggtctgtgtcattgtatgctagatctacttgataaaaaaatctaaagaattctgtctggttctgatgggttttttatacttgaattttttagagagttgaatggggatccccactattgacagacgcagagaagcgtcttctagccaatgcattgctggacttctcaaatgagcgttttgttcttctctcagagagctgtgtcccagtttacaacttctcaactgtctacacttacctaataaactctgcttacagttttgtggactcttatgatgagccaacacgttatggccgtggccgttatagccgcaagatgctcccggatatcaaactccatcactggcgcaaagggtctcagtggtttgaagtaaaccgtaaaatcgccatctacatcatctcagactcgaaatactactcattgttcaaacaattctgcagaccagcttgttacccagacgagcattacatccctactttcttgaacatgtttcacggttcaatgaacgcaaatagaagcgtgacatgggttgattggtccataggcggtccccatccagctacatatgctgcagctaatatcacagaagggtttctccaatctataaggaaaaacgagacggattgtctttacaatgaagagccaacttcgttatgcttcctttttgctcgcaagttctctccttctgccttagctcctcttatgaatttgagctctactgtcctgcggttttga

SEQ ID NO: 175531 - DNA, 161 bp, Arabidopsis thaliana landsberg
atggacactaagatcggatctatcgacgcgtgtaacccgaccaaccacgatatcggcggtcctccaaacggcggagtctccaccgttcaaaacacaagtccacttcactccaccaccgtcagcccctgcgacgcgactcttggccgttacctagcaagacg

SEQ ID NO: 175532 - DNA, 357 bp, Arabidopsis thaliana landsberg
atggcgcttttccgagcgcgacacaacctggctgaatcgctgcgccgggacgcgcggcttctcttgccggcggatccgggaacggaacgcctgctggagtacgtgcacctgttcaacgagaacgcgaaacccgccggcggagggcggatcgacgttgacgggtggcaggaactctacctgagcagcccgtctgcgatcagccgcgacattgctgccgagacaggcacgatgccggggatgggtgtcgccttcttcctggagaatcacgcgcatatgcggtccttcggcctgtcggccggctcgccgcgcacgcgtaagcagtacgacatggggatgcggctcattcacgggctggcg

SEQ ID NO: 175533 - DNA, 184 bp, Arabidopsis thaliana landsberg
aaattcaaattctcgttcccagaagaaactgagcttcgaagaaacgtttacactagtagttccggtgaagaaaacagagtcgtcgttgattctcgtcatgtttctcaacagatcctcactgtccgatctactaactccactgtaagctttgtttctcttcgtccttctccagattttgttttga

SEQ ID NO: 175534 - DNA, 50 bp, Arabidopsis thaliana landsberg
atggcacgacgcgaaccagcaacccgacaggcgttggaagaagaggcctc

SEQ ID NO: 175535 - DNA, 1024 bp, Arabidopsis thaliana landsberg
atggggattttcaatggtttgcctgtaccctcggataaaactgtaagttcactttcctcactcgtagactcctacttgagttggaaaacctgaagtttgggcttatgaggaattgtgttgttctatggtgttctttcatccccttggggatttatagggacatttaagtataacggttctttttcttatatctcttcatttcggggttggagttaattgtaagaagttgtacgatggctagacaagaaattgactgaattaccaccactcttgatttggttatgtatttggttttggagtacatgtgtgtgtatatgtgcctgagtgttgatggttattgcagtaccttagggaggagctggcaagaatagatgagagctgggctgctgcacgatttgactctttaccacatgttgttcatattttgacatcaaaagaccgtgaagctgacattcatatattaaaggaacaaagtgatgttgtcgaggaggttgttgatgaagttgtccatgcttatcatggtggtttcaacaaggccattcaaaactactcacaggtttctaatatctgttagctcttcctttttattggaatagttcgttctgttattctaaagtagcatcctctgttaccgcttattgacttccatattgcacgcttcatttgccaaagatacaacaaatctaatattgatactaactatggctgcttctatggtttctgcatgtagaattttctttttggaatagtaccctctgttgtaatttatctactaaaatttcatttgtggaacaccttggttttgattatctctcttcttttgctctgctttcaatgtattcctcatcagatcttgcgattattcagtgagtccactgaaaagataggcgacttgaagcacgatttagcagaagcgaaacagagcttgggtgcacgcaataaacaattacatcagttgtggtaccgttctgttacattgcggcacatcatctcacttttggatcaaatcgagggcattgccaag

SEQ ID NO: 175536 - DNA, 399 bp, Arabidopsis thaliana landsberg
caaaacacaaaagccaaacccgtggaagatgctttgaatatgtttaagaaattcaaagcaaaagttgaaaatcaattagataagagaataaaaattgcccaatcaggtcgtggtggagaatacaaatcaaatgaattctcagatttttgttccacacatggaatcatccatcaaactacggcaccttacactccgatgcaaaacgtagttgccgaaaggaaaaatataactcttaaagagatgatgaatttcatgttaaacgattcgggtgcaccacctaacctatggggtgaagccattctcacggctaattcaatcttgaataagattcctcacaagaagagtgataaaaatccatatgagatgtggaaagagaagactctttcatataaaatatga

SEQ ID NO: 175537 - DNA, 420 bp, Arabidopsis thaliana landsberg
  unsure (1)..(420): unsure at all n locations
atgcgcccnnnnnnnnnnnnnnnnnnnnnnnnnnnngcgatcgccggcgcgtggcatgcggggcatgccgcggcaccgttgctggtgcgtttcgaatcgccggcgccgacgcggacgatcgccgcgtcgtcgtggtgggacggcgaaggctggcgcgtgttgcccgcgcggcgcaacgagcgcagcagcgggcggcgctggccgctggacctgcaggtggccggcccgctcgatgccctgcgcggcgcactcgtcgcgcgcggctggcgcgagcagcagcagccgacttggctcgacgtgctgggcctgttggacgacgaccgcgcgccgtccgcgcaggccgtgctgccggcgacgctgggcgcggaggcccaagtgttgctgatgcgccggcccggccccgtaaaaggagaagagcag

SEQ ID NO: 175538 - DNA, 66 bp, Arabidopsis thaliana landsberg
atggtactctacgacgagagcggccggccggtgtgcactggcgtccgggacagagctcgtgaccag

SEQ ID NO: 175539 - DNA, 103 bp, Arabidopsis thaliana landsberg
atgcatgaagaaagcgttgtgctggattccggcgattccttccgccagccacttatcctcgtcttctactccggcgagcgttctcatcttcttcttctccccc

SEQ ID NO: 175540 - DNA, 117 bp, Arabidopsis thaliana landsberg
atgcgcactactgacgatcaggttcgaagaatcaacctattgaacaatctaatcgtcaatgatgattctggcggtggaaaattgagtacatggcggttgaaaatggagtatcatgtg

SEQ ID NO: 175541 - DNA, 331 bp, Arabidopsis thaliana landsberg
atgaggcaccccgacaaatctcggataaagctggcgatccggggtccccacgctcatacctacggaaggacgggggccagcgggttccgccgaaggtggccctggggagcccgcggcggacacgggaacctgctgagcgccttccgctgctgggccgctatgcccgggcgggcgatcgagggtctgcccacacggtctcggcacaacagaacccactctgacacggaagaaggagcagcaatgcggtacgaacccaggcacgccaagtcggccacccccaagagcacggggaacaagaatcgccacgcgggccgcggcccggcggtgccca

SEQ ID NO: 175542 - DNA, 172 bp, Arabidopsis thaliana landsberg
atgaagccgatgttcgactggcaggacccgctgttgctggagtcgcaactcaccgccgaggagcgcgcgttgcgcgatgccgcgcgcgattacgcgcagaagcgattgcagccgcgcatccgcgaagcattccggcacgaaactttcgatcgtgaaattctccgcgagatgg

SEQ ID NO: 175543 - DNA, 194 bp, Arabidopsis thaliana landsberg
ctttacaagaacaaaaagttggtgaagaagttgaagagatcattacatgtaaaatttgtgtcaaatattttgaagttgaagaagctcataatctagatgagattgcttttcatgagtttgttgggattcttctgacttttgaattaagtaaaggatatgaaactaaagggaagatgaagaaggaggatgagtga

SEQ ID NO: 175544 - DNA, 74 bp, Arabidopsis thaliana landsberg
agcgttcacgggataagcagatccagagggatgatgaatatttcgatggagacaacgataacgatgcgtcgtaa

SEQ ID NO: 175545 - DNA, 706 bp, Arabidopsis thaliana landsberg
atgaaggtacgtaatactgataatgttccaagtttcaacttttgttttcagtttcttgattatgcgtacagtcgaacccaacagggcagcatatatatccgatccttaggcttacatttgatgaagaggaccgtattgatcctggtaccaatgcgccgcgtattgatcctggcaccaactttagtttcactcttcttaaatttccttggtatatacataatccggtaagtattgttacgtaaagtttttggatataattcttttttttatatatcgtgaacacttaataaactcttttaaaaacaaaaatccctgtgaagcatgccaagtttgctgtaaatgtgactgaagcgtttggtgccggtggatatccagaagacagaatctgcatctacttcagaactcgaagtactgtctcagcttaatcaagttggagggtgaaaaaatatgttttcaagtctttataatacctatatgagtctctcgcgctaccctttatgtgtgtttgtccaacaaataaaagaaaactctcaagtttacatgccctaatttatgatttcaccttgcctttgttgtggtccagggcagaagaaagagattagagaggacaatcactggcatcactgttatatcgaaaaagagaaacaaatgtttaaatcctggacaaaaagaccaaacacgtctaatttgtaataagtgtggatga

SEQ ID NO: 175546 - DNA, 349 bp, Arabidopsis thaliana landsberg
gttgtcaactgtaaggatgaacttgcacagtgctaccttatggattgcattattcaagtctttcctgatgattttcaccttcaaactctcgatgtattattgggagcttgtccacaacttcaggtacttttttatgtaaccgaccacttcttttttatatgcatttttctttttaaaaaattagactgcttataaacctcatcccatcagaacatctttctcctatttttctttttgtcattgtttgttccagccgtctgttgatatcaagacggttctttcgggtctaatggaaaggctttcgaactatgctgcatccagtgtggaagcattgcctaatttcctgcaa

SEQ ID NO: 175547 - DNA, 287 bp, Arabidopsis thaliana landsberg
ctgaaatcgataaggaagtcagcgttggagatctcatgggagaattaggttgtggattcactgctgatgcccaacaatgcaaagaaatcttgtctagttttgctccactaggagaggctactatctcaagaattgttggcaatgtttctcggacctgtgctgatcttgaagataatcaaaccaccttttcaacgtttactgtagcccttggttcctgcattccaactgaacttcccacgccaaggtcgtggaatgttgatattctagttgacacaatcaagcagctt

SEQ ID NO: 175548 - DNA, 137 bp, Arabidopsis thaliana landsberg
gtttttccaaatttgacaacaattcaaaaaagaaaatgactatacggctgaagacaatcgacatctcaaactcaaaacgaccaagacctttacatgcacttatgcactcgtccaaaaactcgtgccattgtgaatga

SEQ ID NO: 175549 - DNA, 894 bp, Arabidopsis thaliana landsberg
ggaggtgaaggagaagatctagagccactttttgattatcgtcgtgttcagccagcgaatttcgtttgtatcgatggtgagtttcgattatttgatttggtcactgagctcgacactcgacagtgataaagatgaatcctttattatcgcttgaatttttgtagatgatgatgatgatgcctcggtgacgccaattccgaagaaagcgaaaacttcacaaacagtaagaattgatttttattgattggttgttgtctcattgagctctttgtgttaacttgatagatactcttggtattgtgggcttgtaaagagttctgaatcaatgtcagtgaaggaacaattcgattatgtacttcacaatttcataggttgaatctatcatcattccttttgggacttgaattttttttatagggtgagaagttagatatgatgtgaaagtgattgaagttacgggtgatgacgattggttgcttcctccaccaaaggttatcttcgacaaaagtaaagactctgttgaagattcaactattaaagcattgaggtaacttttgtatgtctttgagtatttctcatctctaagcttcccatgttactgttagaggctatggtagtgttatttgctatccggaaagagtcccagtgttacaatttgattataaatgaaatatgtaacgtaggtcgaagaagatggagctcatgtcatttacaaaaactgtaggagatgtgatgcaggaagttgaggagtctgctaaaagggaagttgaagaatctcgcaatccatcttcagagactgctgctcagttaccatcagagcctacgaatgacagggccaagattgttattacaatacaggacaaagatggacagaagacactccgggtgtttgcg

SEQ ID NO: 175550 - DNA, 435 bp, Arabidopsis thaliana landsberg
  unsure (1)..(435): unsure at all n locations
gcgccgtacgtgccgtcggagaagctgccgggcggggaactcctctattgggacacgaagacaaacctgacgtgcgtcgtcgaaacggagaaaccgcaaggcgaacgcacgcgacactcgcgcaagtacgtcgagggcaacctcggctcgcactcgttcgcgttccgtggtcccgagggcaagctgaacctcaaggcatcgaacctgatgctgttcctcatgctcgccgacggcgtcgacgaagacacgtggaacttccacctgcggcgcggcgagtactcgacctggttccgtacgtacgtgaaggaccccgagctcgccgccatcgcgcagcagatcgagaccgacacgtcgctgaacgcgcaagcaagtcgcgcgcgcattcgcgacgagatctcgaagcgctacacgctgccggccgacgaagcgagcggn

SEQ ID NO: 175551 - DNA, 94 bp, Arabidopsis thaliana landsberg
atggcgacgaagagctcggattcgagccataagcaatctccttcgagttttcgtaagagcgtcgaaatcaaagccacgcatgatcaatttttcg

SEQ ID NO: 175552 - DNA, 125 bp, Arabidopsis thaliana landsberg
gtataagctcattctgcgtgcttcttatggagcttcgcctgaggttaaaattgctcttctttgatgggttggctcaacgtcttattggtaaaacggctgctgagctgtttgccgaagttccagag

SEQ ID NO: 175553 - DNA, 150 bp, Arabidopsis thaliana landsberg
ctaaatcttagtagtcattcccgaaatggtttgcctatgtctgcctcttcacaaccatcaaattatttcatagaaattcttaaacttgttataacggcgattaaagtgcaagtattgagtgtaactagatcctcaattccagaaagttga

SEQ ID NO: 175554 - DNA, 733 bp, Arabidopsis thaliana landsberg
agccgccgttgttcttcgtaaccaccgttgctcatctttctattcttcttttacaaattcctattaaactcactactctacgatgtctaccgaatctgcgtccacaacatctacatctacacctacatctacgtcatcaactccatattcttctcaatgcatccgataatcctggtgctttgatctcttcggttgttttaaaagaaaacaactactctgaatggtctgaagaactccgtaactcactccgtgccaaacagaagcttggcttcatagatggaaccatcacaaaaccagctgcggaccccgaactaagtatgtggactgccacaaactccatgattgttggatggatccgcacatccattgatccacctattcgttctacggtatcatttgtttccgatgcagcacaactatgggagaaccttcgtcgacgtttttcggtaggtaacggggtacgaaaaacacttctaaaagatgaaatcgtcgcttgcaatcaagatggacaacctgttctagcctactatgggcggttgactaaactgtgggaagagttagacaactatagaactggttgtgtttgcaagtgtgaagccgcatctgatattgacaaagaacgtgaagatgaccgtgttcacaagtttcttctgcgtttacatacccgcttcagctccatacgatcctctaacactaatgtagagcctctcccagatctttatcaagtctctcg

SEQ ID NO: 175555 - DNA, 979 bp, Arabidopsis thaliana landsberg
aaaaagagacggttgccaaaggttaaccgagaccttgcagcaaggcttcatggggacgaatcagaggaggaaaataaaactgccgaggatggggaggccaccaagaaagtgctgaaaaagaagaaacccatacttactgacgagcatttcgtagatggtcggtttggttcgatgttccaaaatccggtattaacatattcttttcaactttttttgtttgatctttttattgctctatttcacatcgtatcaaacctattcttgggaatctccttttggttttcaggacttccaaattgataaggactcatatgaatatggtgtcctacaccctgttgcttcttcgaagaagcaaccttctctgttagatgaacactttgaagctgtatcagatgatgacgagaacagtgattctgatgcatcacagccttcagatgacgaggccgacgatggaaaggcatcaagggcgagcaagaaagcgagagcgctgtggtcagtgtcttttgactgcatcccaggatgtacatttgacacattctatcttgattcttttgttttctgatgtggatgatttggtgtcaggttgtatgaagtgaaagatgagcggcatgccgcagcttatcacaaccgcacttcactggctaaagaagatagtcttcctatgggcgagcgtgtcaaggctatagagaaccggcgtggcaactttggaggctcgaaagatatcaaattcggtcctggaggatctcgggagttttctttcaaggcgagagggtcatcaaagtacaaagaagatagagacgatgaggatgaagatgggcaaagaaacaagaggagaggagttcagtctcttggactgaaatcaacaaatattagaggcggtttcagaggtagaggaggtggtggttttagagggagaggaggcggcggttcccggggaaaaggtggccgtggtggtgggcgtggaagaggccggcaatga

SEQ ID NO: 175556 - DNA, 159 bp, Arabidopsis thaliana landsberg
atggtgaaaacaaggatcaacaaagagataaaaagaggcaggcctaactggagatgcggagaccagaggaaagcaggaactgtggaaggtgaagctaatccaaaatccacgagagacgcaaactcaagaactaccaacaactacgccagtagagcagag

SEQ ID NO: 175557 - DNA, 526 bp, Arabidopsis thaliana landsberg
gctacgcacaatatcaaggacaagaagcaacttctttcgtttgtgaataaatcagataaggtgattgatgtgtctgatctcaaagatgcttacccgaatgtaatggaagatttgaaggtattcattgtattttttctggagatatatacaatgtcgttatgtgttttgtgtttcaagattgtcttgtgttgtgcagtctctaaaatcttcaggagaaatcttctggttgctatcaaacactgattcaaaagagggcactgtgtatcgaaataatatggagtatccgaagattgatgacgagcttaaagctctattccgtgacatcatcccgagcgacatgcttgaggtggagaaggagttgctgaagattggtttgaagccagccacaaacattgcagagaggagagctgctgaacagctccatggcgtatcgaataaaccaaaggataagaagaagaagaaaaaagagatcaccaacagaaccaaactcaccaattcccatatgctcgagctcttccagagttag

SEQ ID NO: 175558 - DNA, 154 bp, Arabidopsis thaliana landsberg
accagcttcgtttaatgcgtcggagctgcctaatggacacgacacacgaacaacaaaccgctccgctccttcacttctcctcctaacggctatatttgtgggacctacaagccattggatcactagatcttgtaaagaagcccaaaggaaatga

SEQ ID NO: 175559 - DNA, 707 bp, Arabidopsis thaliana landsberg
atggcttcgccggcgttaaccggcggttaccggaacctcactgcgccggtatctctcctgcgtactttagcgtccacccgtgtcactactccattgtttcgttccaacaaacactctccacgtttcatttcttctccaaagagattcacttgcttatccttactcaaaaccgattctcaaaatgaaaccacactctcttcttcttccaattctgggtatgcttaaagtctgattcttttgattcaattcgttcaaatttcgatactttaatgtgaaatgtgtttttttcagataccatgaatacaatcgattgatgccatgtcctgcatataatcttccaccaagaattgaacatatggttgttttagaagacgacgttcttgtatctgagtttatctctaaacaattagatcttcctcctttgtaagtcactaactctttgtggtctaagtactcgtatgtttagagcttggaatggagtgtatataaaaaaattttcattctatgaagatatgttgcagatcttttcgatttgaagctgtacattacgctcttgtatgtcctaaacctccaccaactgcgactcctgaggaaattatactgtttgaagaagtaacctctccttctgtactaaagaagagatcttatattaaaggaaaaactgttagagaagctcagaaaacgtttcgtgtgactcataccaatca

SEQ ID NO: 175560 - DNA, 370 bp, Arabidopsis thaliana landsberg
atgtgccctgagcttcttgctgatattccctacgggtcaaagtcggacatttggtcgctgggtaagtttctcttccatggcttagacagtaacatttgctctagataacaaagtattcatctgagtcttttcttctctttttgcacttgcgttcaggttgttgtatgtatgagatgacggcgctgaaaccggcattcaaagcctttgtaagttcttcttcttcacatctttaagttcatgttcctttgccttatgttcatgacattctgatttttgttacactttctgcattttaggacatgcaaggtctgatcaacaggataaaccggtccatcgttgctccacttcctgcgcaatattctaccgcctt

SEQ ID NO: 175561 - DNA, 623 bp, Arabidopsis thaliana landsberg
atcaagtcagccgcttgtcagtgacctgcacctttaaagtaaaagatgaagacaagtcttgggtcccatattcttgtccagtaggaagttggaccatacatggaggcgggaaagataagattgagctagaccatgtcttcattggatacaccagttgcccacacactataaaatgtcatgaagaaggtaactcagatgaatgcaatcctaccgaagcctctcttacatttactgtgacaggaggtacaagtgagaatggaaaatacaaggtgtttaagtgtggtttaagtttggtgtatgctaaggataaagacaaaaatagtgctcttgaaacaaagtacgatatgcttattggaaagagctttcaagaaacttcagaaggggttgatggaagggtaaagaaaacgaaaggaaagtacgttatgcctgttgaaaagaactttcaagaaactacagaaggggttgatggaagagtaaagaaaaagaaaaaaacaagaatggataatggacggccaaagaagaagcagagatcaggaagagatgataatcaaactaggatgcaagtggaactccaagaaggaaatataaattcagtgatcatgcacacggctaagattttctga

SEQ ID NO: 175562 - DNA, 512 bp, Arabidopsis thaliana landsberg
agttagcccgctacgcgccggatgacgtcagcgccgaagtcaagacgatggcccgcttcctgaaggggcttagaccagaactcaagaccatcctagccagccaagacttcctcagtttctcacaactctccaacaaagccatgcaagtggaaagggcaaaggaagaagaaaaaggccatctcaagaggaaattccaagtcctccgagctcagcagcaagaccggcaccagaaaactcgatcctttggatttccacccaagggaccaagcttcagtagaccaactggacccaccccatcacggttcagtcagcacagtcagagctccttttatgccccctcagttgcaagcaaccaaccaccagcgaatgtgtgttggcactgcggagaccctagtcacttcaagaacaacggcccccagttgaaggcatcaggacctgcttactccaactcggtgaatgtccccaagaatacctcagcacccgcccccaaggcaccctcctccatcagctag

SEQ ID NO: 175563 - DNA, 475 bp, Arabidopsis thaliana landsberg
gatagttacgggatccaaaagctaaacgaagcagctcaaaagatggatttctgcaataggtacgatacttcacaacacttagctctctgcaattgattctttcaaaacctccctagtcctataaactcgaacatgaaaacccatgtggtatacttgagaagcagaaacgatagttgagtcggtgcttatttaaataactcatatgatcaaacttgtggattttcttatctggcagtaatgattcatgcattgtgtaactctggtttaaaatcgcaggttcccggttccattataccctgagctgattcacgaaagactagagaatcagtactacagaagtattgaatcgtttaaacacgacgtggatgcaatgctctcaaatgcggagttgtatttcgttagaagtgcacatatgctttcgaagataaagcgactgcgagataaattgacaaaaacgttaagaaagctgatctga

SEQ ID NO: 175564 - DNA, 58 bp, Arabidopsis thaliana landsberg
atggccaaacgcaaccgcaactatttccgatggctacccaaccagagagacaggaaca

SEQ ID NO: 175565 - DNA, 389 bp, Arabidopsis thaliana landsberg
atgggttggtttaacaagatctttaaaggctctaaccaaaggctccgggttgggaataataagcacaatcacaatgtttattacgataattatccgactgcttcacatgatgatgagcctagtgcggcggatacagatgctgataatgatgaacctcatcatactcaggaaccatctacatctgaggtgagtttggggatcatgaagtagtgaaaagaaccacatatatagttgacggtttatcatagctctggtctgtactgttatttcaacttttgtggtttttctttactaggataatacatcgaatgaccaggaaaatgaagacatagaccgtgcaattgcattgtcgcttttagaagagaatcaagaacagacaagtataagcg

SEQ ID NO: 175566 - DNA, 1023 bp, Arabidopsis thaliana landsberg
gatcttgaagtctctcatctcaagcagcaactcaatgaatacaatgagaaaaggcaagggtaagcaagtgttgcactctgtcaaaccttcaatagcagaaaatatgggttttggccaattcgagatgtttgaccataagttcgcttacaatatctcgatgcagatggatagaggaaatcgaaggaaagcagacagaattagttactgcgcagataaaactcgcggaacatcggcagtatcagcagctgcttaagaaagagagtgcattactaaaggttaaaattggcaccggttttttattttagtgttacgcattatacaaaagtcgtgacagaccatatcttaatcttcttactttcaacagaaggagaattttagtcataaaataaaagtgatggaacttgaaggagaagtgaagaagctatcgtctcatcaaaaccctgagtggagaactcgtgatcaagctcgaatcaaggcaagaaatctctaacttctctgtgtatttatttaattactcttttttattctgatacttattttctttggtgtcatatgcaacaggaagaaaacaatgtgttgaaacttcagctagatgagctcaatttgaagttacggagagcagatgtgagtgtttctcgtgccaaagaagagcttgctttttaccgagcatcttctgtaaagaacccgcattcaaattttgacaagacgcatcagttaagtaccaaactgaaggaaaccgaagaggatagaatgcagcttgctcaggagctattaagtctctgcaccagtatcctaaaggtaagaggaacagtcatagtttttcactgtaaataaactccaaaacgtacgtcaacataatagaattctaaacatctttttgtggactgaaatttccctcaggcagcaggtgtaacaggagaagactttacagacataaaccctgaagttgctgaagaggcacttgaacagctcaagacaaaacttggtttacttgaaagtgaagtacaccactttaggttaaag

SEQ ID NO: 175567 - DNA, 371 bp, Arabidopsis thaliana landsberg
gtgcggtcaacttacttctgttgcaggatgaagtgagcaagctgaatcagggagagaacaaagaagagaatattcagaaagccattgaagctaaaaaggatgcaatgcttcaatccctttggcaaataaatgttgttgacatcgaatcaaccttatctcgtgtctgccaagcggtaagatacaccatgatttgtgtcagacattaatgatcctatattattagtttattacattcactataatctcactgtaatagtaacgatcttgtcatctcttttgtttgttctcaggtgcttaaagatccaagtgtttcaaaggatgttcttcgagctagagctagaggattgaggaagctgggtaacgttttccag

SEQ ID NO: 175568 - DNA, 654 bp, Arabidopsis thaliana landsberg
atggcacgcaattcactgggaaaagttcctagagttctgcgcagaccaccacatccgtgtggactgggccgccgtagctcacccaatgacaaatggacaggtggagcgcgccaatgacatgattttgcagggactaaaaccaaggatctacaacgaactcaacaagtttggcaagcggtggataaaagagctaccctcggtgctttgagtctgaggacaacaccgagccaagccacgggtttctcactgtttttcctggtctatggggctgaggccatcctacccacggacttagaatacggttccccaagggcaaaggcatacgatgaccaaaacaaccaaaccagccgagaggattcattggaccagttggaagaggctcgggacgtagccttactacactcggcgcggtatcagcagtctctgcgacgctaccacgcccgaagggttcggccccgaggcttccaagtaggagacttggtacttcggctgcgacaagatggccgagggcgccacaagcttactcctccctgggaagtgtcgttcatcatcgccaagattttgaagcccgggacatacaagctggccaacgatcgaggcgaagtctatagcaacgcttggaacatccaacagctacgtcgcttctacccttaa

SEQ ID NO: 175569 - DNA, 202 bp, Arabidopsis thaliana landsberg
gcatttcatcgaacaccttccattcattctcttcctctgtgttaacctcaacgaaatccttcaacggaagctcgtaacacgacttgggcatcttactaaccatcgacttggatcagagacgacgcgtgatgatgatgatcacaaatcgttcaatcgccctccggagttaacaagagaagagaagagaggaaaatcgatttga

SEQ ID NO: 175570 - DNA, 143 bp, Arabidopsis thaliana landsberg
atgattcagaccgtcattgctagtagctgcaaccacaaaaataccattgcaatccgagcttgtggagccattccacgagcaacgcctaaagcgtatcttaaaagcatgctccttaactacagatctagggactatgatgaagt

SEQ ID NO: 175571 - DNA, 1337 bp, Arabidopsis thaliana landsberg
atccgagattcaatccgtgctctttttccggacagagagtgctttacccttgtaaggcctctgaacaatgagaaggacctgcagagactggatcaaatttcggttagtattgttctatcatgccctttacctataatacttagttgtttaatgtttagttggataatatcctgtgtgcttatgcagttggaaaaattgagacctgaattcggtgctggcctggatgcatttaccaagtttgtttttgagaagacgaggcccaagcaattagggggtactgtgatgactggccctattcttgtcggtattacacagtcttatctggatgctttgaataatggtgccgtgccaacaataacctcatcttggcaggtttgatatctcttgcctctatggatgttcaattctttacattgtctgatacattacatcttaatgggtaaacatatggttgattattgcattcatacatctatgtacttcaaaccattgtgtctctcagttttaatgtttttaccaatgccttccctagcctattttcccctagattaataacgttatttttcttgactacgttcttgtagagtgtcgaagaaactgagtgtcgaagagcatatgattctggtgtagaagcctatatggctgcctttgaccaatcaaaagctccggaagaagtaagcatcttagctttagcctactgttttttttttctttttctttttttgtaatatatgattcatgtcaattctgctatgtgtagggtgcactgagggaagaacatgaagaagcagttcgaaaagccttggctatatttaactctaatgctgtagggaatggttcagcaagaaaaaaattcgaggatcttctccacaaggacttaaagaaaaagtttgaggtaatagattctaaaacagtgttgttcagtaggaagcagttgtttttgaatcctgactgtttatttacgcatctttcacatgagatttctcctctcattgtcttatgctaatatagacaatactttggtgattcaggattacaagaagaacgcttttatggaggcagatttgcgatgtacgagtactatccagcgtatggaaaagcagcttagagcagcttgccatgcctctaatgccaatatggataatgttgtcaaggtttgttatttatggatatatttttggcatagaaggattaggtttaaagtttctgtgtttttttttggcttgtttgtaatgatcgattgtatctcaggtcctagaagctcgtttggcagaatatgaggcatcatgccatggcccggggaaatggcagaaactttctgtatttttgcaacaaag

SEQ ID NO: 175572 - DNA, 427 bp, Arabidopsis thaliana landsberg
atgccgaaatggtggtacttaagacctgaggagcctgagaacttaaccaatccaagtaatcctgtttatgctggatttgtccatctgatcactgctctgctgctgtacggatatttgataccgatctctctttatgtctccattgaggttgtgaaagtgttgcaagcatctttcatcaataaagatctacacatgtatgatagtgagagtggggttccagcccacgcacgcacatcgaatctaaacgaagagctaggacaagtggatactatcctttctgataaaacgggaactttgacttgtaatcagatggattttctgaaatgttcaattgctggcacttcttatggtgtacgttcaagcgaagtcgaagttggtgctgcacagcaaatgaatgttaacgttgacgagcatggagaagtatccg

SEQ ID NO: 175573 - DNA, 405 bp, Arabidopsis thaliana landsberg
acacagagagagctttcaaaatttggtaacatcgctctcagttctcactaccaagaaaactcgaccatcgtgatgtcatctctctcctacaacggaggctacattggaaaagagagctgcttcaacgctttctccgacaagaccggtgatgtcaagttgccatgtgagagaagagaggagaaaaagacagtggcgcgtgagataatgtcacctccaatgttgccgtcgcacgtgccgtcggtgctgaagcgagagtacacgagtgatggtcggcttttactcaaggaagagaaagtgtgtcgcaacgagtattttcgagctcacagatccaacggtcgtctcatgatccagctcgtctctcttgatgaagatgatgatcgggattcggatgttaagaattgttga

SEQ ID NO: 175574 - DNA, 2072 bp, Arabidopsis thaliana landsberg
ggtgtgaagaacaatccgtcccttatgattactcggcaacaatagaggtaagcaatgctctgttcgttcagacatttttttttttttttttttaatgttcattaagacatggtcatttgaaattctgattatatttttttgtcttggtgcagtgtctagagaacccttataaaccacagtacaatggagggatcatcgtgaatcctgacttgcaaaatggttcacaaggctggtcacagtttggaaacgccaaagtcgatttcaaagaatttggaggcaataagtttgttgttgccacacaaaggaatcaatgttctgacagcatctcgcagaaggtgtacttggaaaaaggaattctctacactttctctggtaaaaacaattttgaatttgtgtttcttgaagcgcactctttataacttcatctgatgtattttatgttatacttgtagcttggttacaagtgagcataggaaaatctcccgtgagcgctgttttcaagaagaatggtgaatataagcatgccggttcggttgttgctgaatccaaatgttggtctatgctgaaaggtggtctcactgttgatgaatctggtcctgctgaactcttcttcgaggtatgtctcttacacaaacatactcattgtctccattgtttgtctacatttctgcattttgcaagctactttatacacctatatatggtgatccattatccctttttcatgtgtagagcgagaacacaatggttgagatttgggttgatagcgtctctttgcaacctttcacacaagaagagtggaactctcaccacgaacagagcattggcaaagtaagaaaaggtaccgtgagaatcagagtcatgaataacaaaggcgagacgatacctaatgcaaccatatccatagaacagaagaaactcggatacccattcgggtgcgcggtagaaaacaacatacttgggaatcaagcataccaaaactggttcactcaaagatttaccgtgacaactttcgggaacgagatgaaatggtacagcacagaaagaataagagggcaagaggattactcgacagctgacgcgatgttaagtttcttcaagagccacgggattgctgtacgtgggcacaatgttttatgggatgatcctaagtaccaacctggatgggtgaattctctgtctggtaacgacctctacaacgctgtgaaacgaagggtttactcggttgtctcgcgatacaaaggacagcttttgggttgggatgttgtgaatgagaatcttcatttctccttctttgagagcaagttcggtcctaaagcctcttataacacctacacaatggcccatgccgtcgatccaaggacaccaatgttcatgaatgaatataatacgttagagcaacctaaggatttaacttctagtccagcaaggtatttgggaaagcttagggagcttcaatctattcgggttgccggaaagattccgttagcgataggtcttgagtctcatttcagcactcctaacattccgtatatgagatcagctcttgatactcttggtgccactggtttgcctatttggctcactgagatcgacgttgatgcgcctcccaatgtccgggtaacttaattattctcttatacaagtaggaaaaaaatcatcatttcagaattttcatttccttctctgatgttttgtttttcttgcaggccaactatttcgagcaagttctaagggaaggccatgcacatccgaaagtgaatggaatggtgatgtggacaggttattctccatcaggttgctaccgaatgtgcctcaccgatggaaactttaagaacctacccactggagacgtcgtggacaagcttttacgtgaatggggagggcttcgcagccaaaccacaggtgtcactgatgctaatgggttatttgaagctccactctttcatggtgactatgatctccgtatatcccatcctctcaccaattcaaaggcttcttacaactttacgttgacttccgatgacgactcctcacagaaacaaccatctctatatgtctttcgtgtttga

SEQ ID NO: 175575 - DNA, 82 bp, Arabidopsis thaliana landsberg
gtctcgttccaatttcatcggatgttccgatggaacgattaattactcttctattgatgtttatatcggctatttggactaa

SEQ ID NO: 175576 - DNA, 290 bp, Arabidopsis thaliana landsberg
actctagtagatcctgtacgaaagacatataattcacgtagcgaatgctcaattgaatttgaagtggatggaccgtacaaggtatgccttataaatgctattatgactttttgacaaaaataatatctctaacactctacatccaggcaatgattattcctgcatccaaggaagagggaatcttaattaagaagcggtatgctgttttcaatcatgacggaaccatagcagaactcaaggggtttgagatgaagcgtagaggagagctgaaactcattaaagttttccag

SEQ ID NO: 175577 - DNA, 813 bp, Arabidopsis thaliana landsberg
atgagcggagataatcgaagacgggatcgaaaggatacgcggtggtcgaagaagcctaaggtagtgaacactgcggaagatgaactcgaatctaaactcggatttgggcttttctctgaaggtgaaacccgacttgggtggttactcacattctcatcggtaagttctccgacactctaatctggactcaaccttgttaattgagagtatttgagtaggtttcggattcgattatatgtgaatttctgtaaattaaatataagcattggcgactgaaccatacaatgaaactccattagtgcgagaatttaggattctaggtaatgtcaaagtactagtatttactgattggataatctactacgttttgcagtcatcttgggaagatcgcgatactgggaaagtctatagttgtgtggacctttactttgttactcaggtgagctgctataattatggtcattactcattactatgtcagcttcgtataagttgatgaacgattatatttttgttgttgcatttttctaaatagttaactgagttgaggatttttttcaggacggcttttctttcaagacaaagtacaagttccgtccttacttttatgcagccacgaaagtatgatagtttctctctggacattatcggaattctccttgaatcattcatgtattttcattttatatgtcaataaactgcaatgccaaattacaggacaaaatggaattggaactcgaagcctacttgagacgccgatatgaaagacaagttgctgatattgagattgttgaaaaagaagatcttgatctt

SEQ ID NO: 175578 - DNA, 424 bp, Arabidopsis thaliana landsberg
atgccggcctggtcgagtttcgaaccgtttatcgtcagcggtctcgccctgggcggggtgtacgccctgtccggggtggggctcgtggtcctgtaccgggcgacgggagtgctgtacgtggccttcggcgcggtcggggcgatgggcgccttcctctcgtggcagctcacccaggagggcgctccgtcctgggccgggatcctcgcctgtatcgtgttcgccgctctggtgacactcgcctacgggacggtcttcggcccggcgctggcggaccgcggccccctgatacaggcggtatgcacgctggggctggcactcgtgctcttcggcgccatcgacctcatgtggtccaccagcggcggccagtcccggaccctgcccctcccgaccgacaactacgggttcatgagcaggcggcgtccag

SEQ ID NO: 175579 - DNA, 24 bp, Arabidopsis thaliana landsberg
atggctataatagtagcaccaaag

SEQ ID NO: 175580 - DNA, 574 bp, Arabidopsis thaliana landsberg
atgattgatgaaaggtacgcctggaagtttgatcacctaaaagccaaaggggcaaagtttcttctaccctattcaacatcgtttttgtacattttgcatctttagtcgagtctaggactagtcttgcatacattctagattctggatttgtttcaggtgttttaaagctattggtgctctgaaagaggaaaaacagaacagaaagtcacatttccacctacatactcgatcaccagtagcagagagggaagcagtcagctcagtagtccatccagacacttctactcgatcgcagaggagaccaggcagaccattctggcagatatactcgatcgcacaggagaggaggcggtccattctgcaattctactctatcgcagaggcaaccaggcagtccactttgctagtccaccagttatactcgatcgcaaaggagaagaaccagtccatcctgacagctgccagacttactcgatcacagaggccaagaagcagcacagaccattctgtctaccaacctactcgaccaccacctcgaccctctgatcaatccgcattcaaccagacaacctga

SEQ ID NO: 175581 - DNA, 210 bp, Arabidopsis thaliana landsberg
atggggttggatactgaatactactgcaggcgatgtgacgccaaaaaggacttggttccacatgtcaacaagtttctagaaatatgtcagactgtagaatatcaaggcgacgtggagaagatcctgaatctcggtatttgtatcttgcggggagcacaaagagacaatgctaaggagctattaaattgtatcgaatcaacagtcatcaag

SEQ ID NO: 175582 - DNA, 235 bp, Arabidopsis thaliana landsberg
atggaagagttctttgatccgcagtggggcagtgcgacgctgggagtgcgggccgccgagccgcgcagtgaaaaccgagagcattccgcggcgctgtcgctgacgtcgagctatgtctacggcagcgcggcgcaggccgccgcggttttttccggcgttgagcccggctacatctattcgcgcttcacccatccgacgactgaagcgttcgaaaagcgccataaggcgaaaaaag

SEQ ID NO: 175583 - DNA, 218 bp, Arabidopsis thaliana landsberg
gcccccgacagaagagaccaaagagggcaacgagagacacgaacaaaacgccgaacacagaggacaaacaacaccggactgaggactccaaagagaaagaacacacaaaacaccaaaaggtgaagagcaggaaacgcaaaccaactaagagaccgccgagggacaagaggaagaagaaacaggagaacgaggaacggacagccaacacacggcaatag

SEQ ID NO: 175584 - DNA, 1582 bp, Arabidopsis thaliana landsberg
acaagtagtaaggggtggagaactcgtgaaccagagtaccgtccctatttcttgctgaatgatttgtgggattcatttgaggaatggagcgcctacggtgtcggggttcctcttcttttaaatgggatcgattcggttgttcagtattatgttccttatctctctggtattcagctttatgaagacccatctagagcctgcacaactaggaggtgagttcttacattctgcttatatttttgattgtttcctatcaaccattagcagtagtgatcgggttctttgctcgttgattggttcttctgatagaaaaaaggatagcagttggcttttttgtcaatttatatattttgagatgaagccacttctttcttgggttgttcttaatcttcggatgcacgttctttaggagataggaaaaccaacttctaagcgttctctgctacaatatctagagatattcatttggatgactaatacacaacaacttttatgctctcaaatactagtcagtggttcaagtttatcatggtgttgaattccaaatttgtttcatctcgttggttttctctttaattcccaattcgtttctgctttctagagtaaaattcgttgttttgatgtttgttcttaaacaggagagttggtgaagaaagtgatggtgattcgcctagagacatgagtagcgatgggagcaatgactgtagagagctttctcaaaatttatacagagcctctttggaagagaaaccttgcattggttcatcgagtgatgagagtgaggccagcagtaactctcctggtgaacttgtctttgagtatcttgagggtgctatgccatttggccgtgaaccattgaccgacaaggtatgtttattatgtaattaaagtggctcaacttctcacatggtgttcaatttcatagccggcgaaattgttctgtcctgtgtcataataatgtttaaccttaatattgcagatctcaaacctgtcatcacaattcccagcactcagaacatacagaagctgtgatctatcaccttcgagttgggtctctgttgcttggtactgcatctaacatgtcccttccacattttcatgagtatattttttccaatcactctctataaatattgatttcttctcgcattcttgaaggtacccaatataccgaataccattaggtcaatcgttacaaaacctcgatgcttgctttttaacattccactcgttgtcaacaccctgtcgaggtaggcctgctctgcatatttaaaacatagtctatacatgggcttattagaaaacatcgcaaatcaactcttgtattactggtaaaaggtacaagcaatgaggaaggtcaaagctcaagcaaatcggttgcatcggcgacgttccattgcccactttcggtctcgcatcctacaagtttaaactgtcagaatggagcccagagagtgacgtagacgagaaccagagagtcgggacgctgctacgaacagctgaagagtggctcaggcggttgaaggtgattctaccggactttagacacttcatatcgcatagtggttcggcgtggagatga

SEQ ID NO: 175585 - DNA, 406 bp, Arabidopsis thaliana landsberg
atgaagaacgtcgaaaacccaatcataatcgaccagaactattgtcctactcacgaaggttgccctaatgaggtatatatccaatatccatatcgcattcttttatcagatcaatccaaatatgttataacgacttagtcaaataactaacgattaattatgttttcgtatgtattagtattctggggtgaagataagccaagtgacatataagaacatacaaggaacgtcggcgacacaggaagcaatgaagctggtgtgtagcaagagcagtccatgcacaggaatcacattacaggacattaagcttacttacaacaaaggaactcctgctacttccttctgtttcaatgctgttgggaaaagtcttggtgttattcaacctactagttgtctaaaccgatga

SEQ ID NO: 175586 - DNA, 328 bp, Arabidopsis thaliana landsberg
atggatcagtatatccagaaacaaatcagtgcaacagaagtaggcataaggaaatctttgacacttgttgaatcctctctcaacaagagatcaggtacgctcattcactttggattatacgtttttctcttaattttggtggttgtctagtgttgaaatgtgcattggcggattcattttgcatgatttttttgcttcagaaatcgagactgatgaagctgaagtggagaattcactgacgcatagtgaagctgttgatgaactctttgctaccacctatgacagcctcagggacaccaatgccaattggcataaccaaaacccgtga

SEQ ID NO: 175587 - DNA, 362 bp, Arabidopsis thaliana landsberg
atgttctgtaacggacctgtggaacgtactgctcttgaatggaggttactttatgggcggatattcaaaaccgtggtcattttgtcctctcggaaaaactcagacctttacgtccaagaagctaaactcgatcacatatacaagtaatcaaggaaacttgcatagaatctcagtttcaacctattcttccaccaatgtgagctttctaactgtagctctgttatatccatttcaggcggctaccgaagatatttgatcggtacagcagcgctgacggatttgtgtttgttgaagatgatacagttcttaattactggaatttacttcaagctgacaaaaccaagctctggactacagacaag

SEQ ID NO: 175588 - DNA, 78 bp, Arabidopsis thaliana landsberg
cgtcgtcggaaatttaaggcgcgtcgaattcacgcgccgttgttgactcgtcgtcgtcgctttcatcggcggacatag

SEQ ID NO: 175589 - DNA, 2580 bp, Arabidopsis thaliana landsberg
gaatttgagtttctgaagattcggttcgcttcgtcttcttcgtctctatcgttcaggtaaggtcttctcttactctagctgttttttttttttttgaaatttctttgagatttagtggagattgtgctctgatgttgctctgtttgcttatttctaagctcggaaaccttgaatctctcttcggtcgtctccttaaacctcaagtagctgtgcgcttaaggaatctgaggtattattgtctcagcttcgcagatttgttttcatttcgttgtttccgtttcagatttcagtttcgtctcttttagaaaccttcgattttggtttgtcactgagcgtttgatgagaaagaactcatgtgggtatgagatctttcatttttctttggtttctgaagtaggaactgttgtaacgttcagtgattgaagatcctctctgcttagggtttttggaacttagtagacagaacaaatttcatcatggattgctaacattgtctcaaaatgcaaattggtcctacttagagtatctgggagcgaatacttgagagaataactgcaaaatgcttgatgattttggtgacagttttgtgttgacgatttactgtcattttttattttgttacgcttttggttttgacatgtatcttgattctttctagtgaggagcaatgggtgcagggaggaagacagagacctatacattggctcaggatggccaatacatatcaggatatggaaatatgtgtgtgaggaatctgaagaagggagagctttgtggggttatatttggatgcaagttcagcactatcaaagagtgctatgctaagaatttgtttggttagttggctatacaatctttgaggcttaaactttaatgacgaccaggattttgaaaatgatgcttgtttgtgaacaggcttaccagccccgcacatggcgtatatcaagaacattgaccctggtttgacgctgttcttgttcaactacagtgacagaacacttcatggcatctttgaagctgctagtgaaggaaaactgaacattgatcccaaagcttggtctccaaatgggacagatccaagtccatatcctgctcaggtccctttacttagtacagaacgtcttttttagttgattcacccaaatgtcctctaaacagaaatgtatctcgttctgcaaatttttgccacaggtaaaggtacgagtccgagtgcggtgtgagcccttgcctgaagaaaagttcagcccagtaattactgagaattacaatgacgacaagatgttttggtttgaactagatcgaggtcagacaaacaagctgctccgtttgcttaaaccatcaccatctgtaaggccaccaacgatatccagagatgttgtaccaccacccagaaagcctattccggcatcttctcttgcacagataggtgactcgggagcaacgcgtgttgataagtggagcaatctgttcaaatcttccgatgagtctaccaaaaacaaagaaaaagactcgaaagaaggtgcactcggagcaggttcgagattaatcaatcttggaaaaactaaagaatgggaaatagcttccaataattcagatgagcgaagaactcaaccatcagtgtcacagtctggtacatcgtactcatcggctctgagacacatgaccgcttcttcaactctggagaagacaaatcctttgaaaaatgaaggttcatctcacgcatgtaaaggtgttgaaaatccttggacatctgctgctcgagttccatctgtacgccaagaaagtgaaggattcagaaatgctgcaaaggaatgtgaatatgtcaaagtgaatgcttatcatcatcagcaaaatctccatccaacacaaaagggaacctctactacagctaactataggatagtacctagcattagcaaggaagatcctgctgaggatacatattcagtcatcgattgggatgcaacatgttcctttcaagtccatctggatggactgaacaagattttggaggatcctaaggataaggaatgtttcaagagcttagcgggtaacacaagacaagcttcttcatctatggtacctaacagttgggaggatgactttgaggaaagaagtatagctaaatcgccttgtggatcctcgtacgtttctgccgctacaggagacgtggttgatgacatcggacgtatggataatttcaagatggaaattggatctcccactgttgtggatatattgactgaggtaagtttaaggtcatacatcgttctctgaactataaaaaacagtttagcttgtgatcctctaatgaaacaactatgaatatgtttttctctgctagctattggcggaagtcaaggagttgaagcatactcagctgaaacaagctgagaggatgattactttggagatggagctggtaaaaacactttgcaaaactcgtaaattgatactttttctttttctttttcttacctagcttcaaatgcatactctcttatcttttgtttgggttctttgcagcttgaaacaagaagggatatacttcgggtaaaagggagcaatggaagtttttaa

SEQ ID NO: 175590 - DNA, 595 bp, Arabidopsis thaliana landsberg
ggtccaggacatattgattcgagagttgagtcactactaaaggacctggagagtaaattttacaatatgagcgatgaagaattcaaggttagagacacaagctagatgatatttgatttgcttgagataaacattgatgtactatcggacatgacttttctcctcagagcaatgtaacaaatttgatagatatgaagcttgaaaaggacaagaacttggatgaggaatcctggttttactgggcagagattcaaaccgggacactcaaattcaaccgcatagatgcagaggtaatagacaaaactcttcctttttccaacttctttctagtaatctcctatttaagaaccttaatgttggggtttaggtggctgcactgagactgctaaagaaggacgaattgatagatttctttgacgaatacataaaggttgacgcaccaaataagaaatcgttgagcatatgcgtttacggaaaccaacatttgaaggaaatgcgaaatgacaaagacaagatcccatcaacatccatagaaatcgaagacattgaatgtttcagaaagtctcaacctctttacgggtcgttgaaactatga

SEQ ID NO: 175591 - DNA, 952 bp, Arabidopsis thaliana landsberg
caaactcgccggcttggctctgccgtgtgacggcaatgaaggagccaatgatgcgaaggcgcaccctcatgctctgcgagaaactctcacttccatcggtacgttatacattcatatacttagacttctcttctatcaatcacttcatgcatctttcagttcttctctctcttttccatttttgaagatcttttgttttcttctctctaatttgaaagctaatgaatgaaaatatttggttccctaagtctatgtaagttgtcttgagtgaaaccatcgttgttgttggatcatcactttgttttttttttaattggtgtgacatgtatatagaatttatatgttgagcaaaatattaactttgggaggccaaaaacagtttcaagtgatagagataaacgcagatgtgggatgtgttgcttgtcaagacagagtctctaagattgtctccaagatgaccggtgagctctctacgttaccaccaaagattatttcattaaactcacaagctacttgctacttaattaatcaatttttaaatatgcttaaattctaatttcgtggctgctactaactgtttaccatcatccttattcgctcttaagaagtaagaaccatccacgatctttttgtttaatcctagctgtcatcattgatttttaagaatcaaattcattgattaaaaaaatcagagaagtagagaaaataattacgtatgtgtttgaccaaagaaagagaaatggctgcaggaatcgaagagtacgtggttgatttgaagaagaagttggtcatggcacgaggtgactttaggccacgtttggtttcttctcaacaacaagtcaaggacgttgtctctcaaactccttctcaaaacgccaaacgccttttgcgacctctaaaaatattccttcgttccattttctctctttgtttacgtccaactacattataa

SEQ ID NO: 175592 - DNA, 651 bp, Arabidopsis thaliana landsberg
attcgacagcaagagattttgtagagactgcagacgaaacgttattcgtgagttcaaagagcttaaggaactgaaacgaatgcggagagaacctcggtgtaccacatggttttgtgttgccaatacaacattccaatatgaggtgatttatctatgttaaccttttcatctttgtgggttcctatagtctagcgttatgcttttcgaaaagtatattactatttctcttatgaggactaattgcgagatgggactacaaatataattgcaatattaaaggtatccattgattcggtgaaagcagactggcgggaaactttttctgagaatgctggaaagtaccatcactttgagtgggcaattggatccggagaaggaaaatgtgatatcctcaagtttgaaaatgttggcatgaatgggagagttcaagtcaatggcctaaaccttcgtggtttaaattcatgctacattacccttagagcttataaattagatggccgctggtctgaagtatccgccaaagcccatgcattaaaaggtcaaaactgtgttcacggcaggctagtagttggggatggctttgtttcaatcaagagaggtgaaagcatccgaaggttttttgagcatgctgaagaggctgaggaagaagag

SEQ ID NO: 175593 - DNA, 1664 bp, Arabidopsis thaliana landsberg
atgaacaaccgccgtggagtaacaaccgccgtatcgaagcgtcgtccagtgattcacgtgttaccagacgagacagcgatacgagtagtctgccacgcgtcagtaatcggtggtataatcggttcaaacggttacgttgtttcaaaactccggcgtgaaaccggtactaaaatccattgcgagtctccagttaacggctccgaccactgggttgtgttcatcgttggttcaaccgctgttaaccaaagtattctattgactgatagagtcggagaattctccggcggtgagcacgaagattgggtgacgtgtgaagtgtccgccgctcagacggcgttgattagggttttggaaagatcatgggttgttttagccgcgaaagatggcggcggagttgttgatggtgaagatgaagaagcttattgtgggattttggctgatcggaatcagattggtgctgttttgggtttgggtgggaaaaatgttgagtggatgcggagaaattccggtgccatgattagggttttgcctcctccgatttgcggcactaagaatgatgaactcattcaggtaaagttgaagtctttatatgatttttggttaaaaagttgttaaatttgttttggttatttggtttttgatatgttgtgaatgtcacttctttgtgtgttgtattagattactggtgatgttttggctgtgaagaaggcactagttatggtatcgagttatattcaaaataatgcacctctcaatgggtatccaccgccgcttagcatcaaaggttatgagtcattatcaactgatgggaactcagaggatccacattctgagtttttcccaaatttgcgttcttcttcgttgtcaaatgctacagaaattgttgcatccaatagacatttaccgtatgatggtggaaatagtacagaacgaaaagttgtgttcaagataatctttactagtgttgtagctggaggtattattgggaaacaaggaactattattagagctctgcagaatgaaacaggtgcttctatttctgttggagctccattgaaagtatctggtgaacgagttgttactgtttctgcacgtgaggtatataggtttctattcttctgctttctgctacacatttatccgagtttctttgttgaatgttgacataatcacattcgctttgttgttttcttctccttagaacctcgagtcacggtactctcatgcacaaaatgctctggctcttgtctttgcaagatctgttgagattgatgttgagaaaggtctgcgtccgggattgcacaatggtgccatagtgaaaactaagttgttggtaccatcacattttgctaatagcttcaatggaaacggaaacagagaagcaatcatagcaactggtgctgatgtacacatttcagtaggcaaccaggttttagagtggatctcagaaaatgaagtggtgattgaggtaagtgcatgttttcttgtaatcagtgtaagtgttttcttacccttagagatgagaaaattgcaccttttgatcctctgattgttttaagattaagggagagtatagtcatgtacagaaggccttgactcatgtttcgtctaaattacgggaaaatctattgccaaagaaggtcctcggagaaatgagagctaga

SEQ ID NO: 175594 - DNA, 106 bp, Arabidopsis thaliana landsberg
tggagatgccgacgggagagtcccggtgatcggaagtcggtattgtgttgaagctttagggatttccgtcaaatcggagtggcgttcttggttccacaatcatcag

SEQ ID NO: 175595 - DNA, 1658 bp, Arabidopsis thaliana landsberg
atgagtcaacccgaaaacgcggagaatcaaacctctgagcatagttctgaagctcctgttgagtgtgagaatagtgaacttgaatctaaaatggaggttgatgctccttcaaatattgctggaagtgtagatccagctgataatatagcggccaagtctgttgcgcgtgttaaggttaaattgaagacttcgaaagcacctgaacccgatgagacattgcgtgatgatatcgataagagtagttctcaagcggtgttagaaaaacctgttgtgcctgttgagaaaaaggaggaatttgttcctcgtttgcctgagaggaagccggtgtttctgaatgtttacaggaaaactaaaggtataaggataaagtcttcgaaggcggttgatgggtctagctcggttactgagaagagtgctactgatactgtcaaggttcaggatgtggtagtaggtcagaaggatacgaaaacgtctgaggagaattctcaagctagtaagaaagaggcggaaattgcaacgatttctttgcagaaagaggagaagaagactgatcaaaatttacgatacaataagcaagaactggaagattctcttattgtatgctcagattaatatctcccttgattgttgctaaattctttcatggtatgagcagttcaacttgtatattacgcctaatgcaccttttatgtgttggtgtcaaattgctctaggtgatcaagaagattatgaagatggaggctgctgatccttttaatgttcctgtcaatccagaagctcttggaattcctgtaagtacagatattagcttcgtctttgttggctaaatgtaccattctgggagttgttgttatatattaaccttggcttgtgaaagctctatcattcatctaaacacttgatacgtttcacatatatccattacatgcttatgttgaacttcctaggtaaattagctctgaacaaagtcagaaacaaaattcgttttgaactctattgacaagacttagaaatgctccagtacattgacccgtcgtattgtttagctcatctttctttttccatatatactcttttagtttgtgtataagtgaaccagattggttgtaatagtatacacatactattgcccttgagggataaccttggctttttgttattggaaaaactaaagtctctctccttttatgaactgctgataatcgaaagaaattcttgacttgccatcttcttatagtttttaacaaactttgccgctcaacaaagatggatagtgtggctttttgtccctgtcacttgacatttttactggataatttctcctatacttttccaatctccaggctccagtatctttcatcttttaaagggatttcagaattgatgtctaacacgtgagactgttttctgattatgtgatcaggactatttcgatattatcaagacacctatggattttggaacaatatgcaacaattttgagaaaggcaacaagtatatgaattctgaggatgtttacaaggatgtcaactacatttggaataactgttccaagtacaataagaaaggtgattatattgtggatctgatgaagcgagtgaagaaaaattttatgaagtactggactgcagcagggttgtatactgagcaatcagcag

SEQ ID NO: 175596 - DNA, 34 bp, Arabidopsis thaliana landsberg
atgcgcgttgactacgtcttcgttcgctggttgc

SEQ ID NO: 175597 - DNA, 153 bp, Arabidopsis thaliana landsberg
atggtgggttctgttttgcagctatcagatattgaaaggaaaataagaaaaaggaagaagaagagattttggcggatagggagtgaggagaggaagggtgttgttgttgccgaggaagaaaaggaagagaagcaaacagagtcgtcacagtag

SEQ ID NO: 175598 - DNA, 71 bp, Arabidopsis thaliana landsberg
attttgatgaagacttcacattgccgcctgaagaggatgtatggaatgatgaggaagacaatcgagattag

SEQ ID NO: 175599 - DNA, 64 bp, Arabidopsis thaliana landsberg
aaaaaagaaaagatccaagaaaaaagattatattggttttagtttctccgacgacttcgacaaa

SEQ ID NO: 175600 - DNA, 383 bp, Arabidopsis thaliana landsberg
atgagtacaactttgctgcagccattgattaatttgttccactcggagtctggaaatggccagtggaaacgtaggaccgatgctgctctcttgcattgcaccgtgagttatttcattgacactcttcttttttacttgctatcaaactcttgtcaccgtgttaactcacttcttatgttgtgcagaccttacaatcattcttggacgaagtgttaccagcaatacccgactatgtcctcgattcatctgctgtcaaagaggcgactggacgtgaagatctatttgcagatgtacaacgtttgttgcctcctccgtacgaacaagaatccttcaaagcattggaaaggatgccaacgagacctgtgattcttgatgaggaatga

SEQ ID NO: 175601 - DNA, 196 bp, Arabidopsis thaliana landsberg
atgtcaaaggatgacctcgcggacagccttgcatacaacagcctgaaggtacagaagttgtaaacttaaagtttaagaaattgggaataatgtttttattcgcatgccaaacgtttatccttctttttcgcagggcttaattctgagcaacgccctgagggtcaaaagaatgtggaggatgaaagctgcacaatag

SEQ ID NO: 175602 - DNA, 672 bp, Arabidopsis thaliana landsberg
ggtttggagagagccatgaagatggagttcctcacaccgaccaatattcactaaatatggtaagcagtatcattaaccaaaatgtacatttcacatttgtcatagattttaattttctctctgattaataatcaacattttcactcacttcaaaatagatctgtatatgataaccatcgtgaattttttcaccaaaccaaaaaaataatgtaggttgaagagagtattccgaaaatgatggaaacaggcacaaacccaagccacgatcagacaacaaacggttggggtcgtcctacgcggccaccgccatcgcggatgatggattatccgaaaacatacccaaacccaagccgcggtcagacaacaaaccgtgttattcgtttgtcgccaccgccaccacggatgatggattatccgaaaaaagacccaaacccaagccacgatcagacaataaaccgtgttattcgtttgtcgccaccgccaccacggatgatggattatccgaaagcatacccaaacccaagccgcggtcagacaacaaaccgtgttattcgtttgtcgccaccgccaccgcggatgatgggttatccgaaaacatacccaaacccaagccacgatcagacaataaaccgtgttattcgtttgtcgccaccgccaccgcggatgaactaa

SEQ ID NO: 175603 - DNA, 547 bp, Arabidopsis thaliana landsberg
gtgagtgaactggagtcgcagattgatagctttgaagctgagttggaaggactgtctgtcaaaaaaggaaagacaagaccgcccagattggtaaaatctgataaaatatgcattggtatgcaaaatgctgtaatttcttctctcgtggtgagtcatgtcatttggcttgttgaccccctttcagactcatcttgagacatctattacaagacacaaggatcacataataaagttggaactgatcttgaggcttctggacaatgatgaattaagtccagaacaagtaaatgacgtcaaagattttctggatgattatgttgaacgaaatcaggtctgctatatctgaatcctggaatattttgcttatgtgttataccctgggtttcgaacattaaaatacacttatattatcttgtactgtgtttaactttcttctatgtaggatgattttgatgaattcagtgatgtcgatgagctctatagcacgttgccactagatgaagtggagggtcttgaagatctagttaccgctggcccacttgtcaag

SEQ ID NO: 175604 - DNA, 147 bp, Arabidopsis thaliana landsberg
  unsure (1)..(147): unsure at all n locations
atggnnnnnnnnnnnnnnnnnnnnnnnnnnnnnnnnnnnnnnnnnnngctggaagtgctgcccgtattcctgagctatgtcctcagcttcgtctacgtcggcgtctactggaccaaccatcaccacatgctgcacatggccgaaaaa

SEQ ID NO: 175605 - DNA, 319 bp, Arabidopsis thaliana landsberg
gacgggcccgtccttcagcgcgcgctccgggccacacagcagcaagatcgatgataagacggcgatctgcctgctggagctgtacaccaaatgcttcaaaaactgccacaagaagttgactgccgtcaagttgaaaggctttgcctcctcaaaaaccgaccaggaggcctgcgatcgtttcatccaggggttgcgtggtgtgatcgagcggtgccagccgtatctcgagcagcgcgccgaattgaacgtggacgccgcggaggatctgaccgttttctttgatcgcctcctagcaaagctgctgctagtcgagtgctga

SEQ ID NO: 175606 - DNA, 307 bp, Arabidopsis thaliana landsberg
atgcagccagcgactgaattcaaatcgttctctgtggaggattgtcccggtgagcaatgcattgtgatgaaagggaagtttggagaagatgaggatatcaaaatggaagcaactatgtttgatgggtttatgaatgttccaagagccggtttagatgcttcagggcacgatgtccgtcttcatattagcttgcttgttgacatttccaaggttgatggaagtgaagagatcgagttcctttgctccgtctggcctaaccgtattgaaattcgaaagctttacaagcttagacgcaacaaaatcactg

SEQ ID NO: 175607 - DNA, 351 bp, Arabidopsis thaliana landsberg
gtcagctcttactggctaagggtgaaatagataatgctcttcaggcatttaagattgtgttagtcactgcccctgataatggtcctgctcttttgggtcaggtataatcacttgtgatttcattttctgtcacttagctaataatttgtaggtaggtagattctgtatactagaatttattggtggtagtaagaatttgattctgacgctctctttcttaccaacctaggcctgacacagtattagtctattgtttacttgtctgcaaattaataacttgctctatcacgtatacaggcttctgtagaatttaatcgtggacgattttctgagtcattacaactatacaag

SEQ ID NO: 175608 - DNA, 110 bp, Arabidopsis thaliana landsberg
aacttaccggagctttcaccgggatcctggctttaagcgacttttcaggaaaatccatgactttgattcaagaaattcaacaagaagacctaaacgaagatggttgttga

SEQ ID NO: 175609 - DNA, 2941 bp, Arabidopsis thaliana landsberg
atggagaaattgaaatcactgattcctgaagatcttcttcaaacggtgaaaagcagcagcgtcgatgatcttctttccacttcttcttcgcttctccgtttgtttctgggtcttccccaatttcaccaagtacgtacaaattacccaaaacctactcttctcttatctgcgctactatcttcaattgaacttctcatcgctctccttttccttggttttgctttctcaggcggtgagtgagttagcgaatcctgaattgggatgctgtgggaagaacgaggagacatctttggatttgaaacgtagaggaaatcactgtttccgtagccgagattttgacgaagctttgcgattatactccaaggctttacgtgttgctcctctagatgctattgacggagataagagcttacttgcttctctgtttctgaatagagctaatgtccttcatgtacctctctttcttccttttaatcagtttcatcattgaatcaatttctaagctttttttctctttatagcttctcatgtatgttttgtatcttgtcttagaatcttggtcttctcaaagagagtttgcgggactgccatcgtgctcttcggattgatccttattatgcaaaggtaatgaatgcttactcaattgggatccttaagagtttttcagctcttaattcattgaaccttgtgtcaggcgtggtataggagaggcaaacttaatactcttcttggaaactataaagatgcatttcgtgacattacagtttctatgtcgcttgagtcatcacttgtggggaagaagcagctacaaaatgagcttaaggctatacctgactaccaaaataaccaaacattggaacacgatgaatatcgtccaagcaatgatgctggcgtgggtgagattttccacccaacactattgtcttcaggataatatttaggctttgaagtcttatatgctgaggtttagagaggatttttatattttgacatgtctctattaatggtctgtagatcatctgccgagtgtgcaaatggaagtaaagctgcgttgtgtgtcgacaaaagagaaaggaaggggtatggtatcagaatgtgatatcgaagaagcttctgtgatacatgttgaagaaccttttagtgtggtatgagctgtgatacaatgtttttttttatatacaatgaagtggaagctagtcaaatctagatggttctagcgttttaaaagttttctgaaacaaatgaagatataaattggttcatgctttaacacaatttttcttttgttactgaacatctttttaatgctgatgccacttattactacaggtcatatcaaaaagttgtcgggaaacacattgccatttttgcctgaatgagttgcctgctgatactgtcccatgtccatcatgctcaatacctgtgtactgctcagagtcctgccaaatccaatcaggtggaatgctgtctacaaatgagatggataagcatcacatttttcaaaaactacctgatgatattgttgagcatataaaaggcgttacatcagctgatatttattattttgcgactgatctcattcaagaacaccagcatgagtgtaggggagccaattggcctgctgtactgccatatgatgctgttttagctggtcgaattataatgaagttaataaatcaagggaaagcagctactgatctttctaaccttcaggagatattagtatgtcattttactggaaaattattccatcttctgcaacagtcacatgaaatctaataaggattgactaccctatatcttttcaacaggaactttcccatacctactctaaaatgaatccagagaacaagttggagctgcatctactttccatagtattgatttggtgccttagtaaatctagctgccctgatctttcggtttgtgaagcttctgtgacgcaggttttcctctacatctccctccctgcaccagccaatagttcattgaagtcaactttgctttctagaacttgtgcatcttctgacatattaactttaatggatgctgacgactttagtcttacaagttatactttcttttataaaagataaaggatgtcttgctgatgatcttttgtcattgaaatctagtttaccacttatcgtcgagatataaagttaatttcaaattggtttttcatctttagagtaaatctatcctcattgccaaaaacgtttactgcctgcaaaaatgtgcatataattcacttgatgagttcctgttatcataaatttatagagaagtatagctgtctacatgattcatatgcaactttatgttttggcattgttatttcgttttttcctaatttttcttattgaggtgttgaccactgtctggatttttcttttctgtgtagactatcatactgctgtcacaaatcaaggtgaactctatagctgttgcccgtatgaaatccagcggcgattctttcaagtgcctcccatctggaaacatctcaacaaaagagccaattcagagtttagagcaggtttgtctaggcagaggtactgcttattagaatgttatttatacctcttctcaatgaaagaaatcatagatatctgtaaagatggaatctagagttacagaaatgatatctgtaacctgattttttatgtttccgttatattttgagctgctcttctataaaattatgtgagcgtccactatgacatactttggtcctttctcagttgttccttttttcttatgtctattattgttgttttattcacagataagagttggccaggctctttataaaactggtagtttgttcaatcattcctgcaaaccaaacatccatttgtatttcctttcccgtggactgattatgcaaactacagagtttgttcccacgggttgtccccttgagctgtcatatggtcctgag

SEQ ID NO: 175610 - DNA, 432 bp, Arabidopsis thaliana landsberg
atgcagaggctgcttcgtcggggagacgtgttttacttccgggcagccgtgcctacagagtggcgtcgtgcaattaactgcactgaaatcaagctgacgttaaaaacaaccgaccgcgccgtggcaactgttcgctgccgccacatgagcaatgccttcgatctgttcttcgggaggtctgcccttttgtcgaaaccatctgtcccgcagcttgacgcggcagtcagggcgtattttcagggagaattgaataaggccctgttgctctcgcacgatctgccggacgatcttgcccttgatctggatgccgaaatcgagggactgcacgaagacatctcccggctaaccggcaatctgaagactaagacattcgatcctctcactctggccgaagccgccgagatcgtgcaggggcagatgtcgggcgaggaa

SEQ ID NO: 175611 - DNA, 949 bp, Arabidopsis thaliana landsberg
atggcagctccggcgatcctaaacggcggcgatgcgacggagagagaaacacgaatggctcactctgcaatgacattggttcaggtcataaatggaggataccatgtggttacgaaagtagctcttaacgttggtgtaaatcagctcgtcttttgtgtctttcgcgatcttcttgctctctccattctcgcacctctcgcttttttccgtgaaaggtccctttttatcttcttctcaaaatctctctgtttctttctccttttgcttgaattgctaaagtctctgaagtctctgtttctgattgttttgatgagtttatatgcggcaaaatcagacaaatagtttgatctctctggaattggaattagggttgtttttctttgttaattctggttctattgtttaatgatggattgcaattttgtgtgacttggatttgtcttttgataaagatttgctcttttaatttcttgtagaacgatcagacctcctatgaatagaagcatcttcttttcactcttctttcttggtttagcagggtaaagtaatcagcttgtatctctttatcttttgaatcatgctaatgaaagagtctaataacaacattcaatctcaatcttgataggatatttgggaaccagttactatttcttatgggtttatcttacacgaatccaacttatgctgctgctatacaaccatcaatccctgtctttacatttctcttggctgtcttgatggggtgagtatgagtttcctcaacattactgtaaaatgtgaaaatttgtaatataaagtttcaatcttttgatggtcttcttctttgtatacagtacagaaaaagtgaacttgttgaaagtcgagggccaaacgaaagttggaggtactcttgtttgtgtttcgggtgctatagcgatggctttgtttcgtggtccagccttgtttggag

SEQ ID NO: 175612 - DNA, 466 bp, Arabidopsis thaliana landsberg
gtatggtatgctaagaggaactctaagagcacctggagttggttggatgatgtacaacatgttggtgagcaacgagaagtcaatcgagtctcagtacaaatcccatgtttatgcagaccaaaccaacgtgaccgatgccataatccaaagcagatacgagttaacaaaacagaagggatcacgctacgtccctgcagcttttctgactggtttactcgacccggtatcatcccgggaagaatttctccaactgtttgctgatttggaagggaaattaccggttatggttatgtcaacaaaaggagctccaaaaagatcgaaagcagaaatggaagcattaagaggagcgaaaggagtaagcaaattcgtggaagttgaaggtgcactcttacctcaagaagagtatccttctcttgttgctcaagagctctgcaacttcttgcaagagacttttgctaaatgttag

SEQ ID NO: 175613 - DNA, 388 bp, Arabidopsis thaliana landsberg
gatgatcgaggcaaaattcactcgcatccagaaggtttgcgaagagttcttaactatatcaaagataaatacaataaccctatcgtctatgtaaaagagaatggtaagcaagaaataatatactgtaccttttttatagtatcaacagcaaatgattttattttattttttggtaaaaaaaaaaagcaaatgattttttacgtctctttagataatttttaaattgaataattcttctttttctaaaagtattatttgctaacttatttttgtaggaatagatcactacgatgatggtacaaaatcgcgggaaacaattctcaaggacacatttaggataagctaccatcaggaccatcttaaacaagttcacaaagctataatgtaa

SEQ ID NO: 175614 - DNA, 48 bp, Arabidopsis thaliana landsberg
atgtcgtaccccgaaatcgctataactccgctctgtagtattcgtccg

SEQ ID NO: 175615 - DNA, 588 bp, Arabidopsis thaliana landsberg
agaatgtcataacaaaaaagaatcaactagaaccttatcaaactctctaactaatcatttcaaaaccatcaatcatcgcgtacgagcacgaaagcacgtaaaacccgaaaactaaagctattttgacctcaagcaaagccaatgaaattcacactatatatcaccaatcagagcctataattttccattactacttagaatgtcacaacaaaaaaagaatcaagtaaaaccttatcaaactctctagctaatcatttctcaaccatcaatcatcgcgtacgagcacgcacgttagaacgtaaaaacccgaaaactaaagctattctgacctcaagcaaagcctatgaaatttacactttatatcaccagcctataattttccattactactaagaatgtcagaacaaaaaagaatcaactataaccttttcaaactctctaactaatcatttcaaaaccatcaatcatcgcgtacgagcacgcacgaaagcacgtcaaaaccggaaaactaaagctactctgacctcaagcaaagcctatgaaattcacactttatatcaccaatcagagcctataagtttccattga

SEQ ID NO: 175616 - DNA, 310 bp, Arabidopsis thaliana landsberg
aaaacgcggaagagcaaccaaaagaagagtaaggagtaatcgaaagagaggaaaagagaagccatttgaaaaacaagaccttgttggcgtaatttgtattcgtcttgctctttcgcaatcatctgtcttcttcccttacggaccttcattcaacaacaacaacaacaaaaaagcagacccagaacccaaaaaaaaagaaaaaaaaggagaagtttggtgggaaaagttaaagatagaagaagaatatgtggttgcagcccatcaaagtggggaaaaagttattgaatattacaaaaggaagagaatttga

SEQ ID NO: 175617 - DNA, 121 bp, Arabidopsis thaliana landsberg
gtgcaagagttgtggagggagtggattaagtgactgttctcgctgtcttggcaccggagagtacagatacatcatgggtttccgcttcttaaaccaaaacgatgatgccgatccacaataa

SEQ ID NO: 175618 - DNA, 273 bp, Arabidopsis thaliana landsberg
ccatcgaaaaatgaggtcaagttggaggaggcggcggcgagagaaactcatcaaggagcaccagtaataccagagatacgaccaacggcgagggatttctaccagccatcgaagaatgaggtcaagttggaggaggcaccggcaggagaaactcaacatagaacaccagtaataccagagatacgaccaacggcgaggaatttctaccagtcatcgaagaatgaggtcaagttggaggttatagagctaaattataaattttgctacgcgtag

SEQ ID NO: 175619 - DNA, 441 bp, Arabidopsis thaliana landsberg
ccatatctcgtacttgggttgatatctcagattataaaggtaccacctttaagctttttcattgatagtttataggaatttatatgatggtttcattttgtttaatgttgacttgttaaaaaacttactaactcctgacaaatttggtgttcttggtgcaaaatatcagatccaaatgttggctgatctcaattttaagaaaactccttcgctttttcaactggtggacgacactcaggtaaatatatttgagttgttcagcgctttccatgaagatttgttttcatgatattgaaacattacaaaatgttcttgacgacgcaggatgcagaggagctcatgggattggctcctgaaaaagttttgctaaaatggatgaatttccatctgaagaaagctggttatgaaaagcaggttacgaatttttcttctgatttgaag

SEQ ID NO: 175620 - DNA, 131 bp, Arabidopsis thaliana landsberg
agacgtggagacgatcgggagaggaaggagaaattgagagattgagatttggggttggtagaggaagaagaagaagaagaagagaaggcgatcgcgatgggaatcgcagaggcggcggctacgacggctga

SEQ ID NO: 175621 - DNA, 564 bp, Arabidopsis thaliana landsberg
gcaacctcaagaatatttctgttaaagaagctaggagccccaagacgagcagctcgcctaaatggacaggaaattttattcttatggtcgagcttcgcaggaagatctttacctttagagacatcattgatctttctactcttgatggttctccttcaataaccgatgtgcgtaaaccgcaaccttatatccttgtttattgtatctagatgctttacatgtaattttgactcacttgtttgttttgttgtgtagatggtgatgcatacaatgaaagatctccagaaaatttgtcctgagatcattcatagctcccatatcatggaaattagacgtgcaaatgtcgataaggtattcaaaacatgatccgaatatatgatttacctttgtcctaatatatgttcatatatcttgaatctgatcaagtgtttctctcgcaggttcttgaccatttctttaatgctttgaaatccattggagattcatggattgataaccctgaatggatagctaaatccaagtattggagtagcagcgtcgggaagaatcagtctgatcgcttag

SEQ ID NO: 175622 - DNA, 613 bp, Arabidopsis thaliana landsberg
ccggaggaagtgaagcggagctcaatcgggtgattggaagatacaacggaaagaagaaatcgtctgagggatcaaagaggcgggtattaacatcggagtggtaatttatagggaaaagtttataacccgacccgattctgatttagttgtcccgggtcccatttttttttttgcacttcaaagattatgtttattaatggtccacagaatacagcccaataaaagcccatttagttacatatcccgggtccaataaagtaaataattagtcaaaaattatataattaagtaattaataattttgatggaaatttggcaagacaagtaaataaataagagtaaaagtgattttctcgcatattactcttcttctagattttggcgcttttttaaaatttacgttagaaatactaaataaaacaaacaaaacctatgccctgttcgtttttctgtcgctggatccagcgacagcgaccaacgaccagcgacagcaaccagcgacaacatatattgttcgattgtctgtcgctggactcagcgaccaattacatcaacaatcgctaataattgtcgttgtgttgttcgtttgactgtcgctatagacagtcgctag

SEQ ID NO: 175623 - DNA, 263 bp, Arabidopsis thaliana landsberg
tgttaaaccctcatatggcaatcaaacccatggaaccagtgattgagcctttggaggaagaagcaaaacccacatctgagaaactgaattatgaagaccatgaagtagatgtggtggtgataaaacacctattatgccctgatgagagattcaagatcacacaaccagatctagagtctccagctaatgctacagtggcggatgagaaatcgaattctacaccgatagagacaatctatagctgtactaacgagagaagatga

SEQ ID NO: 175624 - DNA, 184 bp, Arabidopsis thaliana landsberg
aaaagtctcagcccatgctatcatctacaacatttggcgtcagcgcaacaatgtcctccataacaatcttaggatcgcacctcttatcatcttcaagattgtcgaccgcgagattcgtaacatcatctcctctcgttaccacagaaagagatggcgcaacctcatggtgctttggattcgctaa

SEQ ID NO: 175625 - DNA, 359 bp, Arabidopsis thaliana landsberg
atggaagaagcaacgacgacaggtgaagaaacgatgtggtgtggtcactgctgcgttaaaactccgatccgccgtgaagggaacgctggttctgtcaagtatgttctcttaccaaattcttttttccattaatctttctaatgtttaacttttgtgtttataacttggatattaaaataattcgcaggtcgtgtgattggtgtggaaaagtgctagcagatgaaactggaaccgttgaagaatataatcaactctttcttcgatttcaagctttgcaagactctcttactcttaccaacaagagaagtagacgaatcaagaaaactagacgaatcaagagaactagacgaataaactga

SEQ ID NO: 175626 - DNA, 214 bp, Arabidopsis thaliana landsberg
atctgacgaacgcctggtagatttcggtttctgcgcttgcgacggcggtggttgtctgatcggaagacttggtgagaagaacaacgacgatggagttcccgaggaggaaaacgaacagaggagtagatatgacggcggcgatacggcggagaaacgctccggagatttgaacgacgaaaggaagttgcgaaaatgtccaaaagatgaagagtag

SEQ ID NO: 175627 - DNA, 98 bp, Arabidopsis thaliana landsberg
atgaacacaggacttaaaaaaaaacatgctgcatctaaatcagaagtgactattcgtgcagaaaactggatccgtagccgccaaagcgacgccgccac

SEQ ID NO: 175628 - DNA, 2196 bp, Arabidopsis thaliana landsberg
gtgcacttgataagttccgagagtggcttaactgttagaacaaagttgcactctctgaaaatcaaagatgaactccagcagcagcagtcaggaagtgctcagtatttagcttactcggtcctgaagaacgaagacatacaagaatcattaggaacatgtgattctttcgacaaggagatgcctgtaggacatgcagatgatgaagatgcctacacagatgctttaccagagtttctgtcacctacagaaccaggtactccggatatggatatgattcaatgcagcatgatgatggactccgatgaacatgtgggactcgaggatactgaaggagggtttcatgaaaaagatacatctcagggaaaaagtctttgcgatgaggtattttatgaggtgcagggtggtgaattttctgattttgtgtcagttgttttcttgacgaggagctccagttcccacgattataatggaattgatacacaggtatgtagtgaaagaccatcggaagacatcttactgcctcacatatttcttatcagctttactaagctctgtttgaaatcaattccagatgagcattcgcatgtcaaaactggagttcttttgcagcagaccaactgttgttgctctaattggttttggatttgatttgagcactgcatcatatatcgaaaatgataaagatgccaacactttggtacctgagaaatctgatagtgagaaagaaacaaatgatgaaagtgggcgcattgaaggcttacttggatatggcaaggatcgtgtagtgttttacctgaacatgaatgttgataatgtgactgtgtttctcaacaaggaggatggttctcagcttgcgatgtttgtgcaggaacgatttgtgttggacattaaggtaagatattttggccgggggcatcttggtgtatttaatttcttataatgattttctcttaatattagccctatgcagtagtacaagaaaatcaaagttgttcatgatattatgtaattgggtttccaaaagttgcatttgtagttgatcctctagttaaatgatttcatcacagcatcattttaagttaactagtagtttggctaaatttgtttatttttcaaggttcacccgagctctctttcagtagaagggactctgggaaattttaaactctgtgacaagtcgttagactctggaaactgttggagttggctctgtgacatacgagatcctggtgttgagtctcttatcaaggtattgaatattatataaaaatttctgatggttttattcctgtttctgtgatattgttgattcttgtttgatgtggttgtgaatctgcttgattcttgttttacactgcagttcaaattcagttcatatagtgctggcgacgacgactatgaaggatatgattatagcttatctggtaaactatcggctgttcgcattgtatttctctacagatttgttcaagaggtaccatgatcactgaacctgcctcttacctaattgatttgaaatgcaaccgaaagttatacaaatactcttctttggacatcattttgttgtggaacaacccaatgaaatggttttcaggttacagcatatttcatgggacttgctactcctcattctgaagaagtcattaaacttgttgacaaagttggaggctttgagtggctaatccagaaagatgaaatggatggtgctactgcggtgaaactggacctttcgttagacactccaataattgttgtccctagagattctctgagcaaggagtaagtagaaatagagtgtggaaattattaatatgtgctatcctatcaaatatctattaggtttaggataacacataacttttcatggatctctagctcttttgacaccttggtatatcaattatcacagtgtttacttgacatcaaaatagttaaggcagattctggccttttggctgtaggtctaaagattctgaaagcttgaggcctgcaacatgtttttttttagctgaatctccaaaatatttagctcaactttttctctgaatcttcttggcacaatctcaacacatttgtatttcctgcagttacattcaacttgaccttggtcagctggaggtatcaaatgaaataagttggcatgggtgtccggagaaagatgccactgctgtacgtgtagatgttcttcatgcgaag

SEQ ID NO: 175629 - DNA, 703 bp, Arabidopsis thaliana landsberg
atgagcgcacaaccattcttctactggtgagtcccgtaactatcgttatctttttctgttgtatgaatctgttctgaactttgtttccacctatttgaaactgaaggttggacattggcgatggaaaagatgtgaatcttgaacaccacccaagaagtgttctgcaaaaacagtgcattaaatatctaggaccagtaagtcttttttcggtttcacctgctaaaaaattagttcagcgtacttatcttctttttgctcatacacgtttgtgttattcaacctgcagctggagagagaagcatacgaagtgatagtagaagatggaaagctaatgaataaacaaagcatgactctgatcaattcaacagaggattccaagtcaatttttgtacttagcacaactagaaccttatacgtagggcagaagaagaaaggtcgtttccaacattcgagtttcttgtctggaggtgccacaactgctgcaggaagattggttgctcgcgaggggatcctcgaggtgtgttccgattcagttttgctttctagtttggttctcttagcctttatgtcgaggatctaatcaaaacacatattttctcaggctatatggccatacagtggacactacctcccaacaccagccaacttcaatgaattcataagtttcctgaaagaaaacaatgttgatatgaccaatgttaag

SEQ ID NO: 175630 - DNA, 238 bp, Arabidopsis thaliana landsberg
atggaaaagctggtcggcgacccgtgcaaactggtgcgccagctggcttccaagccgcatccgcacattccccttcccgtcaacatctacgcttcgatcaggaaaaattccatgggcgccaatctgtccaatgacaacgagctggccgcactcgccgatgccgccaaccagcatccgggcccgtggcaggccgcaccgctggttcccggcgccaccagcaccggcgccaccgtcactg

SEQ ID NO: 175631 - DNA, 198 bp, Arabidopsis thaliana landsberg
aatctggacgcggtcctagctcttatgtgcactgatacacagcgcatccagtcatattcaactacaaattcggtatcaaagcttcttgatgattcccaaagctttgatggagaagctgaagttcttttgagtactctcgttatatcttacacacgaactctgaaccatgaaccgtacacccgggaactcaagacctaa

SEQ ID NO: 175632 - DNA, 69 bp, Arabidopsis thaliana landsberg
atggctcatgtggatcctcgtgtcgttcgtttagccattattagcgtcaacgtggaacatatcttccac

SEQ ID NO: 175633 - DNA, 716 bp, Arabidopsis thaliana landsberg
attttcatctgtggctggtgggtgtgcccagaactctatcttaggcgtccttttgacccgcatacttcatccagacttgataacttgttggagaataaagctaagcaaggagttcaggtacttactacagaacatgcatgtacttaatagctattatcttctgttgtgaagcatgtctgtagtctgcaatggagatctgacttgtcaggtttggtggattactatctttcaactttttcatttttattactttctttttcagatatacatccttatctacaaggaggttgctcttgctttaaagatcaacagtgtatatagcaaacgcaggcttcttggcattcatgagaatgtgcgggtacttcgttatcctgatcatttctcaagtggtgtctacctctggtatgatatggtggacagttctaatagatcactctaatatgtcacaatgctctttctagtttatctttctgagtttgatattagataaactgttaaaaaactcctatctgaccacaaaaataagcgggaaggacattgattattacctctgcgtgtctttctaggtctcaccatgaaaaactcgtcatcgtcgataatcaggtttgctttatcggagggctagacttgtgttttggccgatatgacacgtttgaacataaagttggagataacccttctgtgacatggcctggaaaggactattacaaccccag

SEQ ID NO: 175634 - DNA, 251 bp, Arabidopsis thaliana landsberg
gttggagcttaagccatttggaattgatgtaatcaacattgtaccaggaggtattcaatcaaacatagctaactcagggatatcgagtttcaacaatttacctgaattgaaactatacaaaccgttcgaggacgctatccgtgagagagcgtttctgtcgcaaaacataaagccgatacccacagagacttttgcgaaagagactgtttccgtggtgctgaagaaaaacccaccggcttggtactctacag

SEQ ID NO: 175635 - DNA, 51 bp, Arabidopsis thaliana landsberg
ggcatagttggtcggcaagattcttcggcgattctgatattggataactga

SEQ ID NO: 175636 - DNA, 287 bp, Arabidopsis thaliana landsberg
atggcggtatgacctcggtaaaaagaaaaactttgaacaggttagctagttaaagtcattggcttagtttcttcttccatctgaatgtagcacttcaaagtttttaagttgctttctcttctccctcactgctatggctttcttttttggggattcatcgtgtttaggtatttggaatggataagagatactggttaatcccaggatacacagaagaagatctaaggcgaatgccggagctgcagggacttgaatacccttcgaaacccgactttgattcccagtga

SEQ ID NO: 175637 - DNA, 500 bp, Arabidopsis thaliana landsberg
atggttggattgagcagagcagcggttgattgttacattaacggatacggaaaccaggtaaatcctgctcagaggagagaacattagttaacttatacagccacaacaggaaagctaaacatataataagcaagaaaaaatgacatctatgtgacaatgtgcagcttgaacagaggtatgctgaagaaacttctgaactttatccagcacatagatttgtaccatgggtggttgtgaataacctaccacttcaagaggttagtcctataaattaagctaataactttcaagatcaaaggagaaagaaaacttttcatttatatgtctttggtgaacagaactaccagaactttgtcatgtatgtatgcaatgcttatggaagtaaccaagtaccagaagcgtgcaggatcctcaacagttcggtggagacactaagcaggtccaatagttcagtggagaagctaagtaacagtccccaagtttgctattccaatcactaa

SEQ ID NO: 175638 - DNA, 110 bp, Arabidopsis thaliana landsberg
gcctgggtttacggcaaaaaccgttcaaaccgaaccgatcaaaccgaaacattcggttatcggcgccgacatttaagaaaggagtaaaccggtcggcaaacttaatttga

SEQ ID NO: 175639 - DNA, 442 bp, Arabidopsis thaliana landsberg
atgaagctggtgagcctggctccccggtacgtgggcgacttcgagaagggcgtcgatttcaagggcgacctctctctgctggagcggtctctccaggaccacgccgcgatcgccgaactgctcggcccctacaagctgagcctacactcggggtcggacaagctttcgatgtaccccgcgctggctagggcctcgaaaggccggttccacgtcaagaccgccggcacgagttacctggaggccctccgcgtggccgcccggcacgctccggagttgttccgagatatcatcacctgtgcccgaaagaactacgacagggacaaagccacctaccacgtctccgccaccctcgcatcggcgcccgatccctcggatgtctccgacctggccgtgctggagcgcgagtatctggagaactggagcgagaacaaaccgggcaagg

SEQ ID NO: 175640 - DNA, 367 bp, Arabidopsis thaliana landsberg
gtattacagaacatatcgcttgaccgaaaagagtgatgtctatagttttgggatcgtgttattggagataatcacaaatcaacccgtacttgagcaagctaacgaaaatcgacacatcgcagaacgtgtaaggactatgcttacaagaagtgatattagcaccattgttgatcctaacctcattggcgagtatgattctggttctgtgcggaaagctcttaaactagcgatgtcgtgtgtggatccatctccggttgcaagaccagacatgtcacatgttgttcaggagcttaaacagtgtatcaaatctgaaaacctgagactgagggcaggattgaaccaagtcatagactcgaaaagttcctag

SEQ ID NO: 175641 - DNA, 182 bp, Arabidopsis thaliana landsberg
tgagatccatctccggaacttggcagtacagagatttgctgatgacctctcccctgtctcactttgcggtgaagacatttgtgaagagtccacttaatcgtcttgctatgtcgacaatcccaaaaaaacagatccttgctaaatcagatcattattcgctgcctaaccatcttcgcggatga

SEQ ID NO: 175642 - DNA, 297 bp, Arabidopsis thaliana landsberg
atgattggaaacaacagggaaggatttggagagtactacgagaccgtcaagaagataaagaaagatccagccttcgagacaacgacggatcatgccgtgatgggaatcaggagacatgtggcggtgcctccggggacaacgttgaacaccgtaacaccatgcgccgcttgtaagctcctccgccgtcgttgtgcggaggagtgtcctttctcgccttacttctcgccgcatgaacctcacaagttcgctgccgttcataaagtctttggtgcaagcaacgtctccaagatgcttctg

SEQ ID NO: 175643 - DNA, 550 bp, Arabidopsis thaliana landsberg
atgtgcaggtatgagtccataatcgcaacactctgtgagagtctagacacattggatgaaccagaagctaaggtaacaaaatttgtcgtttgggtagtgtatattagctggaagcttctccatcgcaaatataatcggtgaaactcatacttgtatttgttggcatcttgaaaggcatctatgatttggatcattggtgaatatgctgaaagaatcgacaatgcggatgaacttcttgaaagcttcctggagaatttccctgaggaaccagcacaagtccaactgcagcttcttacagctacagtcaaactatttctgaagaagccaactgaaggcccacaacaaatgattcaggttctgccatgaccattatgaagactaccttttgctctcctaatcgattaaagcgcatgtatttgacgacaggcctggcttttgccatgtttcaatttttcaggttgtcttgaataatgctactgttgaaacagataatcctgatctcagggatcgtgcatacatctactggcgtcttctatcgactgatcctgag

SEQ ID NO: 175644 - DNA, 116 bp, Arabidopsis thaliana landsberg
atggtaatggtatgtcaagtgagaaaatagttaggcctggacataatacccggaatcgaatacccgaaccgaaaaacccgaaaaataatcgaaccgaacccgaacctaatttttag

SEQ ID NO: 175645 - DNA, 691 bp, Arabidopsis thaliana landsberg
atgaaacgttcaagaaaattctcatcgtcgacaacaacaaccaccgttattcacactttctataatgaccatactacccctccggcaaccaaagaaatcccgattgaaactccattaccggcgacgaaagccaacgtcaaaacaaacgccaccgccgcagcagcgaggattcagtctggctaccgttcttataggatccgaaacctatacaagaaaatctcatccatcaatcgggaagcgaaccgtgtacagagcataatccaacggcaagaaacagtagacgccattagaagcgatgagaaggaacgtctgagaatgaacgagactctgatggctctgcttctgaaactagactccgtccctggtttagatccgacgatcagagaagctcggaggaaagtgagccgtaagatcgtagggatgcaggaaatactcgattcaatctcggagactaaagacgaaattcaatggtggaattacaacgatctcggcggagtagactccggacaaggcggtggcgcgtggcctttgtattgggaagaagcggtggaggaagagatgtgtagagagagaggcggtgaggagatggagagattctgtgctcagtatttgggtttcagatgtttccagagatttctcagagaatgacggcggtttaatccggtgtgtcgcggtgtaccgtgtacgatag

SEQ ID NO: 175646 - DNA, 1118 bp, Arabidopsis thaliana landsberg
aatattgaagcagacgtaggtgggaagggagatagtttgaaaccaaatggtcctttagctaggggagctagtggttcagttaggaaaatcgaagacagcgcttttgaatcttctgactgtaaagaaaacagtaatggttgcaaagaagagaaagaaaaaggtcactaccaactcgctataaaaaaatctacacttgcagaagaaaggtctaacaaggattctggctctaggggaaatcattataatggcaaagatcaagaaagtgaagttaaaaaacagttaactaaacaaaaatctatgcctggcgaagaaagatatagtaactcttttgaagcttctggctccaggacaattcattccatttcaaagaaagctcaagaaaatgatgttaaaaagcagttgactaaacaaaaatctatgcccactggagaaagatatagtcaagagtcgagtggattggatgacaggcctctgaagaaacagaaacttgatggttctgttacagtacgagatggatgggatacaaccattttgcagaacattacttctgatggtaaaaaggatacaggatcttttaagagacctagagacaaagtgactatagaggaagtccctcccgaaaagcgcagctttgttaagaaccgagatcttgtagtgtcagtatctgaaggaaaaactacaaaaactgtaactgaaaaaggtatatccaagaagcccagctttggacgtgctgaggacaagatgtcggcagatgataatgaaagaaactatcaagtaactgaagtgtgccgaaggccggatgctgtaagtttatacttactatatgtttcctgcaatatgatttagtttacattggtttggaactggctgtttcatgagatttcagagcgtgttgtaaaatctttagatgcaaggatgtggttttgcaagaacacaattctaaaaggagcagttttgttttacagtccttcacactgtatgttgtatagttgtagtgatgttcggtcattcttctcttcttattatgttaccacaatgcttggtaacattaaggtttatctaacagatttttgtttccttatttatttcagggaaaaagtaaatggttccggagtctt

SEQ ID NO: 175647 - DNA, 647 bp, Arabidopsis thaliana landsberg
atgaagcttaatttggagagaaatcacttaaactatgatgacgagtttctcaaacaacccggagaagctcagagtacagtgagtgttaaactctctttttgctttctgattcagagtatataggatacacgtaacctattcaagattgattcttattttttcttaaacagcgagttaaatgcactcatcttccatgggaaactgcatcggaaagtgaactaagccaatatcgtccagatattgtgtgagtaaaaaatctagaattatatagcagaagatgttgcttatctcactgacccttgcgttttaacagtctaggcgcagatgtaatctatgatccgtcatgtctccctcatctacttcgggtgctagtagcccttttaaagaacccacccaaaagaggaaatggctctctcgagactgaagacagagacacgacacaagaagaacacagtcccgcggtggcttatatcgcatctgtgatccgcaatgtagacacttttaatgtgttcttgacacttgcagaccaaatggacctttccatcacagacgtgaccgcagaacttacgcctcgctttgagcttttaccatatatgcattcgtatgaccgctcaaccgttcggctcttctccatatcctccagataa

SEQ ID NO: 175648 - DNA, 354 bp, Arabidopsis thaliana landsberg
caaagctacgggtattgatggctcattctcaccagctcggataggttatggtaattcctttgccgcccaggaggagggtgaccaagccatgtctgcctatcgcactgccgctagactatttccagggtaatcaagttactcttgttttcttcaaaactagtgactgtaaatctgtaacttgtgactaaaatgaatcatccttagccctgaagcattgtagaagtcttcttattacgttacaaattgttttttacaggttgaatcttgatattatcttgttccaggtgtcatttgccaactctgtacattggaatggagtatatgcgaactcacagctacaagcttgcggaccag

SEQ ID NO: 175649 - DNA, 486 bp, Arabidopsis thaliana landsberg
atggaggagacgcaagttcttgagatcaatctcatctctgcgcaaggacttaaagaaccgacgggaaagctccggcgatttcagacttacgcatccgtctgggttgattcttccagcaaactccggactcgaattgatcggatcggctctgagaatccgatctggaacgacaaattcgttttccaggtatcgccggagtttctatctagcgaaacttctggtgtttcaatcgagatctacgccgttggttacttgcgagatcatctgatcggaactgttcgcttcctcgtgagtaacttcctcccaaccgccgccgtgaaagttccatctctcgtcgcgcttcagatccgtcgtccttctggaaagtttcacggcgttcttaacatcgcggctatggtgatggatgcttctgaacttccagctgatttcttcaagtcggttcaagagatccgtcggagtcggaaaatgagaaagtctagatctgcg

SEQ ID NO: 175650 - DNA, 370 bp, Arabidopsis thaliana landsberg
atggttgagattcagggaagattcaaaagaattgagtcggctttcaacgtagccgcggctcgtgtacatccaccgtgtgataacagtagcggaagcgatcattcgccggatctttccgatttggtcgcatcttttatagagaaagagggacaaatagtattacgtgaagaagaagaaacttcttccgacgataacaatttggaagatgtgaatgagaggttacggaagcttctagaaggtttatcctgtggcgaagagcggatgagaatactgtcagcgacgatggaggttgctggaacgttcgtcggagatattagttcttctaagcgtcacttaatggcgtttctacgtaacaagggttttgatgcag

SEQ ID NO: 175651 - DNA, 542 bp, Arabidopsis thaliana landsberg
atggcggaggctattggtgctgtatctttggtgggtcatcgaccttcaattgtgaggattacagtgaagaatgaattgaaaacgcagaaatcacagagcattgttcgctttccggtgaaggtagattatagtgcgaaaggtgttctctctcatttgatgacgcagagtgtgaaaaagaatcgaatgtcggtgtttccgatcagggctcttgctatggaattgacgaaagagaagaagaaagacgatcggttaccgaaaacttggaattatcttgattctggtgctgatgataagcctagtttatggcctcctgagaacaaagctgataagccttcattgcacaatcctttacttaggcaagagcggatgggttgtggttggttaggtgctatatttgagtgggaaggagtattgattgaagacaatcctgacttggataaccaatcatggcttactttagctcaggaagaagggaaatctcctcctccggcttttatgctcagacgtgttgaagggatgaagaacgagcaggcgatatctag

SEQ ID NO: 175652 - DNA, 305 bp, Arabidopsis thaliana landsberg
tcttgtgtaaatgcggttctgaagtttctgtcacctgagcacgttagcgaatctattaaacgagtgaaggagctcaatcaacttcctcagagcgtcaaatcgaaagcaaataagattgaggtacgttcccttagtttaaaagttaagacaaggttgagttagaaaggtctggtgtttatgtaataatatattgctgcaatatccaggtgaagaaaatggcgattcataaaatcagcgaagctgtaaaggaaattcgggaactcacatcttcggattcaactggtgcattgagattatataactag

SEQ ID NO: 175653 - DNA, 133 bp, Arabidopsis thaliana landsberg
gttacatggaaactcggtccgaggtccgtttccagtttccgaaatgtttcgaaaacggaaactctccggaaacacgaaaattgtcacagaaacgcgtttcctagatatctatgtttggaaacaagatggaaat

SEQ ID NO: 175654 - DNA, 727 bp, Arabidopsis thaliana landsberg
atgggctaggtcgtaactacaacaatggaaaagccaacgtggaagagttggagagacttgggtgcaccgtggtccgcggtgttaacatacattccatgacctcagattgtcgcctagctcgatatgacataatcatatttcatttcattcgtgcagggtaaggttttggtcgtgagaatgaaagcttatttcatcatgcatgtatattgtgatatagggatggacaaaacatttgaaatctgatccgatatgcgtaggatattaggagtctattaatcatgatctcagtatttgatctataactcaaaatatccgtaccgtacgcatgtttggaaccgctctgatttttgtttagtatttatgcatttggatacgtgagaataacataaagtttggtccattacttattgcaacattttttcctgttaaactctttggtatataataatcatcatcatttgtgtgtacaattcacaggaaacaccatgaggtagtgaaaagctttatggagagtgcgagagagatggtgaaagacgaaaatggagagattcatgtcactcataagacaatatacccatttaacgagcaagatatcaaggctcttgctgaagaaacgggtttgcgtttaatcaagcagatgaaatttcacaactggatatttcctggcaactccgttgatacctattctattggatcatcagctgttactttcatgtttaagaagtag

SEQ ID NO: 175655 - DNA, 157 bp, Arabidopsis thaliana landsberg
ccgtggggttacattcattcctgttgtttgtcgaaaaattgagatttggcaatatcggataaaatggattgaatatatgataccacagatgattgctaacaatcgaagtttcggttatgtgaatagctttagagaaaacctactcttatttttgtaa

SEQ ID NO: 175656 - DNA, 149 bp, Arabidopsis thaliana landsberg
ttggttttgtcgctggatattttcttcatcgtttcttcactgaatattccgacgacaacctaacttttcactatcttcgcctccgacttgctaccaacaccgtgaatccagtagattcaatcgaacacgtttttatgaaggaaatctaa

SEQ ID NO: 175657 - DNA, 958 bp, Arabidopsis thaliana landsberg
aagaaaatttggggactgaagaaggaacggaggaccctgaagactacactgacgataatgatgattacaatagcattttgagacctgcgtttgaagtagatggagaacctgattttagtactggaccaccagaagatgggcttgaatatttaagacgagtcaggtatattatctctctgtttccatctttctgtgtctttacacttttaaacttttggtattatggttaagttgttttgtttcctcaatttaggtgggaggctaagggaattccgaatgtaagagtagccaagatagatgaaagcacgtacataaagaaagagcaaagtgtttatatgccactaattcctgaaatccccaaatgtccagagtacctgttacccatgaaggaatgggaggactcgttgcttttggactttgtacaccttcgccaggtattttttcctgatatttcatctgacttacatggttggttaatagcagtctctctcttaatagacgaaaatgaaagtaagtgttgttatttttacagactctaacacaaagtgccaacagctgtgaggatgagataatatcaagtcagtgtgtagaagatttgcttgtggagatgttcaataagcatcttcacacagaggaggatgagtcttttggtgaggtggtaacagacatacaaggaatggactcggtgacgcgggtatcaaagctgaaaaagcgtatatgtttggttgagaaggagagcggtttacagagtagcgattgcaaatgggtagtagcgttgtgtgcatcattggagactcctttggatgccgatacttgtgcttgtctaaggggtcttctgaggaagtgtgctagtgttcgtgcagagacatcattagaggttggagatgaagaagttatcaccatggcaaatatgctcatcaccatcgccggcagatactttggccaaatgggacagtaa

SEQ ID NO: 175658 - DNA, 251 bp, Arabidopsis thaliana landsberg
atgattcggtaagtccttgatttggtttaatacattcttcgccagttattggtgtcaaaatatttgaatattattctcctctgaattttgatgtccctttacttctgtgatctttatagtaaaaatataatgtgctgattctgttgtgtaggtattattctcacaacaatgagtacattgagatatgccgtagctacaaggcgatatatgatatcccttctgtaaaggaaaacccagaacaatggattcca

SEQ ID NO: 175659 - DNA, 538 bp, Arabidopsis thaliana landsberg
atgatcactaaagatttcgtactcgatcaggtttctgattgctcatcatatgggataagtacgagagacattttgaagatagaagatgatcacagtttagaggcaaagtcacaaaatcctccgaaaggtaaatccttgtctgaagagtcattggttgtggacaaactagagatctccgatagattcacggatccaaacaaagatgcaaacaagaggaaagttctcgagagacttaattcagatttacagaagctctcaaatcttcatgtcgccgttgaagatttgaaaatcaaagtggagacagaggagaaagacgagaaaggaaaagaaaacgagtacgagacgatcaagggacagatcaacgaagctgaagaagcattagagaaactgttaagcatcaacaggaaactggtgacgaaagttcaaaatggatttgaaagatcagatggaagcaaatcatcaatggatcttgatgagaatgagagtagcagaaggaggaggatatcagaacaggcgagaagaggatcagagaagattg

SEQ ID NO: 175660 - DNA, 173 bp, Arabidopsis thaliana landsberg
ctacggatcggcttttcgtcatccacgaaatcactttctctcctctaccgctgcctccggacattaacaagtatcgtcggcgatcaacaataggagaaggacaagaagagacagaagaagaaccgtcagatgaaagagaggaagtagttgaggaagaagtagacaagatttga

SEQ ID NO: 175661 - DNA, 257 bp, Arabidopsis thaliana landsberg
ctattgatggtactcttggtctggttgtcacttttcggatcaatcgatctacgactactggtcaccaacacattttgacctacaaactcctgatcgatcgttttaggccaaacaagtccaataacgcatcaaaacatccaaatctctcacaaacacctagtacatgtaatagactcaaattaaaacaagagaaaaaaaaacgtaaaaaaactgcaatacgacaaatgattcaaacgaaaactaaacgaaagacttaa

SEQ ID NO: 175662 - DNA, 148 bp, Arabidopsis thaliana landsberg
attgactcttacaaacattttatgcagtaaacttattgagattacaaccagcgcggagctaggagctggattagccgccacacttgaacttccagaacatgatgtgattcaacaatactcaaagtctaacaatagactgctgattctt

SEQ ID NO: 175663 - DNA, 539 bp, Arabidopsis thaliana landsberg
atgaacgtttcaccaggacgtgagaggcttgagattggagaactgatgcagcgtagaaaggagaaacgtaagagcagaagaaaacgaaaagaaactaagttgagacagaacatcgagaaggagaattgggtccaaagtaatggttgttggtccaaagaagaagatttagtaaattgtgaagtgagatcaacaaaagaagaagaagagtgtggaagctgcgatgattcgagccctgtctcggttcttgattatgaccggtatgctggtgttcgagtaactccatcaccaggttggtaattcttcagtattgaaaattgaaatgtcctttcttgtgttattaaagcatacttgtttccttgtaacaggaaacatttcaagaagacggttgtcttcagaacttgaatccagtaagctcaatgaaacgattgaacaagatcacatcacattgacaagtagatcaaaagaccaagaaatccgacttcatggctaccaagagatgtggctcatgatctgcaaactcactgtatctgaccttgaag

SEQ ID NO: 175664 - DNA, 795 bp, Arabidopsis thaliana landsberg
ataattagaccagtgcgatctaagcactgccccacttgtaagcgctgcgttgaacagtttgaccatcactgcccctggatttccaactgtgttggtaaggtaagaatctctttcacttgttgctctgctaattaaagtggcaaggatatagtaatgacatgaaacaccctgttatgcatattgttttggttaacggtatcttgatacacttactcatttcacagaagaataaacgctacttcttagtctttgtgatcatgggagctttaacatcattcgttggtggcacaactgctgttcaaagtatgtgactggaacaactctctctcgcaatcctgccattagatttgactattagtaagcatctgtttttgctacaggattatggagaggtatcccacaggtacaccacggagaatcatggattaaacatatagtcattgaacaccctgatgctgccgtgtttctgtttttcgacttactcattttcattgcgactatgacattgacaatctcacagtcttatatggtaaggaagtctcagctaaagtaaaaatttggttctccctcccctctgcaaatgattgtataacagttattgttggttgtctggtgcagatagctcggaatattacaaccaacgaattatggaacgcgaagagattcagttatttgcggggacctgacggaagattctacaacccttataaccacggcttgcgaagaaactgcaccgattttttggttcatggctacaccagggacgacgaggttgtcccgtcttcaattctctga

SEQ ID NO: 175665 - DNA, 285 bp, Arabidopsis thaliana landsberg
gtatcattgtctcatgctcaactaagcccttccttttacgataaaacatgtccgcaagtctttgacattgcaaccactaccattgtcaatgctctaagatcggaccctcgcatcgctgcaagcatccttcgtcttcatttccacgactgctttgttaatgtaagataccattagaatcaatatattcatgtatattttaactcttttggttccctatagtgtagccctaataaagagcgcgagggaatgctttatggatattataaacttgaaattaggatataa

SEQ ID NO: 175666 - DNA, 129 bp, Arabidopsis thaliana landsberg
ccaccagattacgagccacctttcttcagaggctgtacagaagacgaagctcagtatgtatggacacagaatcctctgagaatggaaattgcgaatgttaacagcaaacatcttcgtgttaacgcttaa

SEQ ID NO: 175667 - DNA, 333 bp, Arabidopsis thaliana landsberg
atgggtactacggtgccggttgatcaagcaagttcccaacctgttcgcgaccggatccggagattcccgtggccgacactttcatgtagcatgctcgcgctgctcggactgatgcagagcagtccggagtggacagcgccgtatctggcggatcagctcggtgtcagcacccgcaccatccgcaacgaagtcgcccggctcctcggactcgactacccggtgcactccgtccggggcggcgccgggcactaccggctcgggcccggcgcgagactgcccccgctgcagctagacgacaccgaggccgtaaaagtggcgatcgggctgcgcacc

SEQ ID NO: 175668 - DNA, 519 bp, Arabidopsis thaliana landsberg
gtctccatcagagattgggaaagtgcaacagcttcagatgatttcacggtaacaaaacatttcatatatgttgacacaagcaaaaggttaatgaattgtactgattccatggctcttcataattaggtacgactatggaacatagagaacaacatatgtacaaacgcaaacgcaacagcgtctgtgtccagagttaaacgcagagtaaccgcattgtcaaacactgaagccaaagaaagacttgagatgaacagagaaactgagagtccccaaaagcattcatcattatcatcagatgatgattataataatgatcagtcaatgcctatcattagaactccagagtctcagaagaagaaaacatcatcatcatcatcattgtcatcattatcatcagaagaagatataatatgcgagagaacaccagaaaccacattcaacagtccatcctctgtactaaaccctccttcctcagtcaaaaggcgaaccattagagattattttctcgtcactccctaa

SEQ ID NO: 175669 - DNA, 191 bp, Arabidopsis thaliana landsberg
tgtgtgttgagaatgaacaagtggaagtagaacatgttcccggagacgagcaaaaggcctacattttaccaaaagctcttgggaggatcaagttcaaggagatgagaattattgttggagttcaagatgtggtgaaatgtgacttcaagcttaaagagaagaatgttgacttaaatttgaaggaagcttga

SEQ ID NO: 175670 - DNA, 74 bp, Arabidopsis thaliana landsberg
atgaacgtgtggctgcctcaagccagtcaaccaggagctatcgttggtatcgcattcagcttcatctccctaag

SEQ ID NO: 175671 - DNA, 547 bp, Arabidopsis thaliana landsberg
atgactcgacgatgcgctgacttcgaggaaaagtattctcaaagtcagatcgagttgagtcaggtctctgcggctttggatgatgctaacgctctgagttcttctcttcatgtccagcttaactctgagaaggtagcttacgaacctgtgcttcgccttatcatgctcttggattctgaatgagtttgatttttgcttgtaggaagaaaaacgtatccttgctgcttctcgcgacaacttggacagattgtaccgggattccagtagctcgctgaccatcttggagaggagccaccgctttacgatggaggagcttgacaatcagcgccgtcaactgcaagaatcttcggacgaagtggcccgccttacacagttgctatcagcaaaggatgcctccatcaaggaactccgagcttccaagaaaaccattgcccgggagttagaaaccgctcagcaggctgttaaagttgctgaagaagctgctgttactttcaaagcccagcgcgataaggcctggacaaggccattcggccgggacgaatcttga

SEQ ID NO: 175672 - DNA, 806 bp, Arabidopsis thaliana landsberg
gtcgatacatcggatctacgcactggacggatccgaaagatccgaggatccataaggcacgcgtcgccgccgttgctgattcggaaggtggagtattcgcatcctttgattgcctgcacagagagaacagtgttctccagatcgacaaatccactcttcaagtcgccgccgtgatcggtcagcaatctggaaactcggctaaaaccacagtaccggagaaactccggtggctgccagcgaaaggtcttttggtgggatcagccgttcaacgtggagtgtttggttgctctggctacatccggatttgggacccaaggtccaggaacatcgtatgggaaacgaacgagccaggatcgggacgaagcactaggtttggagacgccttagctgatatggacgtggacgttgaagactcgatccttttcaaggtatgttccaagtcaggagacctcggaatggcagacattcgtaaattaggtgaagatccatgggtatatatgtcagacgagaatcccggtgcctggaaagccggcgacggaggtggttacagcgtggtacattgttacagaaagcaagtgttggccgccagaggtggtgcattagaggtatggtcaagtgttaaggagaagacaagtggtgatccaattcgcaggagaaactttgtagacaaggaagatgattccaagagagggatgatttcgaaaattgaagcaggaggtgaccggctctttgtttctcgggaatgtatggaaggtgtggaggtctgggaaacttctagtttctccggtgtggtatccgtcgagtaa

SEQ ID NO: 175673 - DNA, 96 bp, Arabidopsis thaliana landsberg
gagttagtacgtctgtatattgatgtacgttggaatatcgtagtcgtagttcaaacagttgagctaatcgatgttggtttcgaaggaccagattag

SEQ ID NO: 175674 - DNA, 568 bp, Arabidopsis thaliana landsberg
gcgtatcaatgaagtgtttgagatcattatcaatcttattaaagaaggaaactttgagcagtttacggcggaagagcagaatgtaaattctgccccattgtcagccttcgatagtcaagcaaaaaatatgaatttgacaaaagctattgagcagaaatcaccaaacataaatgacagacacccagatctacacgttcaacagcactctgctgattgggctcggtcgctagaggttgcgacgcaaaggagaacagaggttcttagacctgaaaaccttgaaaacatgtggacgaaaggaaggaactatcaaaagaaggagtacaaaaaatctctgaaaaagggttcttctactggagcaaaagaaaacgcagtggcgcagttaccccctaaagtgagcactgataagcagtcacaagcacagatggctgaggaatttagtaaatcatctttacatgatggagggcaccagatttatgaggctgatgttagaaaggaatctcgttcagatggaaataaaaataggcttggaagatccaagagtacatcagataatccccccgcgtcctga

SEQ ID NO: 175675 - DNA, 201 bp, Arabidopsis thaliana landsberg
atgggaatcttcgacaacgttaattctcccggaggatgggaaactccggtgtcttcggctagaaactcgtttgagccacatcctatggttgcagaggcttgggatgctttgagacgatcattggtttactttcgtggccaaccggttggtactatcgctgcttatgaccatgcttctgaggaagtcttgaattatgatcag

SEQ ID NO: 175676 - DNA, 576 bp, Arabidopsis thaliana landsberg
actatcgaatatgaagttggcgatgttgttgagcttcttccaagccaaaattcttcagtggtagatgcgtttatagaacgctgcggtttagacccagaatcattcattacagtaagtagctccactcttgtgatataaaattatctcagattgttattcaaaataaatcccgagagttattttttttttcaggttggtccgcgagagacagagaatagtagttttagtgaagaaatgattacacagatccctattaagcttaagacttttgttgaattaacaatggatgttacatccgcttcacctcgacgatacttctttgaggtaagaaccctttaatttcaatcattcagttctaatgcatttgaatttcaaatctatgaaagtcctttgagttttatgagacaagtatttgatggacacccttgtaatgtatgatgtatcatctctgttcagattatgagcttctatgcaacagctgaacatgagaaggaaagacttcaatactttgcctcacccgaggggcgggatgatctctacaattacaatcagaaggaaagaagaagcattcttgag

SEQ ID NO: 175677 - DNA, 347 bp, Arabidopsis thaliana landsberg
atgatggtatgtatcagcatgttatatgtttcccaaatatttctttacctcagatgccatcaaggactcgttcacatgacggcacgagtacttcccgtggccaagatgatgcaccaaatccaccacctgtaccgcccacgctggccgaggctatctccgccttggtcaccgcgaccgctgacaacacctgcttccttcgcgaaatggcgggacagcaacagcagcagcaaggcgggagagcttatccgcaaggacctcgcgaaacttcatatttggatttctcggaaactcgtcccccactattcgtcaaggccgaagatcccctcgaagttgacgaatggatccag

SEQ ID NO: 175678 - DNA, 161 bp, Arabidopsis thaliana landsberg
gacactataacaaatttggtcatgaccgcaactctcaggaggaggttttccagtccatcgtcgacgtggctgctttggttaaaccgcatctagcacgctcattggatcgattaacgaatccaagatattttcgctccacaattcaacgaaatgttaaataa

SEQ ID NO: 175679 - DNA, 150 bp, Arabidopsis thaliana landsberg
atatcaagagcgtcacaggcttcagatacaagttacattgccaaaccagctgcttcttggctcgatgactttcttgtatggctatcaccagaggcttttggctgttgtcggaagttcactaatggcagttattgtcctccagatgaccag

SEQ ID NO: 175680 - DNA, 96 bp, Arabidopsis thaliana landsberg
atgagagatgcagcggattcgtcatcatactctggatacgagaaagatttcatgaaacatacaatgcttgagcacgaagctgttttcaagaatcag

SEQ ID NO: 175681 - DNA, 77 bp, Arabidopsis thaliana landsberg
gtggtacagatgattctaaggtctcaatacctgcaacggttgttctgcgctacatgttcagtccagctgagttgatg

SEQ ID NO: 175682 - DNA, 37 bp, Arabidopsis thaliana landsberg
gttttggagacggtgattgccggatttggaccccaag

SEQ ID NO: 175683 - DNA, 857 bp, Arabidopsis thaliana landsberg
atgggaactaagcaacctaggaattaccggcgtcgctgtaacgatgaaatcgacggtgaagatgcaaccgccgcggcgaaaccttcctcttctgatctttacccggcgaaaccttcctcttctgatctttacccgtggaaacgtagaaagctcccggccattcccacgaagaacgacgacgatgcgaagggcagagaccatgccaaatcctcttggctgctcgacttatcaaggggggacgaattttatacgcaagagcagatgcaccagcgtttgaaggaacatagtcaggatgagaggcccatggagatagtattcaacggtgagcgagtgcgcagcattggtatggatggtttgtcttatgtcttcgtctgtccgatgccgcaaacagctgatgataagatggctgcgcttgatagaatatgcaatgcttatgatgaaagagtgaattcgcgtatgccacaggagcaaccgcagatgtatgccgggagaccagaggagcttgctaaggtattgctctttgaacttgccttctttctatttattgttctatctaatttggtttctgatgatccaggaccttgatgagaatttgcctatgagcatcgcagctgctgaaagtggtccatctgctcctgttcccaagtatgcctctttgcaggaaatcagtgacttcaaatctgttttccgcacctttatgcaggtactcctcttctgcctgctcttttacttttttccttttccaagggaatatgtgttgcattggtctgtgtatctggtgctttcatttccaccaaacgcctgttgcaatcttctttctttcgcagaaaaacggttacttaatctgtggcaattga

SEQ ID NO: 175684 - DNA, 90 bp, Arabidopsis thaliana landsberg
  unsure (1)..(90): unsure at all n locations
atggaggcannnnnnnnnnnnnnnnnnnnnnnnnnnngggctgctgcagaaactcttaaaggagagcttgcacaacttaaatcagagaat

SEQ ID NO: 175685 - DNA, 159 bp, Arabidopsis thaliana landsberg
gacgagcgctcgcgcgcggtgctgcggcaaatgcaggccgacgaggtgcgccacgcccagaacgcccaggcccgcggcggcatcgacctgccgttcccgatcccgcaactgatgcacgccagctcgatggtgatgaagacggtggcgtatcgggtctga

SEQ ID NO: 175686 - DNA, 252 bp, Arabidopsis thaliana landsberg
aatctatttatctgcaagaaaaccaatttacgggacctatagagtttgcaaatacatcttcatcaactaagcttcaggacctaatccttggtcgtaacagactcgatggcccaatcccggaatctatatctagacttctcaaccttgaagagctagatatcagccacaacaactctactggggcaatccctgcaactatatcaaagctagtcaacctccttcatcttgatctttccaagaacaatttggaag

SEQ ID NO: 175687 - DNA, 48 bp, Arabidopsis thaliana landsberg
atgataacaagatcagaagtcaggctgaacgcagtcattgacagcttg

SEQ ID NO: 175688 - DNA, 874 bp, Arabidopsis thaliana landsberg
aacacgaatgcggaaggtgctcctatagttcctgtctcagcgcaactgaaatacaacatcgatgttttgtgtgagtacattgtcaagaagattccactccctgtgagggattttgtgtcacctccaagaatgattgtgattcgttcttttgatgtcaataaacctggctctgattatgatggtatgaaaggtggagttgcaggtgggagtatccttcaggtaaaacatactcaataccccgaaaaactaggataaatcgcggttgaatcaatgtaacttatgtctctctttgctttgtttgcagggtgttttgaaggtggggcatataatagagataagacctggaatcactagaaaagatgagaatggagacactaaatgcactcccatttacacgcgtataacttcattgtacgcggaacagaacgagcttcagtttgctgtcccgggaggtttgattggaattgggacaagcatggatcctacgcttacgcgtggtgataggttagttggtcaagtccttggtgaaataggtactctccctgatgtctatgttgaacttgaagtgagtttccagcttctgacacgtctcattggagtgaagacaaaggaaacagagaggcaaatgagagtgtcaaagctagtcaagggagagatactgatgttgaatatcggatcgatgtctacgggagctatggttattggagtaaagaaagatatggtgaaagttaatctgacactccctgtgtgcaccagcattggagagaaagtggctataagtcgccgtgtggataggcattggcgtttgatcggtcgcggtcagattgaggctggaaccaccatttttatcccttctcctccttctttggcatga

SEQ ID NO: 175689 - DNA, 749 bp, Arabidopsis thaliana landsberg
gttcctggatgataatgatgctgaaatccaaacgaatgttctagagtgccttctgttggcgaatgacttcttactcccacaccgccagcatttgttgaatttgatcaaaccaaaagaattgagagaagaactcacaacctggaacttgtccgaaaacatcggagaacctcacagatcttatattttttctcttgtaattcgcatccttatgccaaaagttaggacattaaaaaattcggcttcaaggaaggtacatattacttacttttagtttacttcactatgccaatacagttttcatttgggtcctaacaagttctatttgtttttcttgtcagcatacaagtatccgtcaccggaaggcagttctttgctttatatctcagctggatgttaatgaacttgcgttgttctttgcattgttgataaaacctttgaacatcatatcagaggaaacaatggactcattttggagttcaggcaaaagttctctcgactatttccaaaactccaattttctgaaatatttcactgttgatactatttcaacgttatccagaaatcagaaatttgggtttcttcatgtcatccaacatatccttgaagtctttgatgaacttcgtgtccgaccttttctagactttatgatgggatgtgttgtccggctattggtaaattatgctccaaatgttgatgaagaaatgaacattgattctttggcactaagaaatgtcactgctgccccataa

SEQ ID NO: 175690 - DNA, 114 bp, Arabidopsis thaliana landsberg
gaatgccacgttaatatcaatgaatattcacacctttttcggctgtcatgcaagttctcaaacccttttatggtcacaaaggcaaaaggcgataaagataagatgacccattga

SEQ ID NO: 175691 - DNA, 95 bp, Arabidopsis thaliana landsberg
acttagatgccagagatgccgatccagaagatgaatttcgatgtaatttatcgtcttctgatgatgaagaacaagaagatgaagaacaatattag

SEQ ID NO: 175692 - DNA, 918 bp, Arabidopsis thaliana landsberg
gtttgcaagtattttctggatgctgtggaaaagaaacagtatgggtggttctggtcatgccccaatggtggcaaagagtgtcattacagacacgcgcttcctcctggatatgtccttaaatctcaaatgaaagccctcttggaagaggagtcatcgaagaagctggcagttgaggacgaaatcgaaaacgaggtttaaaatactcctcaagtttccctcatagctgctaggacccggtacttgatttgtgagacccatgttttcttgttctatgtttcagcgtgcaaaactgcaaaccgcaacacaaatgactcctgcactatttatggaatggaagaggaagaaaattgctgagagagatgccggtttggctgcttctcaagcggagagagctaagaacgaccgtatgaggtaatccccattcatcattctgttacatatccatctccagtgtgactctatttttgtccttggaagctgattcattgtgtggatttgtaacctcagtggtcgggagctgtttctgtccaatgcaagcttgtttgtggatgatgctgaggcttgtgaagaatacgagagggaaagagagcaggaagagactgaacaaaaggtgagctctctctctctctttctctctctctctctctctctctcactcactcatcatttaaaacaaccaagtcatgttaatggaatcttgagttttttgcttttcaggcaaagaacaaagaagcagaggcagggacaagcaagagtagtggtgatgctgaacagagttcgaaagaagtcaatgaagaagaagaagatgacgatgatgatgatgatgacctagacatggatgagctggatgaattggaagcaagcttgtcgaaaacatcgatccagattcgtgagccaaacaacgaagggtcatcttga

SEQ ID NO: 175693 - DNA, 122 bp, Arabidopsis thaliana landsberg
gtgtgaagaatgtgaggttcttaaaccttgatttgaaatcctcacatcagagagctaagagatcatcaactgtggttcctgctttagctgaaacagctgtttctatagcgattgcagccacg

SEQ ID NO: 175694 - DNA, 195 bp, Arabidopsis thaliana landsberg
atggctgatgttctacggcagctgttagatagtggaaaattatctgacgaaacctgccactcgattttgtttggattgggtcaacatgtcgatgcttttcatttatttaaaaccaaagaagaagtcgatggatggacatctgaggaagatgaagaacttgaccaagaatactgtcgccaagttaccgagtctctg

SEQ ID NO: 175695 - DNA, 87 bp, Arabidopsis thaliana landsberg
ggcatggagaagaacgcgaggccggttcaggacgtcaacgacagggacatcagcatcttccgcccaaagccacacaagcactactag

SEQ ID NO: 175696 - DNA, 762 bp, Arabidopsis thaliana landsberg
atgacatttctacaggatggtgaggtttggactttcactgttagagcttttgattcttctcgtcctgaacgtaccattagtgttagctacgatggtttcgctgaaggtatatgcaattagatgaatattattgtcattgagtaagaaatgggaatcaatttgattatgttcgtttgtgatgtagatgtaagagttggtgatgaacttctggttgatggtgggatggtgagatttgaagtgattgagaagattggtcctgatgttaagtgtctatgtaccgatcctggattgttgcttcctcgagctaacttgacgttttggagagatggaagtctagtacgagagcgtaatgccatgcttccaacaatttcttccaaggtgtgtaatttttatcttccctttaaggtttgagttatgattcactttacttggtaaatttgggagggatcaaagcaatggtgaagatgtacacttttggaaactagatgagtccatgttagcaaaacagaggataaataatgttaagaaaccataaaagagacaagtagctacatcacaatatgagttctttctctatcaaactagagtctatgtgaatctaagagtgttgatgttgttatatacgaaggagaaatgatgttttactcaaaaactaaaacatatagaatatctccctgagggaaaacatactcattttcactgatgatacctcaatcttttattttcaggactggctggatattgattttggaattgctgaag

SEQ ID NO: 175697 - DNA, 183 bp, Arabidopsis thaliana landsberg
atggctgaacaaaccttgacactgaaatcttcagttgataaccacgaacccatcttaagtaaggcagttaatgcaggagcagcagctgaaccaaattcaagggaagaagctaataaaggaagaagctgcattaaccaaaaggttaaagtcaaaaagcataacacaaaaccttcaactcataag

SEQ ID NO: 175698 - DNA, 89 bp, Arabidopsis thaliana landsberg
aaccacgaacaccaggaggacctggaagcccaccaagaggaatatctgaacggaccaaaacgattgcagccggacacaagctgttataa

SEQ ID NO: 175699 - DNA, 375 bp, Arabidopsis thaliana landsberg
tcacatgatcggtctaggtttgttgaaacacgcacatctacacggttacttgagaaaatagctcgctctgtcgagtacaatgagccagttctcttagtaggagaaacagggactgggaaaacgacactagttcaaaatcttgcacactggatcggacagaaactcactgttttggtatgttttgacttacattcttgtagtcacgtagttatcgtagtggttttctataatttctagtttacttttctgcagaatttgagccagcaaagtgatatagttgatctattgggtggttttaagcctattgatccaaagcttatgtgcacaatggtgtacaatgaattcaatgaattggcaagagatttgaagattaag

SEQ ID NO: 175700 - DNA, 154 bp, Arabidopsis thaliana landsberg
cgccacgtaccggaatcccccgtttgccgtggcgcgcaccaagggctggctcaagcagctctcctttacggcgccggagttcgatgcgctctttgaggagctcaaagtgatcacggtgcccaatcagttccgcgaccgcctgctgcgtctttga

SEQ ID NO: 175701 - DNA, 136 bp, Arabidopsis thaliana landsberg
gttgagttactgagccgtctgcgttcaccatacttgttggcacttcttggttattgctcagacaatagtcataagctgcttgtgtatgagttcatggcaaatggtggtctgcaggaacacctgtatcttcccaaca

SEQ ID NO: 175702 - DNA, 107 bp, Arabidopsis thaliana landsberg
atggaactaagttctggtagaaagacatcgaatttcaaattagaagatcaaacgaatgatgttgtttcggatagtcaattcaaaggcttatggagctatatgattag

SEQ ID NO: 175703 - DNA, 555 bp, Arabidopsis thaliana landsberg
atggagaagttggagaagatacaagcagaaaaggatgatcttgaaagagaagttaaatgttgtagagaagcggaaaagagattgagcttagagattgaagcagttgttggtgacaaaatggagttggaagatatgttaaagagggtggaagctgagaaagctgagctaaagacatcttttgacgtgctcaaagataaatatcaagagtcaagagtttgttttcaagaagttgacacaaagttggagaagctacaagcagaaaaggatgagcttgacagtgaagttatttgttgtaaagaagcagagaagagattcagcttagaactcgaagctgtagttggtgacaaaattgagatggaagatgagttggagaagatggaagctgagaaagctgagctaaagatatcttttgacgtaattaaagatcaatatcaagaatctagagtttgttttcaagaagttgagatgaagttggaagcgatgaaaagggagcttaaactagctaatgaatcgaaaacacaagccgaatctcgggtgaccagaatggaagcagag

SEQ ID NO: 175704 - DNA, 317 bp, Arabidopsis thaliana landsberg
atggttttattggaatctgagattcagtttcggctaattgaatgtactcgtttcattagtcaagttttggcactggtggagtacaaaaacggcaggcgtgtaaatgatgaaagcgagtacattcaacggcggaagaaacagccagtgatcgcgacaagagatttaggtatagatctaaaactcgttgctttattcgatgtctcttcttagttgtttctccaacggatttgttatggtttcttgcgaccgttgtctttgatatggtgatgaagtgtctgttggttggtggtggcgatcgagttgttggtggcgactga

SEQ ID NO: 175705 - DNA, 204 bp, Arabidopsis thaliana landsberg
gattatattcgttaccttgatgtgaaaccaaggaagtacgcaatgcccaaacaaggtaaactaaagccgacatatacagttacagtcctcagagtcaaagccggaggaaaaagaaaatatccccggaaagaaagccctaaagaaagggaaacaaagaccctaaaaccacaaagcagcaaaccagagaccctaaacgaaagatga

SEQ ID NO: 175706 - DNA, 545 bp, Arabidopsis thaliana landsberg
gccaaacaaagcttgagcaaccagtttccacactcaatttctcatccattgaaaacaataacacagggcaaacatttctttccacaagccaatgcgattccacagaagacaagccacaagcaataacaagagaaatatttgaagaggaaataagagacaaaaccctttctcttggccatgatggatctaaaggtaaaaaagcttctccacacctcaaaacagagaacacactgataacatattcaactgatggtggcatatataaagccactacctttggcatatacacaacatctgaaccagccactgcaatgtcaaaaggttaagactttatgagcttttatactcacagaacttaagaattttataagagcttaaatgggtaaccttgagaatcatcgttactgaggatacgatggagacgagaggtgagtgaatcaatggatgaagaaagctctgcgaacgtgaaacatttgtctccgtcgtaaacaggcggtgcagctgattccgacctaatgctcctcgccgtcaagccggaagcttga

SEQ ID NO: 175707 - DNA, 192 bp, Arabidopsis thaliana landsberg
atgaggccctggaaaggacttgtggaccttggctgtgtgagaaacaatgtattctcgccttctacaagcttagagccagccacttgcacattgaataaccagtacaatccatgtattccatgtctcgctatcgagttgtctctccctatcaatccgctcgtgaacaccggcttgcttttgcatcgttcacac

SEQ ID NO: 175708 - DNA, 165 bp, Arabidopsis thaliana landsberg
ggttccagaaaccaccaaactccgcccaaaacaagaaaccacaaaaggttatgtgaagaaaccctaacccagaaagagattgttgcgtctcgtagattcaatcgctcaatcgaaacaaattggcctaaccaacccacaaggagagaaaaacgacaagctttgtga

SEQ ID NO: 175709 - DNA, 145 bp, Arabidopsis thaliana landsberg
ggaacacttccctggacttgtggagtacgccggagtgacgggcccagccttcaccttcgaccactacgccgtcgcccccgatgcagtagaccgggacggcagggaattcaataacaaggcggagcgggtgaagcaagagctgtgg

SEQ ID NO: 175710 - DNA, 303 bp, Arabidopsis thaliana landsberg
atgactggcttcaagcgctattctacttcttttgctgactttgctgctgcaaacagtctggactatggcaccatttctgctgggctggatctttatactgaagataattttgaggattttgagcagttttatgagccagccaggctcggtatacccaggaggtttggagagacagcaggactcagacatcatcctgctgtcatcaacaagattgccagagtcaccattcttcctaagagtggggacaagagcaaaattcgagataagttctggaacataatccaccatgtcatgaatggtcag

SEQ ID NO: 175711 - DNA, 469 bp, Arabidopsis thaliana landsberg
cgggagcgacggcttcagcggaacgatcacgggcacgacgacactggtgccgggcaaggccggcgacgcggcgaagttcgacgggacggtatcgccgatcacgacatccgcccccaacctgcccgcaccgtgggcggtcggcgcctgggtggacccgagcgcgacctcgggcagcgcgaacctgatcgacggcccgcgggccgagggcaacagctcactgaagatccagcagaacggcacgtccggactggtgggggcgacctcgttctacgtcgaggattactcggtcaactacacggcgccgctcaacacgtggacctatctgacctacgtggacgacggcacccagatcacggtgtacgccaacggccaggaagtgggcaccatcccggcgagcttcccgctcagccggaaaagacatcggcagcaacgaaagcaacgcgggcctcgacgtgtacaccggccttaa

SEQ ID NO: 175712 - DNA, 107 bp, Arabidopsis thaliana landsberg
aaaaaggagttcgggtaaaagttaagactgttcccaaccttgcctgtggctgttggaccgctgatttgattcattgcgtatatcgggctacttcagccccactctga

SEQ ID NO: 175713 - DNA, 296 bp, Arabidopsis thaliana landsberg
atggcgacatccgctctgacagcagtaaccacgcttcaacaaataggaagaagtaaaaaccatcagaccattttcaaggtaatagtcctcctcacttaacttctgtctctggtgtggctctttcataaacactactttgcgcgaaagacaaattctgtcggtgatatgcctgctacgaaattactctttagcgatccgccggcatcataaacaaaaacattcccgggactggagtagtcacccgcatcggcaaaataaatatcaccattcgacggatcgattcccatcgcatatga

SEQ ID NO: 175714 - DNA, 142 bp, Arabidopsis thaliana landsberg
gactttggttggtgattatcgcaagcgtattgctgatgaactggccattggctgcatagttgaccgccatttgcaagaaggagatgttgttctttttaacaggcaaccgagtctgcatcggatgtctatcatgtgtcacagg

SEQ ID NO: 175715 - DNA, 566 bp, Arabidopsis thaliana landsberg
aaacatcaaagccgccggatccggagttagatcgggtggtagaagagaggaatcgaaggatacggaagaagagattactggtgaagctcaaaagaaagtaccagagtgagatcgaccagtgggagattttatcgaatagtttcaatgctatgcaagagaaagcagatcgatttcaaacggcgcaaagagaagagaggttaaatgcgaacgaaacgatgtcgtttcctgggaattcttcctctacaacagaaggaggccgagaatttggcggagaagatgcttctaagtcgccgtcgtctatgctcgaccaacttatttttatggtaattagggtttgggactcaattcgatgagatttttgaaactggttcgttttttgaaatttgaattttgaaattttgcaggtggaaagacaagaagcggtaatcaacgaagtctcaaagctatgtgaagttacagagaacatatgtagagtggaagaagaagaagaaacgaagcagtccttctttgatcttcccatatggagctcaccaacggatctaatggcatcgctttgtggtgattaa

SEQ ID NO: 175716 - DNA, 135 bp, Arabidopsis thaliana landsberg
gcattcggtttcggttcggttgcgcatggtttcggttatttcggttatagtaatataagaaccatttggatatttgaagaattttggttcggttcggttcggatatctttcggttcggttcggtttggatattaa

SEQ ID NO: 175717 - DNA, 135 bp, Arabidopsis thaliana landsberg
cgactaagtaaacatgccctcttccatgacctggcgtctagaagaatagtcacggaacgtgtgttccacactcgttatagaccgtattcaactattcaagtttgcccaaagaaattacttaaagaatttaattag

SEQ ID NO: 175718 - DNA, 384 bp, Arabidopsis thaliana landsberg
atgcgggccattcgccagatcgcgtcgatccaccagggcgtggagcggagccgtaatgcccgcatccccgacagtgcctaccgtgacgtgctttttatgctcatcgactattcaatccgctctttcgagctgctggaaaggaaattgacagtagccgaaaaggaggaattgttcaacgtttttcacgcggtgggcgaggggatgggcgttcccgggctacccgcgaacctgcgcgcgtgggagcggatgcgcaccgagcatttgcaggataacctcgtcaaaagtcctttcaccatcgatctttacaaacaatacccgaaacaccttggctggtaccggtaccaattgctgcggaatgtgcaaatgcagctcgtgcccgaacgc

SEQ ID NO: 175719 - DNA, 216 bp, Arabidopsis thaliana landsberg
cactatgcgtgtagggcattcatcgaaggatttgacgaaactacccttcgccttaatactcctccttggtttggaacttattttgggcttttgacttgggtttgggcattgggccaagtaggcccaatccgacccctaatagttcggatttacatcggcaaggaggagtatatgattttaacccccccccccattaaatctcctgatacgtattga

SEQ ID NO: 175720 - DNA, 672 bp, Arabidopsis thaliana landsberg
cggtcttcacgatttccacagcgaaatgctgatgttagttcacaaaaacttcaaacgggggctaccagcaaaatggaagaagtcaactctgctaaaccaacccctgccttgaacaggatagaggacgcccagggattccggggtgcccagttgggtactggagtgaaagggattgatgaaaattctgctcgtacaacaaagatgggttctgggaatgccggtcaaggatatacttatgaggaggttggcacctatattcctgtgtcctctttattttgatacaattatccgtggaacccttttgttgttacctcaagaatagaggcttaggcttaatctggtcaatatgggtaagaataatgggaaacccttggtaggttggggaaaaatatgatagacttcgtagattttgaaacgaagaaagcaatgccatctttgatggtgcaataatctaggaaatttcttataatgactggatactttctgatcttccaggtgagagttcttttccatatactaatggatctctgcaagcgaacatctggtcttgcgcatcccttacctggctctcaggtaggtagtgtaaacattcaagttcgactgcattatattgatggaaattacactgtgttacccgaggtggtagaagcggctcttggaccacatatgcag

SEQ ID NO: 175721 - DNA, 134 bp, Arabidopsis thaliana landsberg
atggtgggcttccacatgtacttacttatcgcagtcaccacatcgccgtctctggttctggttgagtgggatcctgactctgttcctgcgaagaggctcacttttcaagctgccttcttcttcgtctcaacatg

SEQ ID NO: 175722 - DNA, 181 bp, Arabidopsis thaliana landsberg
gtattcaccaacgatacttttgcttcgccatttcgatgttgttaaaaatctgggctctcaggatggttcactgggtgaccgagttggtgtgtcctttgagattgcatcggttattagggaactcactgagccagtttctaatggggacagttccatggaagaaaaatcgaatagcaatttc

SEQ ID NO: 175723 - DNA, 533 bp, Arabidopsis thaliana landsberg
ttttgcttaacagttctcagatcttggagaaaatatttggagatgaattgattatggagattatcggatgccttgaatgtaagtttgatgtcattgatcaaagttaatgatagaaatattgtaaaaataatgacaggcattaccttcagaatgtagcggttagatatatgttgcataggccttctagacactaattagattctgttgggacttatattgggaatttcttgcccataaaatgctgaggattttaattgtggtttcatatcttaagtcgttcatggacaccaaaaacttaggtttctttaattactggtggatagttccttgctggatcatatagccatgttcttaagggtttgcatttgcgactgcatatattatatccagtttgtttgtttctcttatcttggccgttgcctatatttagctatatatgacgctgcatgttgtttcacttcacagatgatcctggtgttcctcactctcagcatcaccggaattttctgaaggagcatgttgtttttaaggag

SEQ ID NO: 175724 - DNA, 953 bp, Arabidopsis thaliana landsberg
atgaaccaagaagtggccaaagtgatcttggattgcaagaaagacatttggaagaatcaagaaatgtttgagttcgtcgaagcttactttgagactagcttgaagacgctcgacttctttaatgctttgaagagaggcctgcaaggagtacaaattaatcaccttttcattcttggtgctgttcagcattttgaagaagagagccttattcaaggcaagacttttcttattttctcttttgttttcttctggttttgactttaacactcatctttttctggttcgcagatgggaacggatacaagaagacacttcaagagctgaagaggttcaaagacgcagacagacctttcgaccaagacttcttcaagatgttccaatctgtttacaaccagcagaagtggatgctcgataagcttcagcatcgtcaaaacaagctcgacaagaagctcaagcgcattcgcacatggcgaaaactctccagcatcatcttcatggctacctttgccactctggtcatctgctctgttctcgctgcaactatggcggctcctcatgtggctgcggctctcgctgcagctacacccccagtgggatctatggggaaatggatcgactcgctgtggaagaactatgagaatgaaatcaaagggcagacagaggtgttcagttcgatgtatgtagggacatatgtggcggttcaggatttaaataatatcaaggatttgattaaacggttggatactgagatcagggggatggtgaagaatgcggaatatgcgggggagcttggtccagtcaagattgggatcaatgcgattaagacgcagcttgaggtgtttaagaagaacgtagaggaattggagatccaggctgatatgtgtagcaccgatattagaagggcaaggactgtgattctccagaggattattaatgctacttgcagcacctga

SEQ ID NO: 175725 - DNA, 1271 bp, Arabidopsis thaliana landsberg
atggccactgtgcgcttgtttctcgatgtcgcagcaatacgcaattgggtaatccaccagatggatgttcacaatgcgtttttacacggagacttgagagaagaggtttatatgaagctacctcctggttttgaagcttctcatccgaacaaggtgtgtcgtctccgtaaagctctgtatggtttaaaacaggctcctcgatgttggtttgaaaaattgacaacggctttaaagaggtatggttttcggcaatcgcttgctgattattcattatttactcttgtcaaaggttctgttagaattaaaattctcatttacgtcgatgatttgattatcactgggaattctcaaagtgctactcaacaatttaaagagtatcttgcgtcttgcttccatatgaaagatttgggtccattgaagtattttttgggtatagaagtggcaaggagtgacacaggaatttatatctgtcagaggaagtatgcgttagatatcatttccgaaaccggtttgttgggagttaagccggcgaattttcccttggaacagaatcataaacttggattgtcaacatcaccacttctcacggatccacaacgatatagaagattggttggtagattgatttatcttgcggttactcgacttgacttggcattttcggtacatatattggcacggtttatgcaagaaccaagagaagatcactggcaggcagcattacgtgtcgttcgctatctcaaagctgatccgggtcaaggagtttttcttcgacggtcaggtgattttcaaatcactggttggtgtgactcggattgggctggtgatccaatgagtaggcgctcagtaactggttattttgtacagtttggtgactctcctatctcttggaaaacgaaaaagcaagatacagtgagtaaatcatctgcggaggctgaatatcgagcaatgtcgtttcttgcttcagaattgttgtggttgaaacagctcctgttttcacttggtgtagtcatgtacaaccgatgataatgtgctgcgacagtaagtccgctatctatatcgctacgaatcccgtatttcatgaacgcacaaagcacattgagatcgattgtcaccttgtgcgtgatgagtttgttaaaggtgtaatcactcctcgacatgttggcacaacgtctcaactcgcagacatcttcacaaagcccttaggacgtgattgtttctcagcattcaggatcaagttaggcatacgaaatttgtatgctccaacttga

SEQ ID NO: 175726 - DNA, 154 bp, Arabidopsis thaliana landsberg
atgaagaatccaaagttttcccggcttcatccttcgccgtcaaacatcgactccggtgaagattcaacgtcgattaacaaatcaaacatggaatcttatgggttttcaccggtaaaaataatcgaagccctaattagagaaacaacagctcaag

SEQ ID NO: 175727 - DNA, 48 bp, Arabidopsis thaliana landsberg
atgctttcctcaatgttgtgtctctggagccctcgtgtctcccttctg

SEQ ID NO: 175728 - DNA, 103 bp, Arabidopsis thaliana landsberg
ctttcaaggtacgattttattattgtgtttaatacgggacagtactacggccttaattgatgtcctcgtccacgcctgccttgacacggatatggacttggag

SEQ ID NO: 175729 - DNA, 161 bp, Arabidopsis thaliana landsberg
tctctggacacgtaagcggtgtgccacccattctgccatgtggcccaactgatgaattggtgatatctctaagtacaaatggagtagaacctgccatacttatgcttgacattgagatgcagacggaatctgagatccaagtggcattcctgtttaaatga

SEQ ID NO: 175730 - DNA, 387 bp, Arabidopsis thaliana landsberg
atggtgaaacggagtaaaagtaagatacatccttcaatcatattgatattctggatctgtcttattgaatgaatttgaatcatatcattcagttcaggattcctactggggttttattgattggtttgatggttttttgcagagagtaagagtaagagggtgaccttgaagcagaagcataaggtcctgaaaaaggtgaaggagcaccacaagaagaaggcaaaggatgctaaaaagcttggccttcaccgtaagccaagagtagagaaagacccaggtatacccaatgactggcctttcaaggaacaagagcttaaagcccttgaagttcgacgtgcccgtgctcttgaggagattgaacagaagaaagaagctcgcaaagaaagg

SEQ ID NO: 175731 - DNA, 975 bp, Arabidopsis thaliana landsberg
atggccaacacaattcttcgcgggcagatgatttttcaggacgagaatgcattggcggcccttggaaaaagtaatttttacctacactgcaatctctgggttttttgctcccttttatcttattggacaaagaaatcgtttttttttgtgatgactcgtttgtcctatggttggaaaatctttggagactatacgagaaatgaaacatgaaggacctaccaagttgcgaatatttctgtctttttttctcttggattcatatgagaggtcttggtttcttgaattaagagcttcttattattgcttagagatacattcatgaatttgcttcagggtctgtatttataatcatgtccaatattatgcttaggatcaaatttgaactaagttttgttttgtgtccatcttgtatatgtttttattcatcagtgtaagcatgagaatgtatgttcaccatggaacatgtttttatttatagaatttctgtaattctagaggtagagctcctggcaacttattatgtttctaaagtctttttttttttttttttgacattgtagaggcggttgctgctggaaaaggtaagagttcactcgcagctccaaagaaaaatggggcgggtttcggaagccgcaaggctctccatgacattacaaacaagtcaaagttgcaacctcaagcttcatccacgacgaggaaggatgttgagggagtggattttgacatagcaaaggaaggtttcttgcatgatcacagcaaatgcattgaagaacaacaacaataccagtgggatagctacttctctgaacacatcatcctgcatggacatggtaataatgacttatgaagaaagaaccctttttctctatcttatgtttcctttgcttggcttaattctctgaagcctaatttttgttctgcttttcagagacaaacatcaaagaaggggttcctcaatacaataatattcaagag

SEQ ID NO: 175732 - DNA, 95 bp, Arabidopsis thaliana landsberg
agacgaaccaaaagccattaaatgatgatatatacagggagatgatgattggcaaagatgatccaagccgaatcactgagtatctaaatcgttaa

SEQ ID NO: 175733 - DNA, 114 bp, Arabidopsis thaliana landsberg
tgctcccttggtgtgaagtgccagttctgggtacgctttttgggcggtcagaaaggccaaagctatgatggagtcagcgatgaagcatcaattgacggcctgtccacttactga

SEQ ID NO: 175734 - DNA, 292 bp, Arabidopsis thaliana landsberg
atgcaacaggaaggcttcgtgcgcctcctcgtgcaggatcacttcaccggccaaacctacggacggcatgtcaacgacaacgttgcttctgttgggaacttgcacgataaaagtccgggacctgcgttcccttgggtaacaaaagccaggaggcacctccgcaatggatgacgcaattttcgaagcagacaccgacggctacgcggcgccggcgctcacggacttcggcacgatcgaagagcgcacgcacggcctcatggccgaagccgtcaacgtcagcgctgtcttctag

SEQ ID NO: 175735 - DNA, 169 bp, Arabidopsis thaliana landsberg
atgcaggtacccgtataataatgctctgcatcatcaggtggagagtataattttatcgtgtttagaaagcaagaacgatgagatagttgaccatcttctccgagagtgtgatttgattggaaaaattattaaaacagagaaacagccaattctttctggtgataagcag

SEQ ID NO: 175736 - DNA, 154 bp, Arabidopsis thaliana landsberg
gcaccaaattgctgattctagatttcgtaaacaaaccacaagttttgtttgtcaatcctatccgatttgccggttactcaaatctatgggaacagtccgaacgaaccggacaaaactagtcgtagttacggtcctagttagacataaagcttaa

SEQ ID NO: 175737 - DNA, 480 bp, Arabidopsis thaliana landsberg
atggcgacatcgggaacatatgtgacggaggttccattgaaaggatcggcggataaacactacaagcggtggagagatgagaaccacctcttccccgatgccatcggccaccacatccaaggtgtcactgtccacgacggtgaatgggactctcatgaagccatcaagatttggaactatacatgcggtaaaaatacatttcgccgaatccaaagaatggtgctaacttaatgaatgaaacaaatatgtacgcatatatgtgcagatgggaaaccggaagtgttcaaggaaaggaaagagatagacgatgagaatatggtgataacgttcagaggactagaaggtcacgtcatggagcagcttaaagtgtatgatctcatatatcagttcagccaaaagtctcccgatgatatcgtatgcaagatcacaatgatttgggagaaacgaaccgatgattcgcctgagcccagcactacatga

SEQ ID NO: 175738 - DNA, 313 bp, Arabidopsis thaliana landsberg
ggttgtgatcggatatgatgaaggaaccatcatggttaaacttggacgagaaattcctgtcgctagcatggacaataccggaaaaatcatatgggctaagcataatgaaattcaaactgcaaacatcaaaagtattggtgcagattacgaggtacacgccatacttgtaactcttatactgtggcataggatgacctatttgttttttgttttttgcctgatgataagtttttgttctgtaacttaggttactgatggagaaaggttgcccttgagtgttaaagagttggggacctgtgatctttatccacaa

SEQ ID NO: 175739 - DNA, 142 bp, Arabidopsis thaliana landsberg
cttgaagaggttttacgggaaggctcctgcggttatagagatgtgtgtgcaaggtggtgcaccggtacctgatcagtacaacagtatgatgaggctcgatgtagtttaccctcaacgcgatgaggtcgatctagtcgcttga

SEQ ID NO: 175740 - DNA, 905 bp, Arabidopsis thaliana landsberg
actttgattatgggaaatcgagatgatatagatgagttgtcatctggaaacgctagcgttcttacaaccgtcttgaaactcatcgacaaatatgatctttacgggtctgtcgcatatccaaagcatcataaacagtctgatgttcctgatatataccgacttgctgcaaatacaaagggtgttttcataaatccagctttggttgagccttttggccttacactcattgaggtaaagtatgcatatgtgatatatatatatatagtccttcttactcgtttccaatcctgtttaacctaaatagtatccagaaatctattcacaaaccaaactagacaagaaattaatcaatctggtttaaccaaaattaaaaatgcaggctgcagctcacggacttccgatggtagcaacaaagaatggaggaccagttgatattcatagggttagcaacgtgtcctgaaactgaaaatcatttaaattggtaatgcttatttctttctcatggtatttaacttcaggcattgcacaacggtttgcttgtggatccacacgatcaagaagcgatagcgaatgcgttgttgaagctggtatctgagaagaatttatggcatgagtgcaggattaacggttggaagaacattcacctcttctcatggcctgagcattgccggacttaccttacacgtatagccgcgtgccgtatgagacatccgcagtggcagacagatgcggacgaagtggctgctcaagacgatgaattttcactcaacgactctcttaaagacgttcaagacatgtctctgagactctctatggatggagataaaccatcgttgaacgggtctcttgaaccgaattctgctgatccggttaaacaaatcatgagccggatgaggacaccgtga

SEQ ID NO: 175741 - DNA, 109 bp, Arabidopsis thaliana landsberg
ccgagtacgaaggggttgtcaatgcagttattagactatatggatatgaaacgtgcttatcgaacttcattaccctctttcgacatcaacgatcgtgtattgtgacaat

SEQ ID NO: 175742 - DNA, 156 bp, Arabidopsis thaliana landsberg
atgcttctttttgtttgcaagaacattgtcgtgtttccatcaagggctgtggcaatcgagagtgcatttcttttattctctcctcgacttgcaattgttgatgagcatttaactcgacaacttccgaggagctggctaacctctttagccattgag

SEQ ID NO: 175743 - DNA, 511 bp, Arabidopsis thaliana landsberg
atgcgcgatgtgatccgcagcagccgggcggagaaggcgccggcggtgccgatgatcagcgccatgccgattagcgcgaggacgcgcctgtccgtcgtgaagtctccggcctcgcgccgggcaaggcccccggtgaagtcgtgcggccggtgagggcttttctgttgcggcatgctgcgtcctgtcgcttgcgttctggtggaggccgccaatatatcgtactgcgatataaatcaacaggtgccgtgccgaagcgacgacatcgggccggcctacacgtttgcggcgcaatgggttaaggctggttgcacgcgtcacggaaagcagggatgggggaatgccgaaggaaaaactgaccgatgccgactacgagggcctgtccaacctgcgctacacgctgcggcggttcatggatttcagcacgtcggcggcccatggcgaggggctgccgccccagcagcatcaggccctgctggcgatccgcggctatcgggagggcgaggccatgaca

SEQ ID NO: 175744 - DNA, 161 bp, Arabidopsis thaliana landsberg
gctactccaaagaataaaaagggacgatattatggtgtaggttctattccaattatcccatctgcttttgttgatcgacatgctggggatgattttgttgatcaggagacctatgaagcggagaagaaacggaacgacaaacttctaaaacggatccaagg

SEQ ID NO: 175745 - DNA, 102 bp, Arabidopsis thaliana landsberg
gtgactagtgtccgccattttcgatcttcactcagagaaaacgaaacgaatcaatctgatgaatcaggaacaaagcgactctttgggtatatagatagatag

SEQ ID NO: 175746 - DNA, 67 bp, Arabidopsis thaliana landsberg
atggccagagcagacgcagagcagtcggccacagcagacggtgcgcgggcagcagagcagacggccg

SEQ ID NO: 175747 - DNA, 195 bp, Arabidopsis thaliana landsberg
accaacacctccgagttcggcatccccggcgtcaccaactctgaaaagtcgggcgcctgccgcaacccgtggaacaccgaccacatctccggcggctcgtcgggcggcgcggccagcgccacggccgccggcttcgtgccgtcggcccacgccagcgatgggttgggctggatccgcatcccggccgcctgttga

SEQ ID NO: 175748 - DNA, 148 bp, Arabidopsis thaliana landsberg
atgatccaagcggcgctcgattcaagctccgcgaacttgaagtcggccaaagcgcaggttgctgatcagcaggctctggttgccccgaagcccatcgcgtgcgccgttctcaggacacaaaaagataaagcgccgttgatcctggcga

SEQ ID NO: 175749 - DNA, 1582 bp, Arabidopsis thaliana landsberg
atgggatgttctcattccaagttagatgatgaagaagcagttcagatctgtaaagacaggaaacgtttcatcaaacaagctattgaacatagaactaagtttgcttctggtcacattgcttatattcactctcttagaaaagtctctgatgctctccatgactttatcctccaaggagacaacaacaatgagtttgttcctactctctgtcaagactcattcgtcactccggtcaagagaatgccacagagacgtcgtcgaagcagccgtagtaatagcggtgagttcatctccatttcgccttcttcgattcctccgaaaatgattcaaggtaggccaagatcgaatgtgaaagcgaattatttgatggctaatagaagtagaccggttagagtcgaacagagatctcctgaaacgtttagagttgagacattttctccacctagtagtagtaaccaatatggtgaatcagatggtttctttggaatgaatatgaatatgaatacttctgcgtctacttcatcttcgttttggaatccgttgagctctcctgagcaaaggttaagtagtcataacattcctcctccttcaccgcagaattcgcagtgggatttcttctggaatccgttttcttcgttggattattatggatacaatagttatgaccgaggaagtgttgatagtaggagtggtatagatgatgagattagaggattgagacgtgttagagaggaagaagggattcctgatttggaagaagatgatgaacctcataaacctgaacctgtcgtcaatgtgcggtttcagaatcataatccgaatccgaaagcaacggaagagaatagaggtaaagttgataagagttgttgcaatgaggaagttaaagttgaagatgttgatgaggatgaagacgaggatggagatgaggatgatgatgagtttacggatagcgggtgtgagactgagaatgagggagacgagaaatgcgttgctcctccaacgcaagaacagcgaaaagctgaggtgtgtagaggaggagaagctacagggaatgttgttggagtaggtaaggttcaagagatgaagaatgttgttggtgttagagatgatgcaaagacgacggggttcacggtatatgtgaaccggagaccaactagcatggctgaagtaatcaaagatcttgaagatcagttcacaacaatttgtgatgcggctaaggaagtctcggggctattggaagctggtagagctcaatacacatcatcctttaatgaccatagtggtgagtttatgaacaatgttgcaatatttctctgtttaatgacttcacttataaatatgaattcctcttttatgtgtgtttgtagccaggaaaatgctggatccagtagcgttgttccgctcgggctcatcaacatcttcctcgtcaagattcttgatcacttcttctggtggttcaagagagagcgggtctgaaagcagaagcgatgtttcagatgaatcttgcatgatttcaggtagccaccaaacaacattggacagacttttcgcgtgggagaagaaactctatgatgaagttagg

SEQ ID NO: 175750 - DNA, 260 bp, Arabidopsis thaliana landsberg
atgacgcagtaagtgagcaaactccaacaaacaaacacttctctacaaatctttataaaatagtttctgacaattttgtgtgttaattaatatttacagaaggaagaatatgtactcgaagaaaaactcgttcggccgatcagatttcccagagggtttccttttcggtacagcttcatcggcttaccaatatgaaggagccagaaacgaagctcctcgaggagagagtgtttgggacacatttgttcgcaaatatccag

SEQ ID NO: 175751 - DNA, 365 bp, Arabidopsis thaliana landsberg
atggaggacgaaccaaagctcccaaccgatgacggtccaactttcgacgaatcgtgtaaaatctcgtctgagatattgaccgccggtgatcggaaattacttaaagttgaactcctcaaagaggagaccacgctcgtatcgtggaagaagcttatggatgaggctagcaaagaaaacggcggcttgttcgcttcggctcccgaacggcctcttaatgccaaccctaacctcgagtttcgccttgcaccggtgagttcttagctgcctacatgcatattctcatgtatacatttctctgtctctgttagaccaatttttgtattgtatcatcattccgggagctgaattgggaaatttctccttga

SEQ ID NO: 175752 - DNA, 174 bp, Arabidopsis thaliana landsberg
attcacgtaagagatgtcgagatttttggaatagtcaaagaaggtcgatcggattttgagctccctattgagattctgtcgataattccgacggattctttcgagcaagtggatctcgcgaagaggcgatcatctgtaaagtgtcgaatttggaggaagaggtggtcgaattga

SEQ ID NO: 175753 - DNA, 953 bp, Arabidopsis thaliana landsberg
attccagtgagtttaatgacacacaagagagtgaacaacttgagtttgctgctggacaatgtgtcaatggatatgtctacaaagtggataaggaatgggtttggttagcagtatctcgcaacgtgacagcacgcatattcatattagacacatcatgcaaagctcatgaacttgaagagtttgaaaggcgttttcccatcggtaaagctgtttcaggctatgttttgacgtacaataaagagaaaaaaacattacggttggttcagcgtccactactgtttatccacaaaagcattgccaatggtggaggcagcaaaacggataaaccatacagtagcattcctggtgatgatgatactctatttattcatgaaggagacattctgggtggaagaatttctaagatacttcctggtgttggtggacttcgtgtgcaattaggtccttatgtattcgggagagttcattttactgaaatcaatgattcatgggtccctgatccattagatggttttcgtgaaggccagtttgccaaatgtaaggtcttagaaatcagcagttctagtaaagggacttggcaaattgaactgtcattacggacctcactagatggcatgagttctgctgaccatctctcagaagatttgaagaataagtaagtttttattttgcctatactcttcattactgtctgtgttgcttttaatatggattaaatctgtttgcgttaaatcaatgctggtaaacagctcatcaccactagacgataactattattgggattttcttatgcattaactctatttgaacttgaaattcgtatgtttgtgaaatattttcccaaaatgtttctaatttacttattcacctgatgattgttttcacttttcagtgataatgtttgtaagcgttttgagaggattgaagatctttcgcctgatatgggcgtccag

SEQ ID NO: 175754 - DNA, 150 bp, Arabidopsis thaliana landsberg
atcaactgccggtgtaacaataaggcgatggaagagccacgggcaaagattccggaggtaacatgtattgatgagcttgtggaggagcggcttgcaatggaagaagaagctaaccttgagaggccctctctttttattagtcttttataa

SEQ ID NO: 175755 - DNA, 783 bp, Arabidopsis thaliana landsberg
tgtattaactgttcacgtccaaggaaaagaattggcctcaggatccattttaagaggctgccttcatttagtggatttggctggaagtgaaagagtagaaaaatccgaagctgtaggcgagagactcaaagaagctcaacacataaacaaatcgttgtctgcattaggagatgtcatttatgcacttgcacaaaagagttcccacgttccctacagaaatagcaagcttacacaagttctgcaggactccttaggtaaacgaacacaaaaactaagttttgcaagccattttatttccccgtgctttgttgtagcttcatctctcatctatgaaactatgtgcaggtggacaagcaaaaactttaatgtttgtacatattaaccctgaagttaatgcggtaggggagactatcagcacccttaagtttgcccaaagggttgcatccattgagcttggagcagctcgatcaaacaaggaaaccggtgaaattcgagatcttaaggatgaggtacatatggcatcagtttcattttcgttgtgcaaatcttaataaatatgttgtaacaatctttcttccacatatttagatatccagccttaaatcggccatggagaagaaggaagcagagctggaacaattgcgatcaggtagcattcggaacacaactgaatgtcagagagcaagagcagtttctcctttccatctcccaagaactggtaacggtgctggaacaaaggctgaggcaagtccacagccaaacgacggtaccagaagctacgag

SEQ ID NO: 175756 - DNA, 482 bp, Arabidopsis thaliana landsberg
  unsure (1)..(482): unsure at all n locations
ctgcagcacgaaatcggggacggggtaaaacggatcgtagcccggtcgcaagccgacgccccggacgagacggctatcgcgcaggcgctggaggacgtcaacgtcaaagtgcgcaaatacaacaacacggtgccttcgccgctgctgcaaaaaacgcgcattttccgcgagacggcggagctgcagttggagcgctgggagtaagctcggccgtttggccgccgtgggcaaaacagttacaataggagctatacgcttcagaacnnnnnnnnnnnnnnnnnnaacggaccgcggggattgtggaaatgaacgtttcgggcataaacgatttnnnnnnnnnnnnnnnnnnnnnnnnnnnnnnnnnnnnnnnntccgggctgatggcctgcatcgccgccagccgcgcggtcgcgcgcacgctgctgctggacaaaggcgacaagctgggccgcacgctgggcatttccggcggcggtcgctga

SEQ ID NO: 175757 - DNA, 137 bp, Arabidopsis thaliana landsberg
atatatgggatcaagacgttggttaagagctatttaccttttaaggatgttcaacttcgtgcgggtgttgatgatcttcttggaatactaaaaaacattctttcctttggcgaagtatccgaagatctagaatcaag

SEQ ID NO: 175758 - DNA, 326 bp, Arabidopsis thaliana landsberg
atggctgccaataataaactcaaccaaccgtatgagttcataaatctgcctaatacttacattcgccgaatcatcgagtcctgtggtgaaattttcgttcaaacttgcaacgtaatttatgtctacgattccacaacgttggaaataaaggatgtcattcagactgaatgccccatcacttacttagagctcaaccagaggaaagtacttattttggggatgataaatggctatttaactatatctagacgacattcgaaagacaggtgttgtacccgctgtcgtccgacattgaaaaatttggcccaaaatctgataaacgctaa

SEQ ID NO: 175759 - DNA, 95 bp, Arabidopsis thaliana landsberg
atccagttgatggagccaccgctgttgctgatgttggcatgatttcggtagataagaagctaacaggacatcgtagacatggtggcgtcttttga

SEQ ID NO: 175760 - DNA, 94 bp, Arabidopsis thaliana landsberg
gtgtatagaaaatatatgcgagtcgataatatatgcgattcgatgtaaaggtgctatcaccatccaacggtttcgtcgaaagatcaaaacaaag

SEQ ID NO: 175761 - DNA, 1103 bp, Arabidopsis thaliana landsberg
acaaaagaaagtgaatgcaaaaagtacacgtcgatacatcgacggttcattacgtttagaatactattgctatataataactacatgtgcgttgatatcttggtgcatgtttggcttattttgacgatttcaatatctcgtgacacttaagacaataattgtattcatcatgacagcttgtaaaacgtatcttaagcccatatgtctaggtccaacccaatccatgatcgcagagaaggcgataaccaaaattcagtttaaactgatcttagaagtttttttttttgtcgactgaaatacatacacatatatcaaaatggttcggtaatccaaatcgatggtgtatatagaactataggtcttacatacttaaaataatgaaaatgtagtggtgaacaacatgctagctaacaagttagcaagacaattctaattacaagaataacagaaagccagaagagagcaaatatttgagtcttgcaaaccattccaaatatgttgagaaaattggctaaaatgttcaggaagttgtcaattttcttttagctttgaacagtccattgagatagttaccgatgtactttgatgcttgatcataggagaaaggcttatgcatagattcctaactctaaaaagagatccttctatgtcgttatgaaaaccgatccaacctatatttgaaaacatatcaagtctccttccatcaactatctataaaatcttcacatgtttaccaaaaaaaatgaactattttataaaacattaatttgtgacttcaaactccagtttttgtaataaagaccgttgttcaaaggtacttgtcttatgttcttgcagctgtgcagtttctcaaatgtatcattaaaaaccttatcattacgtgccttccaatgtatcaaataatccatggaaaggttaaatcttttgaagagccaggttgttccaagaaaagaatatccaaatttgcaaataccgacgacaccgaaatttccatagtgctgacgagatctgagcgcacatatctgcaatgcaaggaacactcagaagaacgttgcctactgtcttctctgccccaattcttaaacatcgcggatcacaattga

SEQ ID NO: 175762 - DNA, 216 bp, Arabidopsis thaliana landsberg
atggtgaaggagtcccagaaaatcgtggccgtagatcaagacattcccgtgatagatatgtccttagagaggtcacgagtgtccatgcagatagtaaaagcttgcgagacctctttttggtttgattcttggagctctcttggttgtatcatcgagaagcttggtgaacgcgggtacattgatcttggcataccaaaaacagccacagttggggag

SEQ ID NO: 175763 - DNA, 204 bp, Arabidopsis thaliana landsberg
ctagcggcattagatttcatcgcttgtgctgcagcagacgcttttgcgatgccggattcagggagtcagttatcatctcttgtatcgggttatcggatttattacggaggagggaaattgccgacgataagaccgaacaaacggagactttcggacatattgttgaagaacagtacgattgagtggaacgtgtttgagaaaaga

SEQ ID NO: 175764 - DNA, 121 bp, Arabidopsis thaliana landsberg
atgacaaacggtggtggcggaaacaacggagcagcaaaccggacggaagagttacaaccccacccggtgaaagaacaactccccggaatccagtactgcgtcaacagtcctcctccttggc

SEQ ID NO: 175765 - DNA, 439 bp, Arabidopsis thaliana landsberg
atgaatgaaactcgaggtggttacacggctaacgttacaatcttcaactacttgaagtatcacgacattgaaggaccatgggtgttagattggatatgggaagaccaaatcctattgagcactgtaggtgttcaaagtagtaattttacgatatacccggacgacagaaatagggttatgattgtggagttaccgccacaaactgatgataatgatgaccagctaatcataccaacttctagcaaggacggtgggattcctaggtttagagaagaacatgacgaccttgcaaaaagctcttttacgttccaaattgatgttggccgagctaatctaaaatatcatcttccggcaattgatcatgtagctctgaccacaccaagagggacatacatatgtgataaattgatgaaagttactcaaactccgggttatctga

SEQ ID NO: 175766 - DNA, 531 bp, Arabidopsis thaliana landsberg
atttgggtggcaagccgtttcggtaagcatttccccgattattactgcaatccacttgatctggccaaggccgaccccaagaacccggccggcattagcctcgccctgacgctgtgcagcagcaagagcgacagcagccaggccagcagcggcaccatcgccgtcgccagcaccatcgtcgccggcaacgacgttcgcatcagcgcggccggcgccggcaaggacagcggcatcacggtcaccggcagccgcatcagcgccggtcacgatgccgcgctcgacgccgaaggtgccctcctgctgcaggcagcccgcaacacggccgaacagcacggcaacaacagcagcaacagcgccggcatcggcgtggtcggcagccttggcagcaacaccggcatcggtatcaccgccaacgccagcgccgcaagagggcatgccgacggcagcgacgtcagctgcaccaacagccatgtcgacgcaggcaaagtcgccagcatgcaaagcggcggggacaccacgatcaaaggcggg

SEQ ID NO: 175767 - DNA, 327 bp, Arabidopsis thaliana landsberg
atgaccgccgatacggcctacgccaccgcctaccgccgctccctgcaggagccggaaatcttctgggccgaacaggccgcgaagctccgctggcacaagccctggctgaaggtgctggatggcgcccgcgcgccgttctaccgctggtttgcgggcgccgagttcaacacctgctacaacgcgctggatcgtcacgtcgaagaaggccgcgcggaacagaccgcgctgatctacgacagcccgctgaccgacacgctgaagaagttcagctaccgcgaactgcgcgacgccgttgcccgtttcgccggcgcgctgcgcgacaacggc

SEQ ID NO: 175768 - DNA, 74 bp, Arabidopsis thaliana landsberg
aagctttgaaacttatttgttctccggcgaagaagttgatcggtgatgatcggaaaacgaaatctcccgtttga

SEQ ID NO: 175769 - DNA, 200 bp, Arabidopsis thaliana landsberg
caaacaatgacgatgaaacaaccctaatggagaacctggtgtggagcgacaacgtacgacatttggttgaaaccctaaatcctggaagaatacttaaactggagaagatccaggagcagatcgatggctttgtcgttttcaatgagtttgctctagcaacttgtagaaaaatattacaatttaataaaggccaaagataa

SEQ ID NO: 175770 - DNA, 37 bp, Arabidopsis thaliana landsberg
atggatccagtgcggaatttacaccggcttgtgacag

SEQ ID NO: 175771 - DNA, 381 bp, Arabidopsis thaliana landsberg
gaaccaccaaagcctaaggatccattccaaggtgtaggaagaaccctaggagccagcggatctggttcaagttcagcaccacaagcttcatctgccccaatgaacgtagcaccagcaccatcaagagggctagttgtagatccagcagcaccgacaacctctatccagctcagattagcagacggaacacgccttgtctccaggttcaacaaccaccacactgtcagagatgtacgtgggtttatcgacgcttctagacccggtggctccaaagagtaccagttgctaaccatggggttccctcctaaacaattgacagaattggaccaaaccatcgagcaagctggtatagctaatgccgtcgtcatccagaaattctag

SEQ ID NO: 175772 - DNA, 538 bp, Arabidopsis thaliana landsberg
gagggagacatttaaccatctagccagctggctagaagaggcaagacagcatgcaagtgaaaatatgacgacaatgctcattgggaataagtgtgatcttgaagataaaaggacagtgagtacagaggaaggagaacagtttgctagggagcatggtcttatattcatggaggcctctgctaagactgctcacaatgtcgaggaggtaaaagcccccatgcattcattcaaatgtttaggcttaaacagagatctctacacatgctttctctagtgttccccaacttcttgtatctccaccagtttcttacttgttccactccagtcctaacacactaatagaaagtctaaatcattatgtcgacgtgtttcgtgttttttaatttttggctaggcattcgtcgagacagccgcaacaatatacaaaaggattcaagatggtgtggttgatgaggcaaatgagcctggaataactccagggccgtttggtggaaaagatgcatcctcctcacagcaaagaagagggtgctgcggctga

SEQ ID NO: 175773 - DNA, 80 bp, Arabidopsis thaliana landsberg
atgcagaatgaccatattccaaccctgttcaaaggatacatctattatcagacaacccatatcatggaaacaggaaacgg

SEQ ID NO: 175774 - DNA, 200 bp, Arabidopsis thaliana landsberg
gaacatccggtacctgctgtttaccgcccacattaatggccgcagcaagacgtccgccagccacgccggtcaaacctgggtcagtatcggtatataacgccaccaccggaatatccagtgccgcagccagatgtgacaatgcagtatcgaccccaacagcaaatgcggcctgcggaatgacctttgccagctgctgcaaa

SEQ ID NO: 175775 - DNA, 868 bp, Arabidopsis thaliana landsberg
atggagacatcatctatttccactgtggaagacaagccaccgcagcatcaggtgttcatcaatttccgtggggcagatttgcgccggagattcgtcagccatctcgtaacggccttgaaattgaacaacatcaacgtctttatcgacgactatgaagacagaggtcaacctctagatgtactgctgaagaggatagaggagtccaaaatcgttttggctatcttctccggcaactacaccgagtcagtctggtgcgtgagagagctggagaagatcaaagattgtacggatgaaggaacactcgttgcgattccaatcttctacaagctggagccatccaccgttagagatttgaaaggaaagttcggtgatagatttaggagtatggctaagggtgatgagaggaaaaagaaatggaaggaagcttttaacttgattcctaacattatgggcatcatcattgacaagaaaaggtaccatttttttttattttttttgactcagttacaaacctagacacagtagtgattagattacaattgtagacagatctatgaatacttctagaaccttttatggaacttagggaggtcatgatctcattagccttgaaattgcagtgtggagagtgagaaagtcaatgaaattgtgaaggcggtgaagacagcgttgaccggaataccaccggagggaagtcacaacgccgtcgtgggtgctttaggtaatagcaacgctggaacttcctcaggagacaaaaagcatgagacttttggaaacgaacaacggttaaaagatttggaagagaagttggatcgtgataaatacaagggaactcgtatcattggagttgttgggatgcccggaattg

SEQ ID NO: 175776 - DNA, 40 bp, Arabidopsis thaliana landsberg
atggccaacgacgtgaccaaagatccaacacccaaatctg

SEQ ID NO: 175777 - DNA, 130 bp, Arabidopsis thaliana landsberg
ggagaaattttggttgagtttattgtatcggatggaacatatcccgctaagattaactctgatacctacaacaacttagaggctgacaatgatagagaccgacgactctttcttaccgatttaaaaatgg

SEQ ID NO: 175778 - DNA, 154 bp, Arabidopsis thaliana landsberg
gtacatcaaagcactcgaaacgatagaacttgaattaagaaggataatagtttatattcaagtcgatgaatggaaaaatatcaaagaaatgaaggccaagatatctgaaatggacactaaacttgctgaaattatttcactttgtaataaataa

SEQ ID NO: 175779 - DNA, 265 bp, Arabidopsis thaliana landsberg
gatcgcttagaccaccatgtggatgttagtgcctctgacgtagaggtaatatactaagctaatgactaagcggtaggcatgcctagaaaataataaaaattaaagacttacatggtctttatctgctctgttttgttccttattacaggagttgcagaggagcatcgatactggtgtttgcatgacactgctattgtcagtagtggttgtggtcttcggtctttccgagtttgtcaagtttggacgacgaaggattttaggttga

SEQ ID NO: 175780 - DNA, 139 bp, Arabidopsis thaliana landsberg
atggcctctgtaagcagactgcgacttgttcattgggatcaagtaaaaaggaatttggaaattgacatacaacattccatcattaatattgcacttcttgtgcatacgaagaatggatcaaatcctcccgcagacattc

SEQ ID NO: 175781 - DNA, 97 bp, Arabidopsis thaliana landsberg
gtaaagtttattgagattgttgatcaagcatgccaagaatctattgatggtatcgttgtttgtttgattcgctttgcgaaaatcgatttttacaaag

SEQ ID NO: 175782 - DNA, 1169 bp, Arabidopsis thaliana landsberg
ctcgtggaattactgctggggagaattattttgttgatcttccggaaacatctaagacggaactcacgtatgggtctcttttgaactgttactgcaaggagttgttgacagagaaagcggaaggtttgctgaataagatgaaagagctcaacattactcctagttccatgtcttataacagcctcatgactctttacaccaagacaggtgagactgagaaagttccggcgatgattcaagaattgaaggcggagaatgtgatgccggattcgtacacttataatgtctggatgagggctttggctgctactaatgatatttctggtgttgagagagtcattgaagagatgaatagagatggtagagttgctccggattggactacgtatagcaatatggcatcgatatatgttgatgctggactgtctcagaaagctgagaaggctcttcaggaactggagatgaaaaacacgcaacgggattttacggcatatcagtttcttattactttgtatggacgtctggggaagctgactgaagtttacagaatttggcgttcgttgaggctggctattccgaaaacctcaaatgtagcttatctaaacatgatacaagtgctggtcaagttgaatgatttacctggtgcagagacattgttcaaggaatggcaagctaactgttctacttatgacatcaggattgtgaatgtgttgattggagcttatgctcaagagggtctaatccagaaagcaaatgagctcaaggagaaagctcccagaagaggtggaaagctcaatgctaaaacatgggagatcttcatggattactatgtaaagagcggtgatatggctcgagcactcgaatgcatgtcaaagtcagtctccatcggcaaaggagatggtggcaagtggctaccgtcacatgaaacagtcagagctttgatgagctatttcgagcaaaagaaagatgttaatggagctgagaatttgttggagattttaaagaatggaacagacaacataggcgcagaaatatttgaaccattgataagaacatatgcagcagcgggaaagagtcaccctgctatgcgacggcgcctgaagatggaaaacgtggaggttaatgaagcgacaaagaagctactcgatgaagtatctcaggatgtgtga

SEQ ID NO: 175783 - DNA, 73 bp, Arabidopsis thaliana landsberg
atggtgtattatccaaatcctcctaatgcaagagtgacttcgatgtccacatactctttgacgattcaaaaaa

SEQ ID NO: 175784 - DNA, 85 bp, Arabidopsis thaliana landsberg
gctcgataaaaaagaagaagttttcctgttactgcaaaaggacctgcgacgtgagagagagcttcgcaagacacttgaagctgag

SEQ ID NO: 175785 - DNA, 309 bp, Arabidopsis thaliana landsberg
tacaaaaaaatattccggtctgggtgctgaattcgaaagaccccaacaatcaaggcacgcagatcactgccatcgcaagacattcgcgcaccccatttaaatcgatcgcgatcaagcgcaagctcaccatcatcgacgtcgtggctagccgcatgctaatgacccacggctatctgaaagcgatcttcgatgtgtttgacaagccaagtgcgccgttatatggtttctacccgaagtcagcgtctctctctctgtggactcgacgatcgcctgcccgctatcgccgccgacttgagccagctggcggac

SEQ ID NO: 175786 - DNA, 298 bp, Arabidopsis thaliana landsberg
atgcccaaagaaaccacggtgcagcagccacaacccaacccccagttggccatggccgcacccaccggtggtatttacaacgcatccacctacaaccccctgtttgaggacgttcgcgcccgtcacattggcgacattctgaccattcagatcaatgaacagatcgacgcctcacagaaaaacaaaaccgcggtcaaccggtccgattctgcgtcaatcaagctgcctggcattccatttggctttggttcaaccaatcctttgaacagttcagccagcagcagcaaggcgtttgcag

SEQ ID NO: 175787 - DNA, 615 bp, Arabidopsis thaliana landsberg
aatcaccaaccatttgatcccaatgatggaaccatcccatcaaaccatctccataactttgaacactcttgcatctccttcaccttcatcacctatgcagctttcgccatcgtctttgataaaacaagaccaatagctcatcgatccctcatcaacttgatcgcggccctcgccttcgcccaacaactcttcctcttccatttccactcgtcagaccacacaggcgttgagggccactaccatttattgctccaactcgtagttttcgtctccttggtcacaacactcttgggaatcgccttaccaagtagctttttattgagttttgttcggtcacttagtgtttccttccaaggaatatggcttatgtcaatggcttgcatgctttggacgccaagtttagttcccaaggattgtttccttcacattgaagagggtaaacacaccattagatgctcagacgtcaaagctcttcatagagcaatatcattggttaatatccaattcagctggtttcttgtgatcataaccatctttgcaatgtggttttacatatttttgcaaaggatctacggtgagaaaattgaatactctcagcttcgaacaaaggattaa

SEQ ID NO: 175788 - DNA, 112 bp, Arabidopsis thaliana landsberg
atggggagcagtactcacagtatgttcaagctaggattgagcatttatactgagcatgatgttaaagccgatgatgacatgcctccaagtcaagatcatgcctatgctaaag

SEQ ID NO: 175789 - DNA, 247 bp, Arabidopsis thaliana landsberg
atgcttaaaaagtttgaagtgaagtcacatccacatccagagagacctgatcgtcttcgagctatagctgctagtcttgacacagctggtatgttgtcaggagaatatcagtatgtttcattttacaatatcatactggtgggagtaattttggtactcaccacatttgaatttttttgcaggtgttttccctggaagatgcttgcctattaatgcaggcgaaatcacgaaacaagaactccagatg

SEQ ID NO: 175790 - DNA, 118 bp, Arabidopsis thaliana landsberg
gatacctgattttgatgtagattatcttacgcatgactacattcgaaagtggacggaggaatgttgtttcaacaagaagaatgaggaagagacgtcttttggaaacaacaacagatga

SEQ ID NO: 175791 - DNA, 504 bp, Arabidopsis thaliana landsberg
atggtaagtgtaatttatggtcgtgcatatcatgaatcttctatgtgttttatgttattttcttttgcctgtaggaagctagttctggtgttacgccgagtgatgttcaggtttaccttagaggtcacagggggtcggatcctacaaatccagaacagttgtgttctcagtcagctgctgagcgtgtggtgagactttcgcaactagttacaatgcacttctattctaagagtcgagaaaaatataactgcattgtttattatttgtcaggcctcatatggtgcttccatgatgtcggagcatgggcaagactatgattggatgaatcagcctatcgatcctcaggttgtgtatgctagtggaggcggaaaacctcatggacggtgagtttgctattattaattcgtcgatttgatcttttctaacatgatgtgttgcgtgtttaacttctttctatttgtttctagttaccccatgtttggtagtgttatcgactcgactcag

SEQ ID NO: 175792 - DNA, 684 bp, Arabidopsis thaliana landsberg
atgaaaactttggtcggattttacatcctctgtttcttaatcggacaagatctgcctttcttagctgcagatgacgtcaatgtcataaacgattcgacccagaatctctgttttgcaaaccgattatccgatttcctccctccaccgtacagcaatatctccgataacatgccctgtactcctctttggaacacgttcgtcttacgggtaaaccgaaaaacataaaccaacttttcctaaaacccataattttgattttcaacgctgcttgctctgttttgcagtactcagaaaacagagacaatgtgatgacgattatagtatcggctttatacacaaccgggtgggttgggattggattctcgaaagaaggaagaatggttggatcaagcgcgatgatcggatggatttcgaaaaagggtcacgccaaaatcaaacaatactatctccaaggaacggagagagaccaagttgtgccggatcaaggagaattgcaactacaaaaagtcccgccggtggtggctcttcacggagcaatgatttacttagctttccaggtgaaattcgccgttagagttcctcggagagctgtcattctagcgtttagcactgcttatccttccaagctaggccgtttgactaagcatgatgataaaactacagtcatcgtcgatttttccaaag

SEQ ID NO: 175793 - DNA, 157 bp, Arabidopsis thaliana landsberg
gttgacaacaccagcagatacaactgtttcgagcctaggacagtcgtattatggagattatcaacctgatggcgctcaactggcggcccggtcgtattcgattgttaatacatttaataaacagacatctgcaactcttacaaatttgtacacttag

SEQ ID NO: 175794 - DNA, 72 bp, Arabidopsis thaliana landsberg
atggagggaaaccgaggtccacatccagagcatccagaaagtttatgtgacaacagcgcgacagaaaagctg

SEQ ID NO: 175795 - DNA, 234 bp, Arabidopsis thaliana landsberg
aaacttgtcgacagtgatgttgtccgcactatggataacagtgtgggtgtcactgagtctgatacagtcactcttaatcacattagcgcgaccgcggtcaagcgccccaacgggcctctgctttatgcagaagctcctatcgagctacaaaacatccttggtatcgcgtcattcccctatgtggccgttgatccatcctctctcttcgtggattgctctaacaccattctgtag

SEQ ID NO: 175796 - DNA, 390 bp, Arabidopsis thaliana landsberg
aacgagtggagccaacaacctagcgctcgccttacaacgaccctacggggcgatattcgcaactaccgagaggctctagaggaagctagcaggagtgacggccagctggcgacgaagctgcgccagaacgaagcgtggtttgatgagatgcgaaacgctgtcgccaacgggcaggtcgaccagctcttctccaaagcggtctcacaagctaaggctagagggagcaacgctgtcagcccatctggaaacgaaccaaacctactcgatgcggactttgatgaaactgggccgacggtcgtggagcaaatagcaagggttgaggaaattcttaagaagctcaatttgattaagagagagaggaaccaagttctcaaggacttgaaggacaag

SEQ ID NO: 175797 - DNA, 43 bp, Arabidopsis thaliana landsberg
atggattgtatccactcgttccgttataatccgatcctggccg

SEQ ID NO: 175798 - DNA, 212 bp, Arabidopsis thaliana landsberg
atgggtttcctgatcagcccgccggtcatcggttttattgccgaagcattcagcctgcgctgttcgttcacactgatcgctttactgggtttgggacccacgctgctggcttccatgatcaggtgggagtgattttttcctgcagctgtaaccttattcacccccgcatcgttttaccgcgcacctgccatccttccatcgcgtttcgttaa

SEQ ID NO: 175799 - DNA, 75 bp, Arabidopsis thaliana landsberg
atggaccttacccataagaccttcgatcctccgtcgcgcgcttacaagaagaatgacgttgtcattgtttcgacc

SEQ ID NO: 175800 - DNA, 90 bp, Arabidopsis thaliana landsberg
atgagcggaatcctacttgcaatgcctctatcttgtattgatgtctacaaagcagacttatctatcggtattacggagtcggaatcacag

SEQ ID NO: 175801 - DNA, 124 bp, Arabidopsis thaliana landsberg
gcacttgagtgcttggtgcgattggcttctgtaaggcgctctctgttcacaaatgatgctacacgctctaattttctagctcatttgatgacgggaaccaaagaaattcttcaaactggaaaag

SEQ ID NO: 175802 - DNA, 513 bp, Arabidopsis thaliana landsberg
agaacatgaaacttcagtgatcggatacgctcctgaggtatctaaatcttcgagaaagagatctgatgaagatcttgcagaagcagtttcagaattcacatgtctattaaaagatactcaatacgttctgactgataaagaggctctccgcgaagccctatacctatacccggatttcaaattctctggtttggtaagtactaacaaagtgcatattactattcagtgtacaaagatttattgttttaagacatatacgcagttcaagtttgctaatctatgtttggtcttgtgctcaaatcaaactagcctagatatctgcttcaccttttcttaatctagcagttaacgctataattgattgatgtggtttctcaggtgtttataccgaagaaaaaggggagagatgtagcagaagggtttatgagattgcgtgatgtggacccatatgaaagccaaaaagagggattctctaaagactatgtcttgcttgggaaggcaaatccatgcgaa

SEQ ID NO: 175803 - DNA, 308 bp, Arabidopsis thaliana landsberg
gttgcggagttaataaaagaggattcacgtatagaccgatatgaaaaactcctcaaaggtgaaaaaataacttatgggaatggcaaggtatgaacctggaatagttctttatcctctttcactcttcgatttctatatttacatccattgaatgttatttcctcattcagtggaaggctcacttagtttatccaagttgaagaaacagagagagacgcagaagaaagtcagaaaaagtatcgactcaagcacaagcttgcaagagtattacaacagacgaattgccggttagaagctgaaaacctttt

SEQ ID NO: 175804 - DNA, 384 bp, Arabidopsis thaliana landsberg
atgggcgagcaggtggctgaaaaacacgttggaccgcgctacgacgaggcgaagtttcgggtggctctgcaggaaatacgcaccctgagcgtgttgccgccggagcagttcgaaccgcgattgatgcagctttttcatgcttccggcgtgatattcgagctggttccagccattccccgctcgcacgtcagcggcgtggcgcgctggctggatgccgaccgtccgctgattcagttgtcgctgtatggcaagaccaacgacaagttctggttctccctgtttcatgaggcggggcatattttgctgcacgggggtggcccccgcccccggtccgcggtctcccttgacgaacccaataaggcagcttccacgcatgccaggaac

SEQ ID NO: 175805 - DNA, 177 bp, Arabidopsis thaliana landsberg
cgcgtcgtgctcgcgcggcttcgctatgcgcccgccctacggcgcagcacaccgcgacctagcccgctcgccgacctagcagcgctgtcgtgccttcacgccacccgccgccgaccaagctgggccttatgcacgcgtcatgtcgcgaccacgatgctgctcgcgtcccgtgctgag

SEQ ID NO: 175806 - DNA, 480 bp, Arabidopsis thaliana landsberg
atgagcagagttgagattgaagaagatacggaaggagatcgcatctcaacgaacgattactacttcgagagaatcggcgaacctatcagtatcaaagaagatgatgctcaatacgatctcgaaaaccctccgtcacagcctctcgctatctcagaacgccacgccgtcctctttgtcgcacattcctccggttagttttcgtaatcggcgatggtagaggtttttgctctgtgctgtttatttactgtgaccgttttgtgtggaatattagggttttttgttgggaggactaatgatgtaatttctgcatcgaagaacagtaacgggaacggtgataaggtttttatccaggatttgagcctcgtcgatgttcctgttggggacgttcgtatattgtctctctcagcggatgattcgattctcgctgtcaccgttgctgctgatattcatttcttctctgtggattcacttcttaagaag

SEQ ID NO: 175807 - DNA, 79 bp, Arabidopsis thaliana landsberg
ttctgaagatgttgattatgctgttattgttgttgttcgtcatggtgaaacatcttggaatgccgagagaaaaatccag

SEQ ID NO: 175808 - DNA, 562 bp, Arabidopsis thaliana landsberg
gcatttcaagaagcatggaaaggattatgcgaagatgaaacacccaacggctcagctttagtgatacgaaagaacgaaacatatactttacaaccatcaacttttcgaggtccatgcgtatcttctaacattcatattcaggtacttttgaagatgttaagtgatgtatataaagatcttgcaaaaaatctctttgcttcaaaacatgtttatgttaacaaagttgtaagaagtattttattttattaaacaaaaaaaaaagtattttattttaatgaatagatagatactatatatatcgagccaaacacttggtgcacatataagaacatatacatacatacatacataatattaacatgcatgtatgattctttttctttttgataagattgatggaaaactcgaagggccaaggaagccgatatattggaaaaacaaagaaaacaggagttggttaggtttcaaggatgtagaaggtctcgtcatcaacggctcaggagttcttaatcctcatggggaagcttggtggaaatctgttagtctctctaaacgaccaaca

SEQ ID NO: 175809 - DNA, 197 bp, Arabidopsis thaliana landsberg
atttgaagaaagttgatggtgaagaagctggagagaagcgtgatggtgactattttggacttaaggttaagatttgcaatggcaaggttatacatgtgattgcttctgtaaaagggttcttcgccgttggaaaacagctctcacattgtcattccattgttgatttgctccagaatgtcagcaatgcttttgccaag

SEQ ID NO: 175810 - DNA, 69 bp, Arabidopsis thaliana landsberg
atgcctacaaaagattcactgtcagaagatgcaaccagataccgttcagctcttgacatgacgcttaag

SEQ ID NO: 175811 - DNA, 61 bp, Arabidopsis thaliana landsberg
atgtggaataaagaagtaatagaagaactctttgaagcagatgaagcacgattgatacaag

SEQ ID NO: 175812 - DNA, 45 bp, Arabidopsis thaliana landsberg
atgacttatgatatcgggctcaccaagactaccaattataaccaa

SEQ ID NO: 175813 - DNA, 358 bp, Arabidopsis thaliana landsberg
atggagaaagatccaggtactgttcaatttattgttaatttcccttacattgttttgattttgtatcttcattgtaaagttaagaattttattttattttatctcattgttttgtcctttcattatttatccagatttcgcagtctctctgttgtgggatggtgaaaacacccctgttgaggttgatcaggtagataatttgataaacaacattgaagcttctgtgagaactgctgacccaagatatcatcttgctcaaaggaaggttctagtgggacatgaaaatctcgactttatcaaggagaatgaaaagtctctacaggtacaaggtttccgcttgatcaaaccaccctattga

SEQ ID NO: 175814 - DNA, 309 bp, Arabidopsis thaliana landsberg
ctacgaggccgcaagcccatgtccgccgtgatgtcgtcaaaccgctttggaacgcccgaccagatcgaggtgctcaggcacctggaaccgctggtgcgcgaccagatcgaactgcacaaggacagccgcaagctgtggttcccgaatgacctggtgccaaccgacgaacaggccggcgaggaagccgaggccgagctgatgcgtacccgcgaggccgcccgcggcctgccggacaccgtccgcatcgccctggccctcaacctgctcaccgaggaagacctgccgcacttccaccgcctgatcgccctc

SEQ ID NO: 175815 - DNA, 653 bp, Arabidopsis thaliana landsberg
atgcagaagaaggatccagaagttgatcatgatcctcagcttcaagaatttcttcatcaggagcataagttgaaattctggtccaatgacatgtgtattcatccttccaatggtgctgatgaccctaacaaagccaaaagatcattcttagattctaaaaagactagaaagagtaaagttggtgatgatgtttctgatatggaatacttcaagagtcggataaagaaaaatctggacagtgattgtgaaaccgatagtcgtgaagatgcaatcaatgtttttcctattgatggagaagttaaagctgacagagtcgacaaagatgatgatggccatgcaatggaggtagaagccgatggcagtgatgatgttcttgacgctggtcgccttttcgtccatggcctgccttactctaccacgtaatggatcttttttcttcttcttctttcctgattatccttgtgtcttatacatcttcatttgttctctcatgaaatagagaagaagagcttatggaacatttcagcaaattccgtgatatatcaaaagtccatcttgttcttgacaaggataccagaagttgcaggggaatggccttcgtcctttacctgataccggaatctgcaaaaatgtatcttaatcataccaattaa

SEQ ID NO: 175816 - DNA, 371 bp, Arabidopsis thaliana landsberg
atgggggacattatcaacgccgaccagacccgtcatagtttgatatctcggaagcgtaactccacagtaggagtgaaaatggatttgggatcagggattgattacggaacggcgcagtatttcacggagattagagttggaactccggcgaagaagttcagagtggtggttgatacaggaagcgagcttacttgggtgaattgtagataccgtgcgagaggcaaagacaatcggagagtgtttagagctgacgaatcaaagagctttaagaccgttggatgtttaactcacacttgtaaagttgatctgatgaatctcttctcactcactacttgtcctactccttcaactccttgctcctatgattacag

SEQ ID NO: 175817 - DNA, 741 bp, Arabidopsis thaliana landsberg
atgaatcacatgaccaagcaagagtttattgcatctcttaggaggtgagaatcaaattaagatttacatatatgttcttgatttcaaaattggaatatttccaacttttggttaatgtaaatgtttcaggaaaagtagcggtttttcgagaggagcttcaatatatagaggtgtcacaaggcatcatcaacaaggtcgctggcaagcaagaatcggccgtgtcgcaggaaacaaagatctttacctcggaacctttggtaaaacgttatcttagtagacaaatgtcctattcttcaccctgaaaaatccagtcattgattcgtatatatgtgtatagcaaccgaagaggaagcagcagaggcttatgacattgcagccataaagttcagaggaatcaacgcagtaactaactttgagatgaacaggtatgacattgaagctgtcatgaatagttctttacctgtaggaggagcagctgcgaaacgccacaaactcaaactcgctcttgaatctccttcttcatcatcctctgaccataacctccaacaacaacagttgcttccgtcctcttctccctcggatcagaaccctaactcaatcccatgtggcattccatttgagccttcagttctctattaccagcagaacttctttcagcattatcctttggtttctgactctacaattcaagctcctatggaccaagctgagtttttcttgtggcctaaccagtcttactaa

SEQ ID NO: 175818 - DNA, 268 bp, Arabidopsis thaliana landsberg
ggttgcaaacccagtgaagagcgtcgatgtaaggccggagatttgcctggtcgatcacttcctgattcgttcggtattgcgaaattccacaggaattccgaagcagatgttgtcttccagggtcccttcaatcaactggaccttttgcggaacaacagaaatgagggagagataagcttccttattcgattcattgattgctattccatccacagaaagtataccggtcgaatgattgggaagatcgccgtaaagcatcgccagcaag

SEQ ID NO: 175819 - DNA, 97 bp, Arabidopsis thaliana landsberg
atgcatgtccgcttcgttgatgatgtaatcacgagtgaagattctatgatatccagcgagcagttgaaggtttttgaaaagagagacaatgatttgg

SEQ ID NO: 175820 - DNA, 54 bp, Arabidopsis thaliana landsberg
atgacaatagacaacttcatctacgtttccaaacttaatcttcaggatcttttg

SEQ ID NO: 175821 - DNA, 178 bp, Arabidopsis thaliana landsberg
tggaagcgctgaaggatatcactgaaacattgggtgtgaagcacttgaacctaagtgaagatccatgtctcacaaagactttggtgatatcgcaaggtgttctcaaggaaggacagaacagcacaatcagatgtgactgtcatttcaataactacagcacttgtcatatcaaacactg

SEQ ID NO: 175822 - DNA, 79 bp, Arabidopsis thaliana landsberg
atgaaaaacgagaaatcttcagatgcttatggaacatattttcttctgatatcaactattttcttgcttttcattgcac

SEQ ID NO: 175823 - DNA, 222 bp, Arabidopsis thaliana landsberg
atggctcttgagtctaaaattgcggatcccccgcttggctgtatagctcccgatttatatggaggaggtactctgtttcagatatggattctatcttatctttaatcttgggaaataatcttcctttattccgatttgttattcatgtaaattcgaacttatattttcatatttctttctgcaggtcggtgccgaactaaacgatctcgaaaaccaaactaa

SEQ ID NO: 175824 - DNA, 296 bp, Arabidopsis thaliana landsberg
atgcccttatcggagttctacggccccgccaatccactgctcaccgcggaccgacctcgaccgtactgccatctccggtgagtatccgtccaccgtgttcgcgcaacattcctcttcgctctgtatcagtttaatcggggattagggcgattaatcgccgggtgggctgcaccggcgaggttcggtcgcagggcgggcgccgccgtgggtgctgcgtgcgccgctgtcttcggaccgtggaaggcaatgcctcctggccattggatcgaccactagcgggcaggattagagcggag

SEQ ID NO: 175825 - DNA, 177 bp, Arabidopsis thaliana landsberg
gtgtatagaacacatgaacgccgtttgagggacgtaacgggacgccgtgacaaaagctggctgccgtttaagcgacacgacgttaactcccactacctcttcatctttctctcgagtgccctgacgcgttttctgctttttgttctatctttcttcgtttttcctttttcttattaa

SEQ ID NO: 175826 - DNA, 149 bp, Arabidopsis thaliana landsberg
atgatcactaagggcaggccaaaagtcccaagaaaatcttggaactttaggcgaggcttgattgatcggttcagatttttcttacacgaattctttgtttttctcaactacttatccatgcctgcggtccaattaacatatcaacgagg

SEQ ID NO: 175827 - DNA, 81 bp, Arabidopsis thaliana landsberg
aaagtaggtaatgtccacaacgaagtcgtcaaagctatgatttatcttcttagtgaagaaggcaaaccgcaacactcatga

SEQ ID NO: 175828 - DNA, 75 bp, Arabidopsis thaliana landsberg
aatagatccggccctgacttcaagaaacgaaacatcaaagcccaaaaaatagaagatgattttcgattggaataa

SEQ ID NO: 175829 - DNA, 153 bp, Arabidopsis thaliana landsberg
gaagaacgagtgatacgacgaagtacgagaactcaggtcgatgtagaacttcctgtgagtggggcggagctagggttttatcttctccggtccggcgctacaaagcaaaaacgcggaagccgggaaatggttgatgagagagacgacgattaa

SEQ ID NO: 175830 - DNA, 367 bp, Arabidopsis thaliana landsberg
atgggtggaggtaagtcgaattcaagtagtcctgattcgagggaagtgagagagagggaagggattcctgagttggaagaagaaacagagcaagaagttatctttgggcagacgtttaaacatatgaagagaaaaggcattgagaaggtgaaagaacaacacagacaggagaatgagattcacgagagaaagatcaagaaacgaggagattcaggtgaaggaacttcaagggcagtgcctgtggtagaaagggctacggagagctcttttggttcaaagactgtgtcgtcgttttcgagcagtgaagaagagtcggagtttcatcatgttaatgatggagaagggaagagtagcagtaatgatttag

SEQ ID NO: 175831 - DNA, 340 bp, Arabidopsis thaliana landsberg
tgtcggcaatattacctcctggaattggaatttcagcaacgggcataccagtttcctggaaacaccgcccaggcaacagtaccccactgtgatccggaccaaagaatttccggtaaaattaatggttgaaaatattacgggatgcaaagacacgtctatacagatgctgaaggtgatcaacaattgttttatcgcggtccccacagcctttacaccgaacggcgacgggatgaacgattatttatatcctttaaatgcctacaaggcacgcgacctcgatttcagggtttataaccgttatggccagctggtcttcgagaccaaagactggactcattaa

SEQ ID NO: 175832 - DNA, 299 bp, Arabidopsis thaliana landsberg
gaggggaagctagaggagctgggggaggagtagcgacgggaggaggagttgctggtggaggagaagcaacgggaggaggaggagaagcgactggaggaggagtagctggtggaggagaagcaggaggaggagaagagactggtggtggtggatttgctggaggaggagcagtggtgactggaggaggagatgttgtgactggtggtggtgctgagacaggaggaggagttgctgctggtggaggagttgttggagttggtggagctggtgtagcggttggtggtgaagtcggagcttga

SEQ ID NO: 175833 - DNA, 943 bp, Arabidopsis thaliana landsberg
agtttggtgtttagtgggtcaaataacatcaaaatcagtggtttaacgtcgatcaacagccagaaattccatatagtcatcgataatagcaataacgtgaacattgacggcgttaaggtttctgctgatgagaatagccctaataccgatgggattcacgtcgaatcatctcactccgtccatatcactaactcaagaatcggaaccggtgatgattgcatctccatcggtccaggatccactaatgtattcatacaaaccattcgatgcggtccaggccacggcatcaggtaacacacacatacatttcttgctccccatctttcttgatatttcactttctaaaatgttctcttgttttttttgtttgtgtgaactctccaacagtattggaagtcttggacgagcagaggaagaacaaggagtagataatgtgaccgtgagtaacgtggatttcatgggaacgaataacggagttaggatcaaaacatgggggaaagatagcaacagtttcgctagaaacattgttttccaacatattaacatgaagatggtcaagaacccaatcattatagaccaacactactgtcttcataaaccttgccctaaacaggtaagaatatttattaattaaccatatctttacacccataactcgatatattgactcatttaatctggatattaatctctattattataggaatcaggagttaaagtatcaaatgtgagatatgaagatatacacgggacttcgaatacggaagtggcggttttgttagattgtagtaaggagaaaccatgtaccggtattgtaatggacgatgtgaatcttgtctctgttcatcgaccggctcaggcgtcttgcgataatgcaaatggatcagcgaacgacgttgtcccattcactccttgtctaaagagggagatcattataacttaa

SEQ ID NO: 175834 - DNA, 131 bp, Arabidopsis thaliana landsberg
gacgaacgttaaccgctactttaacacaacaactctccgacgacaacgacgacggaggagaagaagaagaagaggacgataaggaagaatgtgattccatcgaggaatctccttttcttcgacgagtatga

SEQ ID NO: 175835 - DNA, 703 bp, Arabidopsis thaliana landsberg
atgcatagagatattgttcctcgagcattctcctgcaattaccctaaccgagccgcaaagcttctcaaggcattgaatggaaacttccggaaccatccttgtctgaataaccaggtaaaaatgtgaaaaacatcttaagctgtttgcttcagatcgttgtttcttggcttactctgtttggcttattctgcagaatgtattgtattctccaatggggaagcttctaattctgcaaccatccgagagattctctcccccacaccccctgcttcctcccggaagtggtctctatctcttagcatctaagaataccgatgaaacagagaaaagtctaagggctgcaaagattctcttctttaactcaccacaccccctagagattctcagtgatcgtcgttcttacgggtcggaaggaaaaatcaaaagaaaccatgacatgagctcttacctgaaggccttgaggcatgtgatccggaaggagctgaagcagatgaaagctgagcgggatcaatggctgcgcaagttctttattataaacattttatttagtgggagagattctttgaaactcataacaagattcgtggcatcaaggagtagtcaactagtgatcatcttctttctcccaattagattgttaataatgagtgtctacagtgtggtctttcaccattcacaagcacattttagtttcttcaagtga

SEQ ID NO: 175836 - DNA, 111 bp, Arabidopsis thaliana landsberg
atggcgtccagtaatagcgagaagatcaacgagaatctgttcgctgttctgggtttgaagaaggaatgctctaagacggagctccgttctgcttataagaagcttgctctc

SEQ ID NO: 175837 - DNA, 1538 bp, Arabidopsis thaliana landsberg
atggcggcaaagcgagggagaaaccggtcgccgtctccggacccggaagggatgttcgccggaatggtagttttcatggttgaaatcggagtccagcgtcgtcgattgcaggttttactctgaaaattttgttcagtgttattttacttgcatcatcttcgacaaatttccttaacatcttctttttaattgttgcatgctatgtctgtcattttctctctatttgaatgaagatctggaagcagaagctggttcaaatgggtgcagtgatcgaagaagatcgggtaacgaagaaagtcactcatgttcttgccatgaatctcgaagctcttctccacaaatttgggaaagaacgtctctcgcattttacagcagtaagttcgtttttcgttcttttcagtttttactaaaaaatggatttcgtcatatagaaaaaacaatcttttataactatctgttgtgttgttcatgagttttctctacgattagattaattgggtacaagtttaatctacgaatagagattatccagtgttacaagtttatatacattggttgttccttgcagcgccttatgctttaccagtggttagaagatagcctaacttcaggagagaaggctaatgaagatttgtatgttctcaaaattgactcagaagaagttgataagccgaataagtctttgcctgcaataagtggtagcgaggatcaatcttcacctcaaaaaagaaccagatattctcctgatgctggtgacttcaaaggcgttgaaagtcatagcaatacacaaggatcaccggattcaccaacaagttgcagtgttccctctactagcgccagtcctggagaaggcatcgtagagactctcactagtccacaatcagaggtaagcctgagtgactcctttgctgatgcatccttttggttcttagaagttaactaaacaaaaacctgttttctatatctgcattttcagaaagaaataatgttgttgatattggaagttctcattgatcttcttttgatttgtagtccacatcggtgtacaaaccacccgatttgaacagaaatatcactgagatatttggaaagttaattaacatatatagaggtacaatctctggtgtttgtattctagactactcgcttatagtaagtaagtaacaatactctttcttttttttcaaaagctttgggtgaagatagacggtcctttagctattacaaagctatccccgtcattgaaaagttccccactaggattgaaagcgttgatcagctcaaacacctccctggaatcggaaaggcaatgagagatcatgtaagttgagaaatgcttcaaatgttttgtctaggttctgtgtgtgggtgtcaaaactgcaaacacttacccttttcctagtgcatacctataacctttgttttgatgtatttctgtgagaacaaagtcttattcttctacctgaatttggcagattcaagagattgtgacaacagggaagttgtccaagcttgaacattttgaaacagatgagaag

SEQ ID NO: 175838 - DNA, 133 bp, Arabidopsis thaliana landsberg
aatccaaagagaaattaatgcagaagaagacgaagttataatgaaaattgaggagcagcttttttggttagtcacgtcatgtgaagaggaagaagatgaaggagaaggagaagaagaagaagaagatcattaa

SEQ ID NO: 175839 - DNA, 512 bp, Arabidopsis thaliana landsberg
atggaaaaattcctgcagcaacaagtgttcgacaatacgattgatcgttacctgtatgtggcgggggtaatattggtggtgttgctgctgaaaaggctggtatcgaaatacctcgccaggatactgcacaaactcattgccaggcatgtaaagaatgtagccagggaatcgttcctgaacctggtggtgcagccgctggatgtattcctgttactgctgatctcctttattgccatcgacagtctttcgtttcccaaagcatgggatattaccatctaccatattacgctcaggcagttgatcgattcggccgcagcagcaatgatgatcgttgtatttatctggctctgcctgcggctgatagattttattgccctggtgatggaagaaagggccaaccttaccgcagaccagacagataaccagctggtggtctttttcagggatttctttaaagtgatactggtgatcataggaatactgatgctgctgcgcttctccttcataaaaat

SEQ ID NO: 175840 - DNA, 490 bp, Arabidopsis thaliana landsberg
  unsure (1)..(490): unsure at all n locations
atgattcccgagcgggcacggcgcgcctatccgctcaaaccgatcatccagaccatcgccgacgttgattcggtgacgttcctgcgggagaagttcgctcccgagatggtcaccgcactggcgcgtatcgacggtcggccagtcggaatnnnnnnnnnnnnnnnnnnngtgatggcgggggccatcaccgccgcagcctccgacaaggccgcacgtttcctgcagttgtgcgacgccttcgggttgcccatcgtgtcgctggtcgactgccccggctacatggtcggccccgctgccgaagcagaagcactggtacggagggcttctcggctgctggtggccggcgcggcactgcgggtgccgctgatcgcggtcatcctgcggcgtggctacggcctgggtgcccaggccatgatgggcggcagcctgcatgaaccggtgctgacggtggcctggccgggcgcgcacctgggtcccatggggctcgaag

SEQ ID NO: 175841 - DNA, 152 bp, Arabidopsis thaliana landsberg
atcaagttcataaaatcagagacgtcggattccgatcctatggctgcccttgcgtaccggttcacatggatgccgatttaattcgatccgttggattgggatccaacggccgatattcaaccgtaccccttcgccgtggacgttttgcttaa

SEQ ID NO: 175842 - DNA, 635 bp, Arabidopsis thaliana landsberg
atacaaatgaacataataagaggaagtcatcaaggaaaaagccacaggtttcttacgcaaaggagggaagcgatggtgattttgtcagccctccaaataaaaagacaaaatcaggttttgaatttgagtctgagcctaataagaagcaaacggctgaggataataagtcacctaaactggctgtttctggtgtttcttctgcttcttcacattcttataaaggaaaggccaagaaaaatgcgcattctggaaatgaagacaacttgtcagccaaaaacaaagttagtgaaggctgtgatggtaatggagaagatgcagccttgttgagcaagattggtagagttgaaaaaggatacaaagctaatgaaaattctaatccgcttgatatacctgatttagagttcagtgtgtttaaagttgaacggaaaacagaagattttgctgtcaatcaagtgtggtctactacaactgattgtagagatggtatgcctaggaaatatgctcgggtaaagaaagtactgaatggcgagttcaagctgcggatgacctaccttgatcctgtactggataagactgatgaaagtattccaagttgcttgtggaaagttcaaaaatgggaaaacaatgggagttaa

SEQ ID NO: 175843 - DNA, 188 bp, Arabidopsis thaliana landsberg
gtttattggagggagaagcaagaacgagtggagatgtaacaatacaacgtggagggtcttgcaacaacgacaatacctgtcacgatacatgtccgggttgtcgtatcacacaatgtattttcaggcaatgtgtttgtactcgttgtaacactccacgatcaagtttacgtattgaatcccatatgtaa

SEQ ID NO: 175844 - DNA, 745 bp, Arabidopsis thaliana landsberg
gaaagaaattgtggactagctactgatccaaataaatttcatgcattgaggcacttagttgttcagctgttgcttcaaatactcctccatccgggagaattctcagaagctgctactgaactttcagtatgctgtgacaaagctttcagttctcttgatcttctgaaaagtgatgggcaaggtgaggcagacgatgaagaagaaccagcagtcatggatgtcctcgtggacacattactttctctcttgccgcattcttcagctccaatgcggtcttctattgagcaggtaataagctcaccactagcaaacaaattcatttcttttactattcttgaagttactgatccttggctgctaaaatgagattcaatttaatcctttggttcaattgtttccaattggctcaagctcaaagtttaatagagttccacaatattatgtaacttgtaggtttttaagtacttttgtcaagatgtcaccaacgatggactgctgagaatgttgcgggtgatcaagaaagatctaaaaccgtctagacatcaggaggaccaagactctgacgatcttgatgatgatgaagaagattgtcttgctattgaagatgcagaagaagaaaacgaggagatgggtgaaactggtgagagcgatgagcagactgatgattccgaagcagtaaccggcgttgtccctatggcagttgacagagaagttcctgaaaattccgatgattctgatgatgatg

SEQ ID NO: 175845 - DNA, 601 bp, Arabidopsis thaliana landsberg
gtaaaatgcacttcgaaatcggcatgttcgaaaaatcctgttacggtggtcattacagatgaatgtcctggatgcgttaaggagtcggtccatttcgatttgagtggtacagcgtttggtgccatggcaatttctggtcaagatagtcagcttcgcaatgtcggggaattgcagattctttataaaaagtatgtatctaaggatttggcattagtatattactacaaagttattctatactaatttcgtaaggttatatttacttgttatgtaattgtgtttcattggtatgtgtgtgtgtttagggttgagtgcaactatataggcaaaacggtgacatttcaagtggataaaggttcaaacgctaactccttcgcggttttggttgcgtatgtaaacggagacggcgaaattggccgagttgaactcaaacaagctctagattctgacaagtggttgtctatgagccaatcatggggcgccgtgtggaagctcgacgtgtcgtcacctttgcgtgccccgctctctctccgagtgacttcgttggaatccggcaagactgttgtggcttccaatgtcattcccgcaaactggcaacccg

SEQ ID NO: 175846 - DNA, 104 bp, Arabidopsis thaliana landsberg
atatgcaagccttgcaagtagaaccatctggatatgtggacccccatgggattcaagttcatatatccgaaaatcccatcatcaattatagtcttaagcgatga

SEQ ID NO: 175847 - DNA, 119 bp, Arabidopsis thaliana landsberg
atgcagaacgactacgactcgctgaagctccacatcggccagtgcctgtcgttcctcgtcaccgccgacctgaagcccggcgactacctgctggcgcgtccacccggttcatcaaggag

SEQ ID NO: 175848 - DNA, 287 bp, Arabidopsis thaliana landsberg
atggatgcatcgagccgcatcagggtgatgatttccagccgctcggaagtgcccgtgttcggcgggcgcacgaagctgggcaaggtgcggcgcaacctcaaggcgttcatccagggcatccgctggaatgtcggcggcacgcgcgtcggcgccgacgagccgctgttcgaggtctggatccacgaggacgaggcggacgtgccgggcgacctgagcaccttccccgtgtcgccgcgcgagatcggcaacgcggacctgatcctcgtgaactataccggccaggccgg

SEQ ID NO: 175849 - DNA, 54 bp, Arabidopsis thaliana landsberg
atgcctcaactgctcaaccgactcgtgaaggctcttgtattcaaaaatgccatc

SEQ ID NO: 175850 - DNA, 90 bp, Arabidopsis thaliana landsberg
atgcaagtaaaccacccaatctccgttcccgtcgtccaccggactcggcatcggcatcacatatccggagcttccctcccatgggaaatg

SEQ ID NO: 175851 - DNA, 151 bp, Arabidopsis thaliana landsberg
gagcgtacgaaaaacagaaccacctcgtcttctccatctcaattctctgcgacattgcttctctggcatgtcgtcacttcgtctgccgtacaacagatcaagggaaaacggtgtctctgaaccaccaccgacgttttgatgacctgcacag

SEQ ID NO: 175852 - DNA, 126 bp, Arabidopsis thaliana landsberg
atttatgaaattcatatgtcatcaagtactcaactcgttgaacacactctaaggcgacaaattgatggtaccatgagagaacgacccctccatcgacaactagtgaaggctaaaccaaaccattag

SEQ ID NO: 175853 - DNA, 513 bp, Arabidopsis thaliana landsberg
gttttgactaatggaattgaagtgaagttgcagaggaatgcgcttagtgttcttgaacatcctacagggaacgaagaagacaatgatcttgaagtcgaccattctacacagtggaatcatccctccgatatgagtaagtttggttccttgtctctgcaataaagtcccaaattttagtctttttgaaatgtttcataaagaccgttctttgattgtcttttgcagcaactgaggacactttgaagcctcataagtcgaagaagagaggacacagatcatcgcggttatctcaaaaggctttgtacagggaagtttcttgtgactcacactcaaaaatctcgagtattactcctcgtctgaacatggtaaggcctcaaatttcttctacttggtgggggttttcatgttaatgctatgtgttactgatttgggaatattgttttaacgcagaaggttgatcttaccaagttggatatggctgcattactgagatattggcgacattttaacctc

SEQ ID NO: 175854 - DNA, 120 bp, Arabidopsis thaliana landsberg
agtcagggtcgcaaatgcctggcccagttgcactaccagaggctcaagaaagcagcagttacaacacaaagagcatggagagcaaggttagcccgtagagaactgcggaagcttaagatg

SEQ ID NO: 175855 - DNA, 225 bp, Arabidopsis thaliana landsberg
aatacagattcatgtaaatttcatccaacaagatccttaagaacatctagaatcagtctcgatagaaagaaaacaacaagacgtgccgatcaagaaactagaaaagaatcatatacgagatcaagacattcgatcgttaacctaatcgtcacgtcacatgatttcacatttcacatgaacgaaaaaggaattgaaacgaagaagaagaagaagaaaactacctaa

SEQ ID NO: 175856 - DNA, 90 bp, Arabidopsis thaliana landsberg
atggattttccggtggaggagacggtgatatcggaatcggagaaacgagagagagaggatttgagaaagctagaccttgacgacgaaagg

SEQ ID NO: 175857 - DNA, 361 bp, Arabidopsis thaliana landsberg
agcgatcaggcgtccgtggtcagcggcgcaatcgatttcgtgaaggagctcgagcagcagctgcaatccctggaggcccagaacgtggcgctgaagcggcagctgcagcagcagcagcagcgcagcgtcacggccgcgatacgcgacgacgcggcgcagccggctcgaggccgtgatgacatcggcgcgggcgcgggcggggacgccgcggcgcgcagcgaggtgtcggcgccggagccagacccgcctccgttcgcgcggttcttccggtacccgcagtacgcgcggcggcacgcggcggcgcgggaggacgccggcgcggaggagacgacgccgcgcctccgcggtggcggacgtggag

SEQ ID NO: 175858 - DNA, 210 bp, Arabidopsis thaliana landsberg
atttcagaattctcgcaaaaagaaagaaataagcgaactatggcaaatgtcgtcgtttacaacatagcaaacgacgtcgtttctcgaaattctgttggtcgagttacggcgtcatttattaccatttcttattgctataggaacggtgttgtttcccgaatcctgttgggtcgatacggcgtcgtttatgacaatttcttattgctttag

SEQ ID NO: 175859 - DNA, 123 bp, Arabidopsis thaliana landsberg
atggacctcattcttgtaccccctccctaccgcatagctctagcatgcatatacatagcaagtgtccacagagagaatgatatcactgcatgggttgaagatcttcatgaggacatgaacttg

SEQ ID NO: 175860 - DNA, 207 bp, Arabidopsis thaliana landsberg
gttaaaggagtggtaagagaccaaagagaagaggtggtgatagataaccgattaagaggatcatcggttcaagagaatgaagagatgaacgatgtgtttggtatagcgatgatgtgtcttgaacccgaaccagcaattagaccagccatgaccgaggttgtcaaattgctcgaatacatcaaactttccacacgttcctctttttga

SEQ ID NO: 175861 - DNA, 1377 bp, Arabidopsis thaliana landsberg
atggctttggaacagtttgagtttgaaaatatctcggaaggattgtctggaagtgatcaggatggtttcaagtttgaaaagattgggagacgctccacacagctgatatcgaagacaggaaacttattacctgttaataagtcaaaacgacttgtagacatcaaagataatgaagatgagcttgttaagaataatgtgaatgaggtatctatggatcagagaaggtcaataaggcttaaagctagagctgcaaaccaatcaatgggaggtgagtcatccgatggtagacccttatgctctgttaaggaaactaaagaagaaataaagattaagcagtcaaaaagatctacggtggtcagtagtcaaaaagagcttgttgagagaaaagcaaaggagcctttagtagatagcaaagttcctaggcgttcgaaacgtcttgcgaacgatgtaaatgtgctactggataagagacccgttaaggctgtgaaacctgattatctgaaagtcaaaaaggctccaaaacagtctaggcgacttgagaagagtctcagtgaactcctaatagatggccaagctcaaaagggtgataaacagcgaacttttggaaatggtcgtgagggtaaaaagcttctacgaagttcgaaacacactgcatcaaataatatgttgggtcaagcactgagtaattcactgaaacgttgttcagttattgacggtgaacgagctggagtctctgttggtgatgtgaagaagtcaaatgtgaataatgaaatgcagatccgtgttagagttactaggaactcttcgaggcatcattcatttaaggctccaatagagtttgaaaggaatcttattgaaaagaagtcggatgaaacttttgtcaaatcatctaaaagaggtactaggaggatgaagcggggcagatcagcagagccagggaaggacatagaaactcagagcaatctaacgtcaaaaaaacttttgaatgagtatactcagtttgagcaagaagaagcatgtgacgctaatgtggaagttagaggctcctccaagaaggcaaagacgatgaatcaagaatgcgttaaggatataccacaagtaatgactgagaactcaccttcttcatccgaaaccatagctgcggaatctgttatgattgttgagaatgttttggattcttcaccggaaaaatcagttgatagttctcaaagaacaaacactcaagagttgaattcggaagttatggaaggaaaacatgaagagaaacttgagggagacacagttttgatggttgcgattgaggaggaaaaaaaggaagtatcatcaagctctgtacttcttagtgagcgtttatcacctacttcagtacaatttgca

SEQ ID NO: 175862 - DNA, 229 bp, Arabidopsis thaliana landsberg
atgtggcatgataggtgccatcgtctgcgatcgcgagacttggcccctggtgcgggcacgcatcgacttcgcgtcgtcgtcgctaacgcggtagagggggccgggttttccgtcgttggaaaacgttatgacggcgtggtcgcgaatgccgccatcgaaaatgttgcgaaacatcacgacgggtttccccggtccggcgaaagcaacggcgatgcggcagcattcgcag

SEQ ID NO: 175863 - DNA, 595 bp, Arabidopsis thaliana landsberg
atgaagaattctgagaagagaggacgtaaacacaaaagacaagatgcttcatcggcggaaaacgccggcggcgaagttaaagaagcttcggcaaacgaacctcaatcccctgagcctgtttcagcttctgaagccaacccatctccgtcgcgacgcagtcgtgggagaggtaaaaagcgtagattgaacaatgaatcagaagctggtaaccagaggacgtcgtcaccagagcgtagtagatctcgtcttcatcactctgatacgaagaatggtgattgtagcaatgggatgattgtttcaacaactactgaatcgattcctgctgctccgagttgggaaactgttgttaaagttgtaccttcaatggatgctgtggttaaagtcttttgtgttcatactgagcctaatttctcgttgccatggcaaaggaaacgacagtatagttctggtagtagtggttttattattggaggaagaagagttttgactaatgcacattctgttgagcatcatactcaagttaaactcaagaagcgtggctctgatactaagtatttggctacagtcttggccattggaactgaatgtgacattg

SEQ ID NO: 175864 - DNA, 505 bp, Arabidopsis thaliana landsberg
atggatatcaaccttaatgttggttctggagctgaaataggtgaaagcataattcaagatgtgaagggggtttctgtaaccattaaccgatctctgcgagacttgttacatcagataccgagcattgaggtttctattgaggtaaaggataatgttttatatccagtctgtaacttaatacttacttactcatgctttttcgaaatatctgctttttcagatagacgaactaagagcagccctctcaaatagggaataccagatcttgacagagtgtgcacagtctaatatttctgagcttccacatgctgtgccaccattgagaaaaaatgttgtgacatcttcaagaaacttacatgaaactcttacttctgaggatactaatgctgctcagacagagaaaactgatgcttggatttcaatgaaggtttctgttgtcatcaatctggtggagttgtgtttgtatgctgggacagcaagagatacaccgttggctgctgtacag

SEQ ID NO: 175865 - DNA, 182 bp, Arabidopsis thaliana landsberg
gtgatggcagcgatgagtccgatgaagaggataagaagaagaagaaaaaggagatatcgaagaagaagagaaagcatgttggtcctactctggaatctgggaaaaaacgtggaaggaaaccttccaagtataagggggaagagtttacagctgaggggaagcaaacgaggaagagactttga

SEQ ID NO: 175866 - DNA, 109 bp, Arabidopsis thaliana landsberg
atgcataaaaaccaccagcttagtttctctgccagtcaaattcgagctcgaaatatgttattgacactgtggttgtgccgctgcacaatacattacgctgatataccaa

SEQ ID NO: 175867 - DNA, 884 bp, Arabidopsis thaliana landsberg
ggagggttacgaacgaatactatgagtatatacagttaaatcaaggaataagccaaggtcgtgtagaagccgtgaaggacttcttgaaccgccgcccggacgcagtggataaatatataaacccttacgagacgccattgttaaaggcttgcgcatatggaaaccccgagattgttaaattgcttctgcgtcgtatgacaccggaacaaatgcttcccaagatgagccaaaacaatttttacaacacgcctcttaccgtcgttgctgttagtggaaacatggagattgctgaagccttagtcgccaagaaccctaaactgctagagattcctggaaacaatggagagattccggttgtggttgcggttgagaacacgcagatggagatggctcgctatctttacaacagaactccggttcaggtgttacttgaaaaagacgggtttctcggtatcttgctttttctcaatgccatatattataaaaagctgggtaagctgtcggtttcttgatcttcaagcaaaccatgttttagggtgttttgatgatcatttcttgatttgtttttcatcatacaattagacatggccttggatctgttcaacaaaagcagacgcttagccgtcacaaaacacttgagaattgagtcggttcctatcattgtcttggcttcaaagccagatcttttccccggtggctgctatcttggaccattgaaacgcttcatctactcttgtccgtactaatctaagacctcttctttgcaacgatcaaccatattgttattctcttttgatccaatatgtttttctctcacttgctaggtatacaaataaagcagccaagttttccaaagccttctcgttcaaacaaaggtcatcaga

SEQ ID NO: 175868 - DNA, 169 bp, Arabidopsis thaliana landsberg
atggacttgtcggttgagaacggaggtttagctccaggttttaggtttcatccgacggacgaagaacttgtcgtctattatctcaaaagaaagatccgtcggaaaaaactcagagtcgaagcaatcggcgagactgatgtctataagtttgatcctgaggaattacctg

SEQ ID NO: 175869 - DNA, 117 bp, Arabidopsis thaliana landsberg
gtcagcagcagtcctcagcgacaatccctatgtttggctatgtagggataggcgttggcgtggccggactgttcttggatgcattcttgcttctgttgcacactcgtggcggagagc

SEQ ID NO: 175870 - DNA, 520 bp, Arabidopsis thaliana landsberg
gtctgcagatatagaacgatagaagacgagttcaaaagtccttctacaacagaactacataagtacttggctgatgagaattacaggtaagaatgacttcgtcaaaattgattcttttatacgaccatagagactgtgataacaaaaatattactggagtatatttgtagaactgaaaaataatatttacagttgcagcattttggaggcatgttgctgttagctcttaagggtcttaccacttttctgtttattcctcttgcagtggcgcaattggattttatattcttcttagagctgttgatagatttgctggtacctataagaagtttcctggacagtttgatgggtaagagaacacattctggcaaaatttgattgtatcttgaataattttggcattgctaggccattaacatgtcttttttctcatagatcaactgatgaggacgcatcccagttaaagactattgccctgagtcttcttagtgaaatgggttgtgacggctatgaaacttag

SEQ ID NO: 175871 - DNA, 143 bp, Arabidopsis thaliana landsberg
acttggcaaaatacccgaaaccaggaatcaagccaaatccaatatggatccgaattcgaaattttaaaatacccgaacagattctaaacatcaaaatccaaaatccggaaatcagaacccgattcaaacctgaatccgattaa

SEQ ID NO: 175872 - DNA, 128 bp, Arabidopsis thaliana landsberg
gctgatgcggacggtaatggttcaatagactatggggagttcattgcagctctaatgcacatcatcaggctcgacagagaagagcatctctactatgccttcctacactttgtcaaagtcaacagtgg

SEQ ID NO: 175873 - DNA, 20 bp, Arabidopsis thaliana landsberg
atggacgtcgtcttcatcat

SEQ ID NO: 175874 - DNA, 84 bp, Arabidopsis thaliana landsberg
atggatgatgatatcgtctatgcgcggtcgaacagcagcttgtggttgcagcatccaagttacgaactggtgaagagcttcagg

SEQ ID NO: 175875 - DNA, 530 bp, Arabidopsis thaliana landsberg
atggcgcgctcggcatcgactccctgggtgccctgcgcccacggggagatcgcgctctgtgagacgccgacccggtcggcgatctcggtctgcgtcagaccgccgacgtgctgctcgacgtactcctgccaactcaccggcgaaccgtagatcggctggaaggcctgttcatggccccaagtctgccttgcgtcggcgcaaacccgctggtctcgaatcacaaccggtgtgtttcagcaggtcaggacacccccgccgaccaggcactagaccacctccctcccgaaaacttgggtcttgcgttcacacacatgtgtgtgcacacttctatctatcgccgcaagacagcaggtcagcggccatgacaccccagaagggagggaacgccgcatgagagcagtcctgggcctccgcatcgaccagctccgcaagatccgccgctcgaagggcctcgagaccgacacctcgctcgccaccgccaagggcatcgacggcggcaacctgtcccgcgtcctgcgcggctgtcggca

SEQ ID NO: 175876 - DNA, 66 bp, Arabidopsis thaliana landsberg
atggccaccgaaaatttctctgattccaacatacttggacgaggtggtttcggtattgtatacaag

SEQ ID NO: 175877 - DNA, 1318 bp, Arabidopsis thaliana landsberg
atgtttacttctttcattgttgcatgtgcttggaggtttactcgcgagagagggtctaaactggttccaaagatcacaaggatctttactcaaaagttcaatgctccttactataattggtcctgtgttccattggctaaaagagagagactgtttttagagttcccggtaagcttcctgactctttgctttcttcagtctttgttttattggctgctcaagttcagttcactaacttcacactttttttgtagaaaactcaccactgggatcccttaataacagggacagtccaatactacttcaatgagatcgttaagaggcgcttgaaggacatggttagcaccgcaaggagaactcgagagcagcctccatggattggagaaactctgtggggaaccatgtgcgactactgggacactgaagaggcacagaaaaggagtaagacatattccaaagctcgtctctctgaccgtaacggtctcggtcctcacgtccactactctgggccaaagtctttccaagaaatctaagatgaattggtaagtgtttctgcaatcttcccatgtgttttagtgatgttcgtttaactgtgtgtgatgtttagtctgttgatagtaatgaagcttgtgatctgtgtttgcaggaagaaaaaatgggaagacctgtccctcttggtgaggtgttcatccagacacacactaagtcgtatgggacttatgttgatcagaaggcagagaagattgctctggcgtatcagcagaatgtgagagagaagctgtctgaactagaggcggctgcttctgctgtgtctgatggctcttcacgtcctcgggatctcacactagatgagtatacagccatatttcttggggtaagatgttctttgtctttttcagagtgttagagacatataggatctgtcactaattatcttcctctttatttcttgcagtccacagaaaaggatgcaagaggctatctttatggacttggctgtcttaaagaaactctaggttgtgccaaccgccaactccccggagactcaacctttaaagccttagaagaacggctgcaggaagctcagcggcaaattgaagaacaggctgcatataacgaaaagcgagatgctgagattgctgcccgagaagccgagacagcccgagtcacagctgagcaaaaggacaagctcgagcacttgtccttagtcgagaagtatctccgccaaactgatccgcagttcttggacttcattgccacacactcttccacatccacagagcgtatcccaattactcccccatctaatgatccatag

SEQ ID NO: 175878 - DNA, 89 bp, Arabidopsis thaliana landsberg
atgggctttatctccaagtgaaaatggaaacaagcgaagcttgaaaccatcttcactaactccattgattagaacaacaaccggattcc

SEQ ID NO: 175879 - DNA, 196 bp, Arabidopsis thaliana landsberg
aaaaaaagaagagaaaatttggttggagagagaagaagaaagaaaagggtaccatagaaattatcgaggagataaggagaggaggaagcggcggaagaagcgtcataggagacaaactgagactgatcagatgacctcaacatctccattggtgacagagaaaacgttaaccagttcgtcatcggagccatcataa

SEQ ID NO: 175880 - DNA, 1153 bp, Arabidopsis thaliana landsberg
ctttcctgagtctgaaggcgacgctcttctgatagaagttcaagataagaagaattcagttcaaggaaaagcaatgatttctatcacatcattaactgaaaatccggtaaatacgcctttagttgtccttcccgggttgaatctcttccattttgcttctgagaatatgttagttagatatgctgaagaaaactctacatttgttcagaatgataatgtcagatggtggcctatataccatggtgaacaagaatgtgttggcaagatccagctctttattggtagcacaaccacgtccgacgaagactgtcacataaaggtatgttatttcttcaacaaatctcagattatctgttttgttcagtgagttaacttatgttttgcatttctgtatattatagagtgcacctgttgtggagacactagcatatgatttgctactagaagcggctacacgtgcccaaaaatttcatcctcaaaacttaaggctgaatggatcttggaaatggctgttaagcgaattcgcagattattatggagtttctgattcatataccaagttgaggtatttataaagataattcagttagactgccttgtatctcttgtaattcttctggaacttagctcaaatatgctgcaccaaactttgcagatatctctcacatgtaatgactgtggcaactccaacaaaaacctgcttacaacttgtgcatgagttacttgtgcccatcctaatggctcgaagtgagaagagtttaaccagacaagaggtaattccccttttgtttgtaaattgatgaatctgtcatctcaccaaaatcatagacttggattcgatttatcgcatttagtttgaaatttgcttgttttgttatctttatggctccatagaaatatttatttgagacttgttctattcttgcagaaaagtatcttaatggattgtgaaatagagatagcaaaactcatggcaactgtttctgagaactacaagtccttagatgaaaactgcccttcaggattggcagacatatcttgttccgtgcaagaatcggatacaacagcactttcttcagctgtgcaggattataccctccttcatgatatattggctccagaagcacaagaaattttgaagaattaccttcag

SEQ ID NO: 175881 - DNA, 320 bp, Arabidopsis thaliana landsberg
gcagcattgatgccatcgcccggttacgtggttatcattatcgttgggtcgaccccaatagaggaccagaactgcaaacgggtgtgatagcccaggaagttgaaaagtacttccccgaactcgtccaacaaaacgagaaaggatttaaaacggtgaattacgtgggactgattccccatttaatagaatcagtccgggaattgaaaaatcaaacggcggagattgctgagctaaggaaggaaattaatgagctcaaagcactaacgaatagagataccggcaaaaacgctgcgctacaaaatacaaccaaaactaagtag

SEQ ID NO: 175882 - DNA, 626 bp, Arabidopsis thaliana landsberg
atggttagtcttcggagtaagactttgactgatgtgagaatctcttgctgcaagaatcttgacacagctgcttctttaaaggcaattgagccgatttgtgatcggatcaagagactgcatatagactgtgtgtggtctggttcagaggacgaggaggtagaaggaagagtggaaactagtgaggctgaccacgaagaggaggatgatggttacgagaggagccagaagaggtgcaagtattcattcgaggaagaacactgctcaactagtgatgtgaatggattctgttctgaagatagagtatgggagaaactggagtatctatctttatggatcaatgttggagaatttttgacgccattacctatgacaggactagatgactgtccgaatttggaagagattaggatcaagatagaaggagattgcagaggtaaacgcaggccagccgagccagagtttgggttaagttgtctcgctctctacccaaagctctcaaagatgcagttagattgcggggacacaatcggtttcgcactgaccgcaccgccaatgcagatggatttgagtttatgggaaagattctttttgaccggaattggaagcttgagcttgagcgagcttga

SEQ ID NO: 175883 - DNA, 197 bp, Arabidopsis thaliana landsberg
agttactagatcggtacatttctccatttcgatttcttctgagggaaaaaaataaaaatcctcaaacacaagagagtttcttctccgatttggattgggaccatcaaacgtgttttacggatcgggtttgcaatatcagtgtaccccaaaacttggaattcgaattgtttcttaagccttacaaatctcagagataa

SEQ ID NO: 175884 - DNA, 1165 bp, Arabidopsis thaliana landsberg
aggaggagatgagagttttacggtagagagtttcgtgggggcggaaaaggttgtgcttgaggatggaaatgatgatgctgaaagattagtggataaccaattcagtgaggttgaggacgatggtcgcccatttgattataggcctttagttgatgagactcttgatgagattaaacgggatactcatgtaaggtttgaggagaaagcatttattttggatgtggaaaacaagggagacagagaagatgagaaactgattgaaaatgatgggacgtgtgcagagcagtcgaggacaaatggatctttatatgaaaggatggatgatcagatggatgtttgtccagtttcaccttggagaccaatgaggcatgaagaggatgaggatgatgatgcggaccgtgatgactccttagattctgggtctgatggtgcagaaagttcttcacctgatgcttctatgacagacatcattcccatgcttgacgagcttcacccgcttttactctcagaagctcctactcgtggtattgtagatggtgaaggatctgatgcagcttcagaggggccacataggagtagtagtgatgaaggtatgagtagtagtgatgaaggagtggagtctgatgttgacagtgaaagtcatggagaagaaggcgataacgagaatgaagatgaggaagaggatgaagaagaagaagaagatgaggaagagaaacaggaaaagaaggaagataaggacgacgaaagtaaatctgcaatcaaatggacagaggctgaccaaagaaatgttatggatctaggaagtcttgaacttgaaagaaaccagcggttggagaatcttattgccaggagaagggctcgtcacaatatgagactaatggcagaaagaaatcttattgattttgatagtgctgatattccctttaatatgccgccaatctcaactgcaaggcataatccatttgatgtttcatatgattcgtatgatgatatgcctatccctggttctgccccgtccattatgtttgcgaggagaaatccatttgaccttccatatgagccaaatgaagaaaagccagacctcaaaggtgacggttttcaggaagagttctcttctcaacaaccaaaggatccaatgttcagaaacatgaaagttttagtgtag

SEQ ID NO: 175885 - DNA, 254 bp, Arabidopsis thaliana landsberg
gtggttcagcaggcttacgggcaggtaccagaaactactgagagcaattgtgaaccggagggtgatcacatttggtatactgatcgcattctgcgccggcacctggttcctgaatgggcatgtgccatcgggttttattcccaatgaagaccagggcatgttctacgcggtgatccagacacctccgggctcctctcacgagagaaccaatgaagtagcggaaagactgcagaagatcgcggaaacagtggatg

SEQ ID NO: 175886 - DNA, 500 bp, Arabidopsis thaliana landsberg
agtggcgacatcctgtacgtggtcgatcagggccagatcgtcaagggcggtttccagtacactgagtacgcctatcaggatcgtcatccgtgggtcgtgatccgcaaggatcggaccagcgaacacggcaagccgagcaagatcgagcgtgccggctgggtggatggcgtgttgacgctgaaggaagtcgtggccgatggcaagaccagcgaactgtcggccgacgaggccgccaagctgaagacgcaggccgaagcgatgtttgcgcaggcaaagaaggcggtgaagtaggcttcgcgcttttgcgcctgatgcgaaaggccgccttctcgggcggccttttccttgatgtgtgtaccaaggttggcggggggtaccggcggactggctgaaagcaccggcaccgccagggcggatgccggcgccctggatcagaacgcgatcttgacgcccatgttgaggttgttcgagcgttggttgctgtcgccgaaacgcccctg

SEQ ID NO: 175887 - DNA, 423 bp, Arabidopsis thaliana landsberg
atgcatggcatcgcgatccgcgtccgaatagacggcaacggtacgcaagccgatgcgctttgccgtgcgaatgatgcggacggcgatttcgccccgattggcgatgagaagcgtacgaaacatgccttgtcctacattcggtaaacaggtcgcgccgactgatcgcgcggctcatcagcggaaagcgaaagacaaagcccgagcacgtcgcgcgtttgcgccggctcaatgattccatcgtcccagagccgcgcggtcgcgtaatacgggtcgctctgctcttcgaactgcgcgcgcgtgcgacgatccagttcggcgatagcggcttcatcgccgctgcccttcaggctttgccggcgcaactcagtgacaaccgtagcagccacatcgggactcatggtggcgatgcgcgagttcggccag

SEQ ID NO: 175888 - DNA, 198 bp, Arabidopsis thaliana landsberg
actgctgatgagataaaagagtacagagagaagaaaatgaacagcccctggagggacagacctattgaagaatctctaaaactttttgatgaaatgagacgaggcatcattgaggaagggaaggcaaccctaagaatgaagcaagatatgcagagtgacaattttaatatgtatgatcttagtgcctatcgaatatag

SEQ ID NO: 175889 - DNA, 95 bp, Arabidopsis thaliana landsberg
gattttattgtgaagtaaaaagagtcggcaagtacatgaacattttcggatatcttagtcagcgagtacaaaaatactccagaagacaaagataa

SEQ ID NO: 175890 - DNA, 1310 bp, Arabidopsis thaliana landsberg
atcaaagaccaaaccatgttgatggcttcaatatttccagtgaaccttatatagttgctttagtgtgtaaggtagatccagataggcctaatgatgtaactatcttggcttcaaaacctcttttcgttgaggatggaaggaggaagaagaatgagaagaaagaacgccttttcggtattcatctcgtcaatttaactactaatattcgtatctggaatgcattgcatcctggtgatgaaggtgtgaacttgaatcttatctcaagagtccttcgaagaaacagtgaggtaaaagatattgataaactctgtaatagctttcgatgtttgtagtcatatcatttttggcttctgcttgtgtaggatgaaggattttgcattcagtgtttacaagaaggaagtgatggtcttgctcctcgtcgttttctcaagctgaatccttcacaagaagatgcaatactgaattgtttggatgttagaagatgctaccacgcgaataccgtcagacttatttggggaccaccagggacagggaagacaaagacaacaagtgtgttgttgttcacattactgaatgcaaaatgtagaaccttgacatgtggtccaacgaatgtttctgttcttgaagtggcgtcgagagttttgaaactagtctctggatcattgaagattggtaactatggtcttggagatgtagttttgtttgggaatgatgagaggatgaagattaaagataggaaagatcttgttaacatcttcattgatgaacgtgttgataagctttacccatgttttatgcctttttacgggtggaaagctactatcgatggcatgatacgtttacttgaggacccgaaaggacagtataatctatacttggaaaatctggcacgggctaacaatgtgaaaaggaaagacactggttcagtcttcaaacgcaaaggaaatgagcaaaatgaaaacatagtggaacaagtttctgatacacgtcctcaatcatttcaggattatctaccagagaaattcagtgaacttaggaaagatcttgaccttcatttctcaagtttatgcacacatttgccaactgctttactgtcatctcaagctgcaacacgtatgtatgaagctattgaccttgttagagatgttacaattttagctatactagatggtgtgactggtgaaggagtaaagtcagtccttatccctaatggagaaggaagtgacagattcagcagccaacatgtgacagtagaggatgactatctaaagctgttaagatcaatccctgagattttcccacttccagct

SEQ ID NO: 175891 - DNA, 194 bp, Arabidopsis thaliana landsberg
acaacctgaagataaggaagagacgagaaggaaagacaccactctatcgcaagccggaggaacaatcaaatcaagaccactcgacttcaaccttgttgggccgttcaaccatgtcttcacatcagactgctcgatcgcaaggtggagttcatgaagcccaatctaacccgtcagaccactcgatcgcgacataa

SEQ ID NO: 175892 - DNA, 60 bp, Arabidopsis thaliana landsberg
atgagtgtttgccgtgtttatcgctacttggacaagctgcatcaagaccagatagatcag

SEQ ID NO: 175893 - DNA, 709 bp, Arabidopsis thaliana landsberg
atggaagattcttcccaggttagtagatccttctctctctagtctcacccatcatcactacatagtcttaacgatttcatcttgttatgccttagtgtatcttgaaattattggccagtttcagcatgcttgcttgatttagtgatttaggacttaggagatcaagttgatatcaaatctggcattatatatgtgatgcaaaacctttttacttgagctttctcttttcataatacttgcttagtgaatggtaaaaaagaaagggaacgttttaacctctcaatcattggtagctagtagagaactgttcaagagaacataatacagtgtaggcaatcatgaagctggattgtgttagtgtttacacattgtggtcatctaatagtagagtgacccttgcatagtgggactgttttcttgcagcataggtttaacagagataactgtgaaatagctttataactgtttgcttttttttttctctagggaagttttgttgcaaccataaatgaggattatgaagcaatttgttggggctgtgggctaaaccttgttcttccatcatatgcacctgtttttaagtgtggatggtgtggtgcaatcacgaatcagaatccagtcagacctgaaaccaaaagctttgggttgagacgtttccgtgaccggtgttttgtcgttattcttgcagttcttatgctctttgtgatat

SEQ ID NO: 175894 - DNA, 647 bp, Arabidopsis thaliana landsberg
atgaagccagccaaaacccatgacctaggaaactatacgcaaataaagcaaccagtaaaaaccctgtctcagatcaatgttggtgttcttccacatagtatcaaccaaagctaccacggattctgtccaaatctgagtgattatacaggtaagactctacagagatttattgcgtttaataaatatagatctaaccctaaaagcttggttcatgcggttcctcagtgaaatcagactactcaggatgcacaaatccatacgaatcgataggttaggcaaataaacctagaaacaaatcgaggtaagcaccgaatggtgtaagattaaaacctatgcatagatcaaacgaaaagtgacttactgaagccattatcagcgagataattgaaagtgtgaccgtcgcaattgtaggtgaacttgttgttcgaggacggaagtttctggagacactgagcggcgacggaggtgaaattgcccttgaactcggtatactcggcgaggatcaccgtgccgcgagctacgaaactgtagatcaacgattgttgcgccattttttctttaccttaaatctccgatccaatcgaccgtctgatcagagaattttttgggcggtcgcggaaaaaaactacagatctagaagactatga

SEQ ID NO: 175895 - DNA, 354 bp, Arabidopsis thaliana landsberg
atgcctcgtcgctctttgatcccggcgctggcttttttcgtgcccgccgtcgcgctgctttttgccggcctgctcctgtggcgtccggtgctggcgccgaaaccgcccttggtggtcggcgaactccccgccatctgccgcgacaccggtttcgagggcgtgccctacgcggtctgcgagatcgacccgcatcgccatgctgtcgtccttgcccgcgcggacggcaacggcaagccctacggatcgctgcaggctttcgacgcggcgatgacggcgaaggggacgccagtcctgctcgccatgaatgccggcatgtatcataagggactcggccccaacggcctgttcgtcgag

SEQ ID NO: 175896 - DNA, 465 bp, Arabidopsis thaliana landsberg
  unsure (1)..(465): unsure at all n locations
atgtgcagtgggccagccacgtcatcctatccgttgagattggagctgtgcgaccgttggaggctttgtcctcatggtgcaccggacagtccggtgcagcaccggacagtccggtgcgcctctgacttctgctctgacactctgaattcaactgtacactttgcagagtcgaccgttgcgcgcagatgaccgttgctccgctggcacaccggacggtccggtgtacaccggacggtccggtgaattttagcggagggacctcccactttcccgaannnnnnnnnnnnnnnnnnnnnnnnnnnnnnnnnnnnnnnnnctgtccggtggtgcaccggacagtccggtgaattatagtgagtgcgcctgagaaacccgaaggtgaagagtttgaaggcaatcctccctggtgcacggacacggtccggtggtgcacggacactgtccggtggcacaccggacagtccg

SEQ ID NO: 175897 - DNA, 84 bp, Arabidopsis thaliana landsberg
atgctgaagcatttgtataaagacctttcggtgaagacatcatcttcgtttatctatctccaagaaactcgtgtcaaggatctt

SEQ ID NO: 175898 - DNA, 1764 bp, Arabidopsis thaliana landsberg
atggtttcctcaaccagcaaatcggattcaaaggaagaagtgaaacaaaccctaaactccaaaaaccctaaaaatgtctaccaaatcggaggccttcaagttgaattcccttatcaaccgtatggaacccagcttgcgttcatgagccgggtcatatctacgctcgatcgtgcccagagagacggtcactgccacgcgttgctcgagtctcccactggcacgggcaaatctctgtcattgctctgctcagttctcgcttggcaacagaactataaatcccggcttctaaaaggaaatttgtctcattcgaaagctgcccctgaagcagccaccgatccattgaatcatggaggtggattcataccggaaacgcaaccctcaggttcgtcattgactcttaacgatattgcaattatgatttgggtttatctctgaatagtggtaaatctgtgaatagatactcctgcatctacaaatgtggagaaagctgaaactgcaactaagaagagaaccaaaattcctaccatatactatgcttcgtaagctttaacatgagcaatttggaaatgttgtgaataaaagtgatggttttcttcttactgattgattgtttgtttttgttcatttaagacgaactcattctcagattactcaagtgattcgtgagcataggaaaactggttgcagagtccccatggctgtattggtatgtattaatagccttagatctcatgtgggcactgcttagtttaatggttaatcaagatcatatttcatatctctggggtccgtcttcattgtgcaaggcttctataatacattactgcgcgaatcgtcatgtttttgggaaagacaatgtagatgatgaatggtatgtttcaaccacattcttaccatcttacgattcttttcagttacgccatatcctctaaattaacttgtattcatattataggcggttgctcttaaaagataaggcaaacaaacaatgttatgcattcaagtgagtttttcctgataatataagttctttgtttttcacccttttgttgttagctcgtcaaaccatgtaactgtgttccttaactttgcaggaacgtcaataaaatcacatctcatccatcacttcagcccagaggtcacaatgaggttcatgatattgaagatcttgtaaaagttggaaaaaatgttagaggttagagttggtttgtaaagctgtacttttaattgattttgtttttctgtttcttattctctaatgattttcttgtaggctgcccatattttgcttcctggtcaatggctgagaacgcacaattggtgttttgcccttattcctatatagttaatcctgtcattcgagcaggagttgaagtagatctgaaaggagcgattatcatttttgatgaagcacagtaagtttcagaacccttcttagttttgatatatttacgcttagcatttgctggttgaatgtagtttttttagcatgcttttgatgttgatgataaggccgtctactaaatctttcactgtccacagcaatatggaagacattgctcgtgaagcaggtagcattaatttggaagaagacactcttttcagtatgtaccattcaaactatccttgcagatattcatggtcttgttcacctcgtgtcctttactaatgtggtttaagtgttatgcagaattacagaatgaactagaacagatgagcgtggcgcagccaatgatttatcaacccttgtgtgaagtagtagag

SEQ ID NO: 175899 - DNA, 162 bp, Arabidopsis thaliana landsberg
atgaccaattttccaaaggtaagtatcatcatgcggacaatcaattagactcgcagcagaaggaagaactcgttgaagcaaagtgattaccggattgcggcttctactcgaagagatcctccaggtatcatcgcggagagcatctctgacaaccgaatttaa

SEQ ID NO: 175900 - DNA, 475 bp, Arabidopsis thaliana landsberg
  unsure (1)..(475): unsure at all n locations
atggtgcccgccgccgtggtcgtgctggcggcgttgccgctgaccgccaacggcaaactcgacaaggccgctctgcccgctcccgactacgccgtcgccgccgtgcgggcgccggaatcggtgcaggaggagatcctgtgcggcctgttcgcccgggtgctgggcgtggagacggtcggcccggatgacgacttctttgccctcggcgggcactcgctcctggtggtgcggctggtgagcaggatccgggccgcgctgcgcgtggagctgaaggtccggatggtgttcgacgcgccgaccccggcggggctggcggcccggctggcgcaggccggcccggcgcggctgccgctcgcggcacggccgcgcccggaccaggtgccgctgtcgtacgcccagcagcgcctgtggttcntcgcccagcacgagggcaagtcggtgacctataacagcccgaccgcgctgcgcctcgacg

SEQ ID NO: 175901 - DNA, 117 bp, Arabidopsis thaliana landsberg
attagagatgatgcagaagacgaagacgatgatgatgagaccaagctttgtagatcccattgccaagagaaaatcaagaacgacgatgatgaagaagaccaaaatgagttttggtga

SEQ ID NO: 175902 - DNA, 404 bp, Arabidopsis thaliana landsberg
tttattgggctgattgggctgtggaagataccctagctaggggttctgaacaaaatcttgagatacagcgtactcaaggaggcgactcaatcccttctgattgggagaatctcgtcgatgaggaggtggaacatgacaaagaaatcactgaggaggatatacgacaaatgaaggaactcgaaaaggagatgatcctagatggaatgctcgataacgatgacttgcttggagaagaaatgttggctggtgaaactgagagttcaatcattgatgatgatagccaagagacgacaatctctgagcgggaagttcctatctctcaccgcatagaggaaatgccggcgacattccagtacccatcaaacaaacgcaatctatcacctgagcgggacaggagagattaa

SEQ ID NO: 175903 - DNA, 117 bp, Arabidopsis thaliana landsberg
atacaagtgaagtctctggctcagaatatccaagctataatcaaaagattggaaaaactgaagcaggagctcactgcatccgaaactgatggtcctgcttctgaagttttctgtaat

SEQ ID NO: 175904 - DNA, 627 bp, Arabidopsis thaliana landsberg
agtcaaccaagaacaacagtgaacaaagataacaaacaacaactgatttcacaaaggttatttcccacaatcgtgaaccagttgttaatttccggtttcatgggtaagttttatagtttcctctggcgtcattcatcataggttctctcatgttctaactctgaaactagcactaggagaaaattttggctaacttagtgttggcaactcaaattgcaatattttgttgaaagttgcctgctatgaaattttattttgctgtgtatatattatcatggggaccctattatcatgccattatgataaaaactgattaacaaattgtcttttatttgttttagagcaaaattaattgggataattttctaatgagattattggtcaacagtacaaagattgaaagtcgctgatactcaaatatcactaaatacaacgccggataccaaactcatatgacaccatatcaacctagaatttttctttctaacaattcaagagggagatgaaggatccgacccgatcctaacggcggaccaaatgcgaccaatgcctatggcaacgcgaggccaaacggcgctaattgcgttaagcgtaccaccatatgctcacccttacgcggaagtctga

SEQ ID NO: 175905 - DNA, 522 bp, Arabidopsis thaliana landsberg
atgggaaccaataatggcgtatcgctcatcgcggcgattgtcggcgtcatgctttgcattgtgatgcccgtcatcatttaccgtcagatagtcgacgagaatgaagaagatgtggccgttttcccgacacgtcttctgtcaattgccgttttaggcacttttgccgcattcgtctgcataaccgcctatggtttctataatcatcagcagatgatcgaaaatatacgcagagacagcgtcgccaacgaattaagcggcagtcttgtcgccgccgaagaccagaccatagaggcggttgaccatgcggcccgttccgcaaatatcagccaggaaatcgcatacaacgatgcacggcaggagctgtataaaatactgcagcaagctgcgaatgaacttgccggagggtcgttgcagcccgtcgacgatgttcgcacagcacaacgaaatatcgatgttttaaatcgagaaatattcgccctgattaaaagcggcgaactcgatgctatgcgcgcgcttcttaca

SEQ ID NO: 175906 - DNA, 1175 bp, Arabidopsis thaliana landsberg
cggcaaaggagaaatctgattctgactcagagtatgatatattggactttcccgaggttccaaatgtcttgctgcgaccaactcctggtgctacctctgtaaatgcaccggatgcagcgaaatcagccagttatgaacatacctctcacgacttgccctttgattcagagaatgcaggagtcgaaaaaacggcttccaaaagagatgaacatcctgcaaaagcaagcaaaactgtcgtggaaggccaacaatcttcacccattttgatggaatctttcgaaaagaagaattactctccgccatccattgatgcagtaggggccttccctacaaaagagagtggtgcttccagagatactccaaggaaaatatccgatggagacttgcatgatgtcttaatggctgctcaagctgctgctgactcagcagaacgtgcagcatcagctgcccgctcagctgcaagcctggcacaactcagaatcaacgagcttaccaggaagacttctgatcagtttccagaaagtccgtctgagaaccctttccatgctccctcaatgggaaaccttcaatttgatcatcagaattcttcggccagcagtagcggagatcttacagagctccagagagcagaaacttcgtcacttttcaactctgagcagaacaaccaacagccacagacacactcttcaatggaaaaaccgcagtttgatcgtcagaactcatcattcagtagatatggcgatcttaccccacagagattccattcaatggaaaaaccacagtttgatcatcagaactcatcaggcagcaactatgacgatcttacaccacagagattctcgtcattggagaaaccgcagtttgatcatcagaactcatcaggcagcaactatgacgatcttacaccacatagattcccgtcaatggagaaaccgcagtttgatcatcagaactcatcagtcagcagctatggcgatctgccagagctccaaaggccagagacttcatcacttgacagactcagccctgaccaggaccatcagcaaatgagactgccttcaatggaagatgatccctattactcataccctaatctcttcacatcgcagaagcatgatccctcatctggctctcattcgttctcagacaatacaagacccgcccatgattcgtga

SEQ ID NO: 175907 - DNA, 323 bp, Arabidopsis thaliana landsberg
atgaaggcgactcgcatatggatagaggtaggaatgataatcctattgaaactgtcttggcctcacagtcagctactgaagtccccgtccatgacttccttggacgtaatgaatgtgactcgcaaaaggatgataatcctgttgaaaatttattggcctcacagtcagctactgaagtccacgtccgtgacttctttggacgtaatgaagatgactcggaaaagaataaaggaaacaataatgatcctgctgaaaatttcttggccttagagtatgcttctgaagtccccttccatgacttccttggacgtgatgaacgataa

SEQ ID NO: 175908 - DNA, 348 bp, Arabidopsis thaliana landsberg
tggctggcaaaaggcgagcaactgtgcaaggaacgcgaggaggatccgctcaatcctgacattgccctgcaatggtgcatgtatctgttcgcgcgcctcgtcgcgaccggcccgtccggcgggatgggtatggaagagcgcgagcgcatcgaaagcgagatcgaggcaatcgtactggagttactgccgaccgtcgaggggattccgctgctgatgctggctgctgcgaagcaattgtacttcatcaatcgagggcacctcgatttggcggaagacatcgccgagcgcgcctttgcctgcaccgcggattacgccgccgctctgcccatcatggggcagaaacgctaa

SEQ ID NO: 175909 - DNA, 295 bp, Arabidopsis thaliana landsberg
attgctattccgggtatcatcagatcagcttggcaaaagaagacgacgaaaaaacaacattcatcaccccgttcggggctttctgctatacctccatgtcgcttggcctcaaaaatgctggagcgacttaccagagagtcattcagacatgcttagctgaccactggggcaagcgtgtggaagcttatgtggatgacctggtgatcaagacagaaaactcagaaaatttcattgaagatttacagctggtcttcaacagtctgtggcgatatcgatggaagcttaatcctgaaaa

SEQ ID NO: 175910 - DNA, 135 bp, Arabidopsis thaliana landsberg
ctagagctcttcaaaaccctagaaatcctcgaaatcagagtctttacctgggctcgtgtagatcttcagagctcggattcgtgtttctttcgtcgtctctcttcttcgtttctcgtcagatttgagattcgttga

SEQ ID NO: 175911 - DNA, 2153 bp, Arabidopsis thaliana landsberg
atgagggtttcagctgtgtctgctggacatcgggatgactataaaatttcacctcagataccaaatttgaatcttgcaactcatcaagggaagccggggcatgtctattcgcctaacttggtcgaatatgactcaccgtatcagaaaagctacatggatactgctgcacaagttcatgatgatccttttgtgaaatcagagagagaagttggtaatgaggatgaggatgatgatgccctgcaattagagagacaccgcaaggtttgtaaacgaggttttcgtgcgaattttttgtattgtataaatagctggcaactgtactcataattttttctcctttatatattcattgtagaatgaagaagcaagaatagctcgggaagtcgaggctcatgagaagaggatccgaagggaactagagaaacaagatatgctgaggcgaaaggtcttgttctgatttaagctaagcacatacgtttttaactgtatttgttgtttgtgttcattgtgtcaattggttttgcagagagaagagcaaataaggaaagaaatggagaggcaagatcgtgaaagacggaaagaggaagaacgtcttttacgtgaaaaacagagagaggaagagaggtaccttaaagagcagatgcgagagttgcagcgaagagagaagttcttgaagaaagaaacaatcagggtaatgtgaaatatgcgcttcatttaagtttcttgagaactcacttgaaatgttgtttactcattagcatctcttattatgactaggctgagaaaatgcgacaaaaagaagagatgcgtaaagaaaaagaggttgccaggcttaaagctgctaatgagagggccattgctcgtaagatcgcaaaggaatctatggaacttattgaagatgaacgcttagagctcatggaggttgctgcgttaacaaaaggcttgccttcaatgctcgcccttgactttgaaactctacagaacctcgatgaatatagaggtgaatcaataactcattttgttttattttatctatttttctgattcatttcagctgtttatgggaattgtctcttacattcatctgatggattatattatttcaaacaagcaggcaatatttcccccaacatctgtaaaattgaaaaagccctttgcggtcaagccatggaatggttctgatgagaatgttgcaaatcttcttatggtgacttttcccatcttatctgtcgttaaatttttccactttgatgtgaatctcaataacagtatatacatagaaacgagtttttgctttattttagtcaccagctaacattcttaacgtggttgacaacatgtaggtgtggagattcttaatcactttcgcagacgttcttggtctttggccatttaccctggacgagtttgctcaggcattccatgactatgtaagtgtttcactctttttcaagtctatacaagatctaaacagtatgcttctcttaacttttccttgttggtcatgtaggacccacggctaatgggagagatacacattgttctattgaagactataatcaaagatatcgagggtgtggtaagaacgctgtcgaccggtgttggagcaaaccagaatgttgctgctaatcccggagggggtcatcctcacgttgtggagggtgtaagttacccactttctagtatctctattgattataatggaaatctttctcctattcctcctaatgtttagtatgatgcaatttttggattaggcatacgcgtggggttttgatatacgcagctggagaaaaaacttgaatgtttttacatggcctgaaatcttgaggcaactcgctctctctgccgggttgggaccgcaactgaagaaaatgaacattaggactgtgtctgttcatgatgacaatgaggtgggccatctaacgtatttcgttaatttcggtttttctacaatattccgacttctggttttcttcaagtgcaggccaacaactctgagaatgtgattttcaacctaaggaaaggagtagcagctgagaatgcttttgccaagatgcaagagaggggactttctaatccacgacgttcacggcatcgtttgactccaggcactgttaagtttgctgcatttcatgttctatctcttgaag

SEQ ID NO: 175912 - DNA, 729 bp, Arabidopsis thaliana landsberg
ctttattgaaaattacggcactcatattgtaacttcggtgaccattggtggaagagatgtagtatacatcagacaacatcagtcttctcctttaccagtatctgaaatagaaaactatgtgaatgacatgataaagcacagatttcatgaagcagagagtcaatctattaccggccccttgaaatacaaagacaaggttagtacaacgttaagggcatggcgagattactcttgttaatgaattttatttcctataaaattatggtttgataaagatattagttgaaaaagctctctcctgtaggatatcacagtaatatttaggcgaagaggaggcgacgatcttgagcaaagccatgctcgttgggctgagactgtacccgcagctccagacattatcaacatgacttttactcctattgtttctctccttgaaggtgtgcctggtttacggcatttgactcgtgctatcgaactttacttggaatgtgagtttgtatctaaaaatttaacttctttgtatttgaatccacctggttacattctcatagaaatttctcgatatttttaccagataagcctcctattgaagatttacaatacttcttggattaccaaatagctcgagcttgggcttccgaacagagtaacctccaacgtaaagaacctgtgtgttcttctcttcaattcagcttaatgggtcccaaactattcatcagcgctgatcag

SEQ ID NO: 175913 - DNA, 342 bp, Arabidopsis thaliana landsberg
aacaatatgatccagaagtgagtttagggcacttgaagaggtatacattcaaagagcttagatctgccaccaatcatttcaactcgaagaacattctcggaagaggcggatacgggattgtgtacaaaggacacttaaacgatggaactttggtggctgtcaaacgtctcaaggactgtaacattgcgggtggagaagtccagtttcagacagaagtagagactataagtttggctcttcatcgcaatctcctccggctccgcggtttctgtagtagcaaccaggagagaattttagtctacccttacatgccaaatgggagtgtcgcatcacgcttaaaag

SEQ ID NO: 175914 - DNA, 378 bp, Arabidopsis thaliana landsberg
atgctagtagaggaagagaagactcataatgtcttggaagcatcttcgagcaatgctcatacacagttggttgatttagactatggaaacgcagaaaattctagtgatgtgatacttctgcaagtccaagatagtcataagtcaccactagatgagtcagttgatcaggagatctctaaggaagtagaaaaaacagagttattaaaagatttttgtggtgaatcaacccaagaatacaaaaatagaggaaatgttgaggcctgtggaaacgcagaaaatgctagtgatgtgttacttctgcaagtccaagatggtaataactcaccactagatgagtcaactgatcaggagatttctaaggaagaagaaaaaacagag

SEQ ID NO: 175915 - DNA, 16 bp, Arabidopsis thaliana landsberg
atgggtggtatcgaag

SEQ ID NO: 175916 - DNA, 707 bp, Arabidopsis thaliana landsberg
atgtaccgaaactcggttcttgccggtacattgcattatattgatccagaataccacagaaccggaacaattagaccaaagtcggatctgtatgcgttcggcataatcattcttcagttgttgacggctcgtaacccgagcgggattgtaccagcggtagaaaacgcggtaaagaaagggacgttaaccgaaatgctagataaatcggttaccgattggcctttggcagaaaccgaggaattggctcggatcggtttaaaatgtgctgaatttcgatgccgagatagaccggatcttaaatcagaggttataccggttttgaaacggcttgtggagacggcgaattcgaaaataaagaaagaaggaagcaatttacgtgcaccgagtcattacttctgtccaatcttacgggtgagtaaaaggttacctggttcggtacacaaatttagtaacaagaaatttgaaccggttttgatttttttatttattttgattgttggatgtaggagataatggaggagccagagattgctgccgatggattcacgtacgagaggaaagcgatcttagcgtggcttgagaaacataacatttcaccggtgactcgacaaaagctagaccacttcaagctcacaccgaaccatacgctcaggtctgcgattcgcgattggaaatcaagagtccggttttctaatgttgttgtttaa

SEQ ID NO: 175917 - DNA, 142 bp, Arabidopsis thaliana landsberg
ctatggatatgcagttttgaatccgtatttagcaaaccttgcacgtatgcagactctccgtaattcttctaatacatttgtttcccgtggactaacttttcatttctcttctgatgatgcagtaaatgtggaaggctattag

SEQ ID NO: 175918 - DNA, 87 bp, Arabidopsis thaliana landsberg
atgcaaagggagagaggaggcgaagaagaacgcaacaggttaagaagaacggccggttcagaacacaaaattgaaattttaaagacg

SEQ ID NO: 175919 - DNA, 272 bp, Arabidopsis thaliana landsberg
ttgataattcaaatgcgagtattatatcagaagtgcaaattagtgcatggggatctcagtgagtataacatactttattttgaggtgagttttgatttatctctacaagggtcacttatttgatcgtttcgtggcagcaaaacgaaacaaatataatgatattatcttgactttttcaggggcacctttatataattgatgtttctcaatctgtggatctggaccatcctcttgcactcaactttctacgggaagattgtgaccatgtctcg

SEQ ID NO: 175920 - DNA, 95 bp, Arabidopsis thaliana landsberg
atggcagaaccaactcatccgcttatgaccggttacaactcgtcatcaccgagatctgtcgacgacacagtcgagagttacattggaagctttgg

SEQ ID NO: 175921 - DNA, 434 bp, Arabidopsis thaliana landsberg
gtccagaacctccagagaacatcttctctcgcatttatgaatcctcagctatcgggtttggcccagaatggacaagctggcatgatgcaaaactctttgtcacagcagcaatggctgaagcaaatgtcgggaataacgagccccaattcattccgactccaaccgagtcaaagacaggctcttctcttacagcagcagcagcagcaacaacaacaactgtcctctcctcagttacatcaatcttctatgtccttgaatcagcagcagatatcacagataatacaacagcagcagcaacaatcacaattaggccagtcgcagatgaaccaatcccattcccaacaacaactacaacagatgcagcagcaactacagcagcaaccacaacagcagatgcagcagcagcagcaacaacaacagcaaatgcagattaa

SEQ ID NO: 175922 - DNA, 1059 bp, Arabidopsis thaliana landsberg
gttataatttgtgcatcagacattgttgatgaacctttttctgtatcggtgattaataggtcaataagaaaggcggattgggttaaaactgaaactgaccagatattaagtggtcgttgcccagagaccgatgggacgtggttaggtatttctactcgaggccgagtcgcttttcttgtggaggcagggcctattaacagagacagattcaacggcgccgagagtcgtactcttgagttcttagaggtttgattaatgcttttttctttcgttgatttttcgttcaaaactagtctggattctcacgggattgcgttgattacagagcaacgagagtccagaggcatttgcaaagtcatcggctgcagattacatacgtagcaagaacacaggccgtctttcatctaattgtggccagcatagcttcaaactcaatgctttatatctccaacccgcgtttctctgactatggcattgtctatacagagcctgttggtcttggtgttcacacactatcttcagctggactcgattcagacgttggatacagggtaattaatttagtacaagaatcttgtaacagagtttttccctatttgcaaatcttttcatatagaaatgtatagcttaataaaagcaaacccttcttttttggtctcatgcaggacttacgtatgagacactctttttgtgagatgattaacagagaacgactaccaccaataagggacattgctgagattatgtatgatccagtcaaagcttacgaaaccgtgctactgagctctatttttttcgtcgacatgaaggtaagaaactcaaaacattataattgagccaccttttttttttatgatcgttacctgcattatattatcgtaacctctcttcttcctttttaacattttaaaaaaaaagattggatacgaacactatggaacaagaattacgacagcattggttgtgaaacgcaccaaggaagtgttgttctttgagaggtacagggagatatttaatgatgattgggacgaccacgacttcgcgttcaccatcatctag

SEQ ID NO: 175923 - DNA, 261 bp, Arabidopsis thaliana landsberg
gattcatcagtttggattgcggtttacccgttaatgagtctccttataccgacccacgaaccggattaacattctcatctgatgctgattttattttaagtggtttacgtggtgaagctggggatgataacacatatatctacaggcagtacaaggatttgagatattttcccgatggaatacgaaactgctataatctgaaagtagagcaaggcatcaactatttgataagagcagggttcggatatggaaattatgatg

SEQ ID NO: 175924 - DNA, 459 bp, Arabidopsis thaliana landsberg
gtcttataatgatttttatgtttcaggtttgtttgattcactagaaggagaagaaaatgggaaaatttgatgctaaagatgtttgctttatcgtttggaaaattcttagattctcaacgaaaacaattttcagatacgtgaagagatacccaattgtttctggtgtttctacgtttttgatcatcttgtacacttttcttccttgggttttctattttttgctctgttcttctcctttgatagcttttgcttcgttttatatacggaatcatgatctgagttcgaagatttgtgatgaagacaagagaaaggatcgtgggttatctacgatttctcaagagggaagaacagagaaggctaagttaaagcatcaacaaagtgttagacgaaatgcaagaagaaaagttgaagaggttgggaaagattgggattcgtctcaagctagtgaggatgagagag

SEQ ID NO: 175925 - DNA, 38 bp, Arabidopsis thaliana landsberg
atgaccggttatgtcagcaatacagtacccataggcag

SEQ ID NO: 175926 - DNA, 252 bp, Arabidopsis thaliana landsberg
atttggatcaataacttatctccggcaaatatggtggttagaagcagttggaaaaatcagattcgaatttgcacccggaaaatccagtttacttttcaagatacaattaggcaaacctattagaaagtgtgggaggaaaacatgtagtttggaccaagttcatggctgggacatcaaaccggtccggtttcagttgtctacatcggatggccaatgcgctatgtcggaacgacatttggatgagtcggggag

SEQ ID NO: 175927 - DNA, 1904 bp, Arabidopsis thaliana landsberg
tcggcgtcttcgttcttcgaagacaataccattatcggatgtgtaaagaatttgtgctgatgtgggtatagaagacatttggcttacaattgttttattccaagttactatacttgcagtaagaatctccttgatattgccagttgcccttcaccagcatatgaatgtttaattccctattttcgtcacccttattctatttgcaaattttccagaagttttgaattatctgtgcttggtgaagggcaaaaagttgttactttgaatcctattgatccaaagacttccaagtcttgcacttcagtggtagctgatagtgggtttgtgaagagaaataccaaattcatcgtctctgatgatctgataatcactccaatgaacaaattttcaaccattggcctgttaaagaagatgcagattaacatgaacgactttgaggctcaatcgatttgtatctacaaagcagaggtttgctcatactattttttattttgctattgattcttttttatagcctttctgcatcggtttaaatattgtggtcctgcatttgtttttgcagctcgtcaatattttaagagcttcattgacttcgtcctctgctttgaccaacgttctctcgaacttacttgcaaaggagccaaagaaagaatcttgagttcagtttttctctggtgctgaaggcattcaagaaaacagtttggttctaatgttttttttcctctctgtttcatttcgttctgctgttgttcctattaagcaattctcatataatggttttcagcatttgttgatttatgattctaaataaaagttctttttttcttacattgctctatcataacacctctttgctaatacctaagactctgaagttgcctctttctgaagaccgtcccttgtggcttttggggtttaagaatcgtgttcttgttgagatgttgtccttgcttacaatgatctaaaactgtagttgagttcgtcaacttcattgttaagaaagattgcatgaacattagtcatattgaggagaaagtgattaacgttagcagatcagatatatatcagcatatgaatcttgatgcttctttatatcattaacattagactttttcttcttctttcgaatgtatcgttgttgcaggctgttagttaactgagagagagcttccttgattacaaaatctgtattaaccagtgttctctctaaagaaaaatcctaaagaagtaactcttttattttattttatttttaacaactaatcctcaagaagtagctcagtcgactttgcagacccctaaatctgatgaaactcattaaggcgtttctttctcaatgcccttatagctactgtcttgtttattactggagataggtgggcggctcgtctttaatcgattgcatttttatggaaaatatacactctttcccttgggacatgaatccaaactcatgcgctcatagggacactcaaaggtttcttggttttgggtatttgaatcttttatggtaactaaacattatgttctgtggaacacgtctatttatatgggtgggaaagccttgtttccatttactgacaaaaactcctttctaaaacactgctcataaattatctttcttctttgatttgacccccctgatattttgatggctaagagctctgagaagccgaagtttagcctaagacttctcattgatgaggagaaaaacagagttattttggctgaagctgggaaggattttgttgatgtgctctgtagtcttttgactcttcctatgggtaccattgtcaggttgctcgagaagcatcagaatccgcagtcttcagtcgttggttgtttacacaatctttacaaaagtgttgcagacatggacgttgataatttcgagtctcaagcaa

SEQ ID NO: 175928 - DNA, 186 bp, Arabidopsis thaliana landsberg
atgagaggagcagccatgaaaagagagaatcctcctactatagctcatccatttactacggaggccagcaacactattcacctccacgaaccgatggttcctccacttctccatctcatcagcccaaagaaaccaatgatcgcactgacataaccacctctacttcaagaggaaattggtggaaag

SEQ ID NO: 175929 - DNA, 147 bp, Arabidopsis thaliana landsberg
aattatgtcatccgttcaaggtcttcacctcgatgtggaatcaccacaatccattcagccattcagaagttatgtcgagagggggaagacatgacccaattgttagaagttatatgcacccgttccggagcctctaagtcacactag

SEQ ID NO: 175930 - DNA, 126 bp, Arabidopsis thaliana landsberg
ctcacagaaccaaaagaaggacttagagattggcttgacgctgttacaactgctcgcattccctgtgctgttgtctcaaatcttgatcggaaaaacatgatcaatgctcttaacggatggcgttaa

SEQ ID NO: 175931 - DNA, 193 bp, Arabidopsis thaliana landsberg
atggtggtcgctctctctggttgtttaatggatgaatgtgagattagatatgggatcaacaaagctggcgatagccctctctcggtggatcgattgatggttttgatggtggatcaagaactgctactttgtgatgagatcacgaatctagaccttagtgaatccacacaaaggacatatactcacacgttta

SEQ ID NO: 175932 - DNA, 644 bp, Arabidopsis thaliana landsberg
atggtgattgaagcagatgttgtggttagaaagtacaagaaggcaagatcaaaccttaaaactttgaagagacttggagctttacttttacatggagttgatgctaccacactgcattttcaccctgaccttcgttatagaagatttgatcgcgtcatcttcaacttccctcacgccggtttccacggcagagagtctgattcctctcttatacggtaaagttcaacgatttggcgttatagattggtccttcttgctgctgaatgtgtagaccagctgctgcaacttcgaggaatatgtgtgaagagtttgtacatgttctttatttgtttgtttgttgtaggaagcatagagaactggtgtttggatttttcaatggtgcaagccgtttgctaagagctaatggggaagttcatgtctctcacaagaacaaagcacctttttctgagtggaatctcgaggagctcgctagcagatgctttcttgtgttgattcaacgtgtggccttcgagaagaacaattaccctggttatgagaataagagaggagatgggcgtagatgtgaccaacctttccttttgggagagtgcagtactttcaagttcagattctctcgtgtcgctaaggaactttatgcagagaaa

SEQ ID NO: 175933 - DNA, 858 bp, Arabidopsis thaliana landsberg
ctaccaatggtggctatcttccctcagaatcaaatgaagatgatcgaaaggcttttagtgaccgtgcacgagctcttgcagatttaaaatttacatatgtcgtgtcctgtcaggtctatgggaaccagaaaaagtcaagtgaaagccgagaccggagttgttacaataacattttacagctcatgctaaagtaagaaagttctcttgtttgaaatcaaaacttcatatgcttattcttctagcttagttttaattatacattatggttaggtatccgtcattgcgtgttgcctatatagatgaaagggaggagacagttaatggaaaatcacagaaagtattctactctgtgctactcaaaggatgtgacaaattggatgaggtatgcaaaggaaatttataataactaagttcatacattcgtagcccacttccttgcttactggttttaggtcacaaaggaaaacttatttatttccagtcccacataggacccagatatagttacctatttatcctgaactttgattttgatttcttaggaaatatatcgtatcaaacttcccggccctcccactgaaattggtgaaggaaaacccgagaatcaaagccatgccatcattttcactcgcggtgaagcactccagaccatagacatgaaccaggtagctttcacctctctatccctcaaccattttattgattccaactatagtttcatttcctttttccatttcaggacaactactttgaagagtgtttcaaaatgagaaacgtgctacaagaatttgatgaaggtcgacgtggcaagagaaatcctacaattttgggtcttcgtgaacacatatttactggaag

SEQ ID NO: 175934 - DNA, 1650 bp, Arabidopsis thaliana landsberg
  unsure (1)..(1650): unsure at all n locations
acccggtgtcgcgtatacttggctcggctgcattaccgaaaactaaagaaagcagccatcacgacacaatgtgcatggagaggaaaagttgcgcggaaagaactcaaaaatcttaagatggtgagatgtggtttctttcttcgttttgttttgcttcttttgtctgatcatcttactacttggttaaaatcaactattttctgaagttgacttcttaagatattgttttgcatgaaaactaacacaatttctgttattcatttaacacaggctgctcgagaaacaggagctcttcaagaagccaaaaacaagctagagaagcaagttgaggaactgacatggagattacagttagaaaaacgaatgagggtgagttttctctttcctcgtcaaattgacctctgatttcctgtgnnnnnnnnnnnnnnnnnnnnnnnngctaaactaccctctcttcatttctcaacgctgcagactgacctggaagaggccaaaaagcaagaaaatgcaaaatatgagtcttctttagaggaaatacaaaataagttcaaagaaaccgaggcattactcattaaagagcgtgaagctgccaagacagtttccgaggtgctccctattattaaggaggttcctgtagttgaccaggaattaatggagaaactcacaaatgaaaatgaaaagttgaaggtgggtctcgattttggatctgtagcttgccatagttaatggttaatactgtttacagaatcttccaccgaatgaaaaactatgcttaaaaggtgcctctttattgtttatcttatgcaggggatggtgagttctcttgagataaagatagatgagacagcaaaagaacttcatgaaacagccaggattagtcaggatagactaaagcaagcgttggcggcagaatctaaagtagcgaagttgaagactgcgatgcagaggtactgtttgcatgactctatctattagcagtggcagtaatatattacttatcttgttcagacaataagctgatgtttcatttgcaggcttgaagagaagatttcagacatggaagctgagaaacaaattatgcttcagcaaacaatcttaaacactcctgtgaaatctgtagcagggcatcctccaactgcaactattaaggtagaattgtttctaagatactgaaacatatggtcttttgtgttaccttctacttgtgcttgatgttaaactttttggtcctgtttgcagaatctggaaaatggccaccgtacaaacttggaaaaccagttcaatgtagggtagctcttccaaaactactatcttgatctcttggatttctcatatccttttcttttgcattttctgttggtttgttcatctgagaagtatactttttcaggaagttgaggtcaatggaaatgctgggaaatctgctgcagaacgtcaacttgtactggccaatcactttatactatatatgcaaacagttttaacaagtaactctgttaatctgattttctctgccggtgcaggagaatgttgatactctcatcgactgtgttaaggaaaacattggtttcagtcatgggaaacctattgctgcatttacaatattcaagtatcttcttcactggcagtgctttgaatcagagaaggcta

SEQ ID NO: 175935 - DNA, 240 bp, Arabidopsis thaliana landsberg
atggactattttctccagcagatcgccaatgccctgtctgtcgccaggctctatgcggcgctcgccttcggatattcgatcggcttcgccgtgacgcgccgggccaatgtcgactatggcgcgctcttcggcttcatcgcgcacatgttcgtgctcttcgccggccacggctggagcaggctctggctggtgctgtcggccgtgctcgtcctctgtgcggggatggcgctggtctacggc

SEQ ID NO: 175936 - DNA, 291 bp, Arabidopsis thaliana landsberg
atcagccagctcgcccagaagagccagctcatcgacacaagtcagctcgtcgggagaagtctgctcgtcaagatcagccagctcgcccagaagagccagctcatcggtacaagtcagctcgtcgagagaagacatctcgtcaagacaagccatcttagcaagaagagccagcccaccagaaccaccagctcgaaacggcatcgcctcgtagcgccctcaattacgttctcagttcgcaataagcctttcagcccgtcgattgcccagcttcaagttcagctcgtggattag

SEQ ID NO: 175937 - DNA, 296 bp, Arabidopsis thaliana landsberg
ataacttcgagagatgcaacgaagccttacatgaaagtggttgatagttcatacttgggaagctctgatgaggtaagaggtttatgagatttttcttatttgataataaagtaacttcatcaattcctctgttttttattctcgtatgattgctctgttatgataggtaatgagactcatggagcgtgttgaagcaacattcattaagcattttgctaacgctaatcgggcaaaagcaatgaacattttacgacctaaagcgaaacgagagagacatagaattacattttccacag

SEQ ID NO: 175938 - DNA, 342 bp, Arabidopsis thaliana landsberg
  unsure (1)..(342): unsure at all n locations
atgtcaaacatactgcagtcggatgtttttatgaacaaggtctatgatctaaagggttcatctcaaggtcggactaacaagaagatcaaagtgagagataaaaccatattgaaggatatcgaccttgatttttgtttctatgtggattctttggccagacaccgtctcattaagtcagnctttttctctctcttcttatattgattcttgtcgtagagaatgatttagatgtgaactttcaattgtgcaagcaaacgaagctagattgtgaacttttggaagatgaaggcatcatggattacagcttaatgcttggtttacaagtgaaaggctcgtgtcatg

SEQ ID NO: 175939 - DNA, 37 bp, Arabidopsis thaliana landsberg
atggaggaagtaagacataacaagtgtaaagagctcg

SEQ ID NO: 175940 - DNA, 608 bp, Arabidopsis thaliana landsberg
atgtcgaaccaaaacaagccacagccgccaaaacctctgatgaagcaacagtctttgccaccagacataaaccgcgaagaggcttggctgcgaatgaagaaaaagcatccatcggcccgtcttcatcgcagcaagagctgcgtcacaaacgacgatatcgaggagctcagaggctgcttcgacctagggtttgggtttgagcctgattctcttgactttaatccaagtctctccaaaacaatcccagctttggatttgtacagcgccattcacagacagtacagcaaccatttgtctcggacatggtcgtctacgtcggaacgtgacgtcaactctagcaccacgactatcgtcaacaaaggtactaatatttttacttttctttgtttgtttgattttactttggttttgacgatgaacttttgaaaagatgatgatggaaagacgatgaaaaagaagctgaaacaatgggctaaggtggtcgcatgttccgcgagcagtcctccggtaaaccaaattgatgaaagtgataatcttctaatttttttctagttatgtccgaagaatggcatttttgtaatataattgttaaaggctatttcaattaa

SEQ ID NO: 175941 - DNA, 200 bp, Arabidopsis thaliana landsberg
atgatggaaaatcgaacgagatctatgatgggaggagatctcttgtggatggcaagattgagacaacaccattgtcgtcaatggagttgcagaccgatgtggtttcgtcgggtaagggtggtgagattatatatttcagagattcagacgatgagcatcctgattctgatgaagatcctgatgatgatttggacatttaa

SEQ ID NO: 175942 - DNA, 212 bp, Arabidopsis thaliana landsberg
gtcgagtaacctcagctcaggccactcgacgacgttactcgaccccctggtcgagtgccgcttcgccacgccacctgaccacactcgaccattcactctaccaagttactcgaccccctggtcgagtaccatctctcatcaccatcactcgaccggacactcgatcacgtcttcacagtctactcaaatccgcactcaaccagacaagctga

SEQ ID NO: 175943 - DNA, 317 bp, Arabidopsis thaliana landsberg
catgttagtcgtctggaatccctgctggaagcaaataaatcattaacgacgacagatcttcacgatagtggagtaaggactctatgcatcagcgaaccgcaacctataaacctcgataaggtagcaaaaatgtattgaacattcttggacaagtagttaagaaatattgttgttcgtgatacaccaacttgttctcggtttgacaggttcgtttatggctggaggaaattctgtgggataaaaaatcggagatggatgtataccgttgcaaggctgtgttgagcattcaaaactcagaccagatgcatattttgcag

SEQ ID NO: 175944 - DNA, 770 bp, Arabidopsis thaliana landsberg
atggctgggaataaagctaacgacgaagtcccgaggaagcagcatggtcaaaggaaggagaagcgggtattaagagtttccccgcggagaaaacgctctgcgacaaaggcaacggaggaactgggttagaatctctaatttaccgtttgttgtctttgggtgtatcagaatggtaaagcttgtttgattaaagggttagaatttgtcggaatttagcatatctttaggatgaaaaattgagaagtagaattggaaatctctgtttccgccaaaaatatgattttgagttataatctggaaaatttctgtgtacgtacactacttcggtttgcttaacagtatatcacgtttaattgcaggtagtccaagtgttgctccgattgaagatcttacagttgaagagttaccaccaagactctttgctatagaccggtacccttccgagacaaagatgaacgcgtactctaaaccggagtacatttctaacatagcaaatgtactaaaggggaaaccagagatgcagtttcttctcgattctccatttggggaactttttaaaatacccaaaaacaaggcatctttcaatgctaagcttgtccttggactaatatgccgtcagttagtgacaaagaaggtgaatgagatgtggattgtattcggtggtcatccaatcagatttggattaagagaatttagtatcctaactgggctggaatgtgggtatcccaagaagaaagacgtggaggatgttatcagtgtgaaacctgagt

SEQ ID NO: 175945 - DNA, 125 bp, Arabidopsis thaliana landsberg
tgcgtgcatgcggcttgaatcttgatagagggcggaagctaaataacggacgagaacacaagatctctaggagaactcggattaacaaacggatcttacttagaacaccgaaacttgacgaataa

SEQ ID NO: 175946 - DNA, 394 bp, Arabidopsis thaliana landsberg
atggagcaattaagaaaggtagaagaagaaagggagagggaaagagagagggagaaggatcgaatggcttttgaccagagagcattggctgatgcacgtgaaagattggagaaagcatgtgctgaggccagagagaagtctttgcctgataagttatcgatggaggctcgacttagagcagaacgggcagcagtggagagagcaacctctgaagctcgtgaccgtgcagctgaaaaggctgcttttgaggcaagagagcgaatggaaagatcggtttccgataagcaatctcagagttcaggtttctttggtgaacgaatggaaatatcactttctgataagcaatttcaaaattcagtctcttttggtgcttcaagatatcaagattctcatg

SEQ ID NO: 175947 - DNA, 531 bp, Arabidopsis thaliana landsberg
tacctggccgactacgtgagcaactacttcagccagcactgcaaggacctgtcgccgcggctgcagacgcactccgacgactcgacgggcaactacaacacctggtggtcggtgcgcgacttccggctcgacgcgtcgaagatcaaggcgagcgtcttcgtcgtcgcgggactcaacgacgagaacgtcaagacgatccagttcggcaagtggtgggaccagctcgtgaagaacaacgtgcagcggcgcatcttcttgcaccaaggcgagcacgtggagccctactactcgtacggctcggcgtacagcacgccgctcctgcagtggatggactactacctgcagggtctcgacaacggcgagcccgacgagccgcgcgcgatcatccagcgggaggacatgagctggtcgaccgaccaggagtggccgccgacggggacgcacgacgtcacgatccagctgtccaagccgctcaaccggctggcaggggaactcaccaccgacgccgtgacggggaagtcgtcgcgctac

SEQ ID NO: 175948 - DNA, 524 bp, Arabidopsis thaliana landsberg
tgttaggcaaaagtttgtcctggaaaggtcgcaggagggaaccaggttcttctgacaagatcaaggaaaaccggaataggagacatcacagaggtttcgagtgtgcttatttttcctcaccgagacatcgtcaaggaagatcttgtcggcaaattagacgtggtgaagcaaggtctgttttgttatctttagctgctcagtgatttatgagtggtttactattacaaattgtgcaagcattgcctagaaacacagtgcttagaaatttgagattgaaggttatatgcttagaaatcgtctctctaattatatacatcataaatcgatttattagtaaagcaattgtaaagcttgcttatgtatgttgtgtaatagaataaccaacatttttcaactttccagaaatgtatctgaggattacaagagagatggaaatccggttgaatttcaagaaaatggagttcgcactgaaatgcttcctcaaaagaatgatcaagtatctagaaccgtggtggatgttgctg

SEQ ID NO: 175949 - DNA, 280 bp, Arabidopsis thaliana landsberg
atgacgctgcaaagacgttggggcaacttgaatccaaacgtcttcgcctgcaatccctctcagcctattcaagagaaaatgcaattagccgtgatgctacccatgattttctgaatgaggctattagcaagcaaagactgccgattaaagcacacttcaatattcttacctggaccgataatccgggagatagaaaggaattaaaaacacttgtttcaacagccttagcacaaatggacgccatccctaaacaggaaacggatggagcgccacagatctg

SEQ ID NO: 175950 - DNA, 57 bp, Arabidopsis thaliana landsberg
atgcctcattggtacctaaaggtggacatctctgcaaatcgaaagagaaatcaagaa

SEQ ID NO: 175951 - DNA, 558 bp, Arabidopsis thaliana landsberg
atggcgttgtgtgtgctcgttgtcctgggcctgcgcgccgcggtccgttctacgtcggcggattctacgtcggtcgattctacgtcggcggattctacgtcggcggattctacgtcggcggattctaccgtagggaattatacatcgttgaatattgatcggaagaactctacaaacaactcttctacgaagtcgcgttctacgggcgagaagtcatcgacgtacagctccgccgtgtagacgtccacgagcgcgaagttcccgaaccatcgccgagttagcctatcgctctctagtcgagggcgggttggagcagacgacgtgaccaccacccggccggtccccaccctggagttcgaccaccactcaccccgggtctcgcaccaccgcgacgacgtgctcgccgaggtccgcccgcatccgatcttctggaccgacgcccacggcggctactgggtcgtcacctcgcacgagctgaccaagcgcatcctgcgcgacccggccgtgttctcctcgcagaagaccgagcagatgaccggcggcgtcaccatcccgacc

SEQ ID NO: 175952 - DNA, 311 bp, Arabidopsis thaliana landsberg
atgtgtctgcaactggtgacgccggccgtgctgctggtggtcggccacgccttgctgaccacgaagcgcttcctcctgaccgagaaaggcaagatcaggtccgaagccgaatcggtcgagagtaaccgcaacctggcgctcatgttccagagccagggccagctcgacatggccttcgatcgcttgcgcaaatgccccatggacgacagcgtcatggacgtcctgtacaaccttgcgctcgatttcgaacgtaagcgccagttcaacatggcagaatcggcgtttggctacatggcggacttcaatcccaa

SEQ ID NO: 175953 - DNA, 71 bp, Arabidopsis thaliana landsberg
gtacaattgacattgaagaactttttcgtggatgtgaaggaggatctttaccttcttcaagtcgatcctaa

SEQ ID NO: 175954 - DNA, 644 bp, Arabidopsis thaliana landsberg
gttcatacctatgagaggctttcaccattagtccctttgaaggttcctgtttcatcagtttccagtattaaaactggggattgtcttgtcactttttcccgaaaagatatatatgcgtataaggttagcagttacttatcttgttctctcttcctgtattttgcttttttctgcttgagtttgctgcgaaagaaatagaacattttggcatcatattatatgcatacatagctctattctctacgcgtcatgagtattgaatgcttccatacatattctttactcttttttttggtaccttttcgtagaaaacaattgaacgtgcggggaagcatctttgctctgtggcttatggttcgttgcctccagagactcgcacggcacaggtttgagttccttactgacttggctataggcttaactggatgctctaagaattatctgtttttgtttccaaatgctttaaaatctgcaggcaacaaggtttaacgatgagaccaatgactttgatgtgcttgttgccagcgatgcgattggcatgggtcttaatttgaatatttcaaggattatcttctcgacccttcaaaaatatgatggttccgagaccagagacctaacagtatctgagattaaacaaattgcag

SEQ ID NO: 175955 - DNA, 431 bp, Arabidopsis thaliana landsberg
atgttatcttcaaaagacataaattttgtcggctacacatacaaaaactttgaaatcgtcaacgattatcaagtccccggtataggtacgtatcttagtccttgaacataatcggataccaggatcagaacctctaacattccggtttatatttactacagccgaactaaaaaagaaagagtcaaaatcaaagagaccatcggttaagtcactattcggtacgtgaaaatgtctcagaactaaaaaaaaacgttacttattctctcgtataattgtcttcattcataatcataatcgtgtttacgtttgtaacagagagcgaatcagactcgtcatcttctggttcggagcaacagaccattaaccggagctattctaatccgacgcctcgtggaatggaacccaacctgagacgtctagattctgagtag

SEQ ID NO: 175956 - DNA, 171 bp, Arabidopsis thaliana landsberg
aacttgaataaatggatcgttggacagcaagtacatcatcatcatcggaccatgaatatgaataaacggatcgttggacaacgagtacatcaccatcattggaccatgtctttggaaggaggaaattatcgtcgatgccagttccttcactcaaaaaaatttgtctattga

SEQ ID NO: 175957 - DNA, 126 bp, Arabidopsis thaliana landsberg
actctatcatccgttcccaactgccacgtgctcgaagcagagcaagttaacggttccaagaacatgaatacacgtggcatgacagctgaaattctgattggctttcacgtttatctacgccgctga

SEQ ID NO: 175958 - DNA, 104 bp, Arabidopsis thaliana landsberg
agcccactgggccagaacatcaccattgcgtatagcatccgccagggcaccatcgacacatgctattgttttaattacaaccagtcggacttcccctctgtccg

SEQ ID NO: 175959 - DNA, 96 bp, Arabidopsis thaliana landsberg
acgcattgtaccgatgagagcacgtctctggccgtgagctacatgtcttcggcgactaccgaaggagaaaaggcgagtgatagagcatcttcatag

SEQ ID NO: 175960 - DNA, 1428 bp, Arabidopsis thaliana landsberg
  unsure (1)..(1428): unsure at all n locations
gagtgcccgcgtgaacatcactcagaggtggaagatctcaaaagtcggattcagttgctgaccaatgagaatgacagtcttcaggttagtttttattggtgtcgttgactgtttaagtcaaagtgccctttcagcataaatcgaacttttttatcaagatttcctgaaactaaaagaaagatataattgtttttccttccttgttatcttcataatttacctttccttctngtattttttattgcacttgataagctggataccgagactggtttggagttttaatgatcatttaccttccaattatgtactgccaggtaaaatttaatgaacaagtactcctgagcaacaatctgatgcaagagatgtctgagctcaaacaagaaacgcttactgtgaaagaaattccgaataggttatctgagtcagttgctaattgcaaagatgtctacaaggatgtcatagtcactatgaaggtgaacagcttactttttcttgtgtaaatcataattttgaaatttttattaaaaggacatctcagctcactagtgtttctcttgcaatttgttagagcttaatcactgacaaggaatctccaacggcaaacctgctcctgggtacaactgaaatcacaacgagcctactggcaactctagaaacacaattctcaatgataatggatggtcagaaaacgggtagtagcatagatcatcctttatctgaccattgggaaacacttcgtgtgaatctgaagaacacaacgacgttgttgctgtcagacgcacaagcaaaagatgaatttttgaactcccacaacaaggtagcttccttgccactattgtcaagatatggatcaattttattaatctttttagtagttttgttaggatactttgtctctcttggtaggactttagtccagtgaaacctctgcatatgttgacctgcaaataaatctaataaatggcgttctttttacgggtttttttctcgtaatctacgatttcgtatcatacctataagtgtttcattttcctttgtctccggcataagaagtctcatcaatctaagtcaccgttttacagtacactgtcatttaagaagttaaaagtcaaaaccacatatgcaagattgagtacctcatttgggctaaacacattctttcgacattggaacttcacttgaatctctcccagagtcatgtttggttagttagatgttgtggtcagactactatttcacctttctctaagacaggttttgaatgtgattttaaagggacaagaaacagctgctttggaggagaagaaactgaagtctgagctcatcatcatcaaggaaagatacaacgagctcgagaaagagttgtgtttggataaacagcttctagaagcttcaagagaaagtcatgagaagctgataaaagag

SEQ ID NO: 175961 - DNA, 111 bp, Arabidopsis thaliana landsberg
atgcggatccaatctactcaacgagtcgatagtgtgcctgcctcgcaggtaccgaagggacagaccgaaccttacgagattaacgagctaacgccaagggctcaatggctg

SEQ ID NO: 175962 - DNA, 262 bp, Arabidopsis thaliana landsberg
gtactgtacgcttgagtgttctcagaatcacggtcttcaaccgtttttatggagacgaattgatggtatatacaagaatttgcggagtggtgactgtggcccggttgctatgaagttcctcgagatccaggcaagtgataaactcccagataaaatggctgaaattactaacaaacacgtcgacgcgtttaggcgtcaatatgccatggacatatataaactatgtgtctacccactctactcatctcatgtttctgactag

SEQ ID NO: 175963 - DNA, 352 bp, Arabidopsis thaliana landsberg
gtggcaatgagattgatggttttggttatgactatggtgctggtaagtggtattctttccgtttggaaagggtacatcgggttaataacttgggtaaatgctaaaatctggctttctactaatgataaataatctgaccaactaaaagcaactgcttgagcctaaccccacataaagctagtccacttcagccaaacaggatacttgctgagtacgttgatgtgtactcatccttgctctacacacaaaaccccccccatccccaggttgtcagcattgtaaccactgctcaggagaaggcgaagtcgtggaaggagacttccaagagttccaagactacgatgaattctag

SEQ ID NO: 175964 - DNA, 161 bp, Arabidopsis thaliana landsberg
agaacctaaaacattttttgataatggacaaagcgaataccaacgggtccaagaaggaggtttgtggtggttctggtgaagctaagccaactggaaagaaacggaagaacgaaagaacgttaacgaacaaaaacgtgaatgcaaaagatgcgaaaaactga

SEQ ID NO: 175965 - DNA, 131 bp, Arabidopsis thaliana landsberg
gaaaacgagattatgtttcacagcagcgtctacgtaactgtatattcttggttctgttgttaataatgactgctgtgcagataacacaattcaaaaaaaggttaaacgtggtcaattctgcgtgtgaggag

SEQ ID NO: 175966 - DNA, 375 bp, Arabidopsis thaliana landsberg
gagacaaggcatttgtcttcttacctcgttgaattgaagaaagcttctgcagaggagatgcgtaagagcgtctacgcaaactacgctgcctttatacggtgtgtgtgtgtgtgttatctttttaattatcgttatttgttgttagttagtttcttcatgcatgttacttgttgttgatgatgtgcatgcagaacatctaaggagatttcagctcttgaaggacaacttctttctatgagaaaccttctctctgctcaagcagctcttgttcacggtttagctgatggtgttcacattagttccttatgcgctgatgacgctgacgacttaagagacgaagtcttgtcgatgatggataccaaccagctgtcgtga

SEQ ID NO: 175967 - DNA, 194 bp, Arabidopsis thaliana landsberg
atgctagaaggaatagacaccgaaatttatcccgtggtatcggtgatttgccgatcacccctaatccacgttgaggtggacttcaagctctcacttgctcctctatcaagacacgacttgatctttgagccaagtggacaagaaatcactcaatacctcgattccactaatgtcacctttgccgctccggcgag

SEQ ID NO: 175968 - DNA, 394 bp, Arabidopsis thaliana landsberg
atgcccttcgatactccaccagtttatatctccaatgatcgacagttgcaatgttatctaggtttgacgaaattcgagcagctacgtctctgtgtggagtttacggcgaaagattcaagtgatattagtcggaaggacggatcaagaggaaggggttcgaaacgcgctattgcatctgactcaagagcagaatctagattcgaagttctgggttgggggtttgaaggtgtttgttacgattatcaagacgatgaagcaggggacgatgaagcaggggacgatgaagcaggggacgatgaatcaggtgtcgatgaagcatctaacaaagaagcaagtgacgaagaagaagatgatgaattttctagccggtttgattttttcgacgactccgatg

SEQ ID NO: 175969 - DNA, 874 bp, Arabidopsis thaliana landsberg
atgggaccgcgacagtgtttggtagtctggttggttctgtcaaacagcaatggcccaaactagttcttgggcttgctcttcttggagcagggtcagtttgaaaatttactcttctttgcttcgagttttgaagaatcatttttgtacagaaagttctctttttgttgatacgagcttcttattcgttccagactgacattatactccaatggagtaggggggaacaaccagttgcttcaacagccagatgttaccagcactagtacagaagatgtctcttcaagtacgaagccactgatccggcaagtgcagaaacttcccaagagaattaagaaactacttgagatgatccctcaccaggaggtatgaacaattgttcttttttttctttttcttttacgaagtgcaaattgtatggaatgtactttgcaggctgaaactttctgcaattaataggtcaatgaggaagaagcttccctctttgactttttgtggttactgctagcaagcgtcatatttgtgcctctatttcagaaaattcctggaggtaagtagtattttttttttcttcttttgttaattctatccattgcattactatttgtttcccctttccctcaaactcctacaatttctatgttctcatcagtcaaaaacattttcagttctggtctcgcaatcatgttgcatagagatttaaatgctatcttgatggcttcatctgctgcaatctataggcagccctgttcttgggtatttggcagctggaattctgattggtccgtatggtctttcgataatccgtaatgtgcacggaaccagggccatcgcagaatttggagtagttttcttgcttttcaacatcggccttgag

SEQ ID NO: 175970 - DNA, 114 bp, Arabidopsis thaliana landsberg
caaggccagcagccagaagggagccagtatactccacaccagatggacttcagagagcagtctgaagctcgtacagtcaatagcactgtgccagagtcaaagcacatctattga

SEQ ID NO: 175971 - DNA, 293 bp, Arabidopsis thaliana landsberg
tggcacatcgtcggataccaggtcaactacgaggacgccgacctcgtcgacgatcacaccggccatcctatcccggcagcgtacgcatgagcgggcaaagtccgtggcagggcaagttccccaccgggacgcgggtccagtggacgggtccgcggccggtgcccaacggtgaccctgcgaccggcaccgtcgtcgacggtgagatcgaccgcgagggtctcgtcgcggtgcgctgggacggcatcggaacctatcgtgacgacccgatcaacctgggcgtcatcgagtcctga

SEQ ID NO: 175972 - DNA, 118 bp, Arabidopsis thaliana landsberg
atgaaatcttcgggcggcaaagtttttgcaaacttcggaaagagcctcgtcagctgtgaaacgaatttcgagccaagcacatcaaccctgagcttctcgccatcaatgtcgtctgtcc

SEQ ID NO: 175973 - DNA, 177 bp, Arabidopsis thaliana landsberg
atgagacgacaaggtcggcaacatggtcttgtcagaacttaccggattcttccaccaccgcttaacacaagaccggtcaactctttgacttcacctcaaccttctgagttattaaccacattgccatcaaaaccaaacaaagctcaccggatagtgtggcctgctcaagtgcattgg

SEQ ID NO: 175974 - DNA, 423 bp, Arabidopsis thaliana landsberg
gaacaacaacagcaacaagaacaaaatcagatcgtggaacgtatagcacgtagagcttccctccatcgattctttgctaaacggaaagacaggtatttaaccttatcatactttttgaaacttgttttaatgttccaaatttccaatcactctagttagttcaaaactcaaaagtttaaggatcctccctctgatataagttctcctaaattatcctcaacaagcctcgtaatttacgttattaatttttctgttgcagagctgtggctagggctccgtaccaagttaaccaaaacgcaggtcatcatcgttatcctcccaagccagagattgtaaccggtcaaccactagaggcaggacagtcgtcacaaagaccgccggataacgccattggtcaaaccatggcccatatcaaatcagacg

SEQ ID NO: 175975 - DNA, 436 bp, Arabidopsis thaliana landsberg
atggtccatcacggcctccacctgcggctgcgccacaacggccgcatcgcgctcgatgtcccgccggatcgcgacggctttgcccgcgcccaggccctcctcggccatcgcatcgccgcgcgcatgatcgagacgcacggcgaggagaacggcgtacgtgtcactgcgtatctcggcgcgcccgagctcgggcaaacgaccgcgcgcggcgtgcagttgttcgtcggcaagcgcccggtgcgcgatcgcggcctcttgcatgccgtcgcgatgggctacggcgaattaatcccgcgtgggcgctatccactcgcggtcgtgatcgtcgatgcgcccgcatcggccgtcgacgtcaacgtccatccgcaaaaacaggaagtacgtttctccgacgcgaacagcgtgtgcgcggccgttcgccacatcgtacaagccg

SEQ ID NO: 175976 - DNA, 1392 bp, Arabidopsis thaliana landsberg
atgaatggaacagatcctgagaacccggaaattaccattatacggaaaccagatgatgacgagccatttgctgggctagcattcaagatcatgagtgatccttttgtgggttctcttacatttgtgagggtttactcagggaaaatctcagctggttcttacgtgttgaatgctaacaaaggaaagaaggagagaatcggaagactcttggaaatgcacgcaaacagcagagaagatgttaaagtggctttgacaggtgacattatcgctcttgcgggtctcaaagatacaatcactggtgaaaccttgagtgatccagaaaaccccgttgttcttgaacgaatggacttccctgatcccgtcatcaaggtagcgattgagccaaaaacaaaagcagacatcgacaaaatggcgacagggttgatcaagctcgctcaagaagacccgtctttccatttttctcgtgatgaagagatgaaccaaaccgtcattgaaggaatgggagaacttcatctcgagattatcgttgacagacttaaaagagagttcaaggtaaaacataacctataaatctaattctctacttcaagcttccaagcttctaattccttttcatctttcaggtggaggctaacgttggtgcaccgcaagtcaactaccgtgagagtatctccaaaatagctgaagtgaaatacacacacaagaagcaatcaggtggacaaggtcagtttgctgatattacagtccggtttgagccattggaagcagggtcaggatacgaattcaagagtgagatcaaaggaggagctgtgccaagagagtatattcctggtgtcatgaaaggacttgaggagtgtatgagcaccggtgtgcttgctggtttcccggttgttgatgtccgtgcttgtctagttgacggatcttaccatgacgtagactcaagcgtgctagctttccagcttgctgcaagaggagctttccgtgaagggatgaggaaagcgggtccgagaatgcttgaacctatcatgagagttgaagttgttacaccagaagaacatcttggtgatgtcattggtgatcttaactcacgaagaggtcaaattaacagcttcggagacaaacccggtggtctcaaggtatgttttattcaaaatgatcgaaaaaacccctaaaatgttaaatgatgaaatctgattttgacattgttgttcttattattgttaggtggtcgactctctggttccattggcagagatgtttcagtacgtgagtacattgagagggatgacaaaaggtcgagcttcttacacaatgcaactggctaagttcgacgttgttcctcaacatattcagaaccaactttcatccaaggatcaagaagttgctgcttaa

SEQ ID NO: 175977 - DNA, 124 bp, Arabidopsis thaliana landsberg
tactatggaagccaatgacatgaacgaggatggattttcatcggagttgaattcgattgtttcaaacgctagttatggcgtttgcgtttatatttatttattggtatactccatagaaacatag

SEQ ID NO: 175978 - DNA, 37 bp, Arabidopsis thaliana landsberg
atgaagcacaccgtgtggggacgttttgacacatcag

SEQ ID NO: 175979 - DNA, 1303 bp, Arabidopsis thaliana landsberg
atggtggtggaagagaaccagaatcagatgatggcttccatcgccggcgactcaacggtgacggcaaatatatcggaagaagacgaagcagaggaggaaaccaccaccaacacatggaaaaccacaaaggaattactgattctacatctctccaagaagcttctccatggagatctcgatttccgaattgaagccgctaaggaaatccgaaagctgcttagaaagtctccggttaagtcttccgctaggtcaaaactcgccgacgccggcgttatcccgccgcttgttcccatgctcatctcctctaacgttgatgctcgtcacgcctctctcctcgctctccttaacctcgccgttagaaatgaacggtaatctctcttggattgttctaggttttattgccatgtaccagaaactgattctctcgtcttctcttctaggtctaatttagctcgatctgaggctttaggcagtgtttaggattagtgacttcactaatctctgctcagagcttgatttatgacattgttctggatttgtagttttagtgttaaggcaattgtttaactctatcaatcaggcatcagaatgtactgagagtagctacattttggactttagatctgttgaaaccaagaggatactgctttttggacactgatctgattgctctaggtctagctttacctgtagtttactgctatttgaatgacgatagcaaatgtaggatgtaatttacctacttgctccagcagtattttctacttattttgggttgtgatttctgaccaggaataagattgagattgtgaaagccggtgccgttccacctctcatacagattctgaagctccacaatgctggtttgcgtgaattggccactgcagcaattctaacactttcagctgcaccagccaacaaggcgatgattataagttctggagttccaccgcttctgattcagatgcttagctccggaactgtacaagggaaagtagatgctgtcacagcccttcataatttatcagcttgcaaagagtactctgcttcaattcttgatgctaaagctgtctacccgctcatccacctccttaaagaatgcaaaaaacattccaagtttgctgaaaaagccacagccttggttgagatgatcctgtctcactctgaggacgggcgaaatgccatcaccagctgtgaagatggtattctgactttagtagagactgtagaggatggttctccactcagcatagaacacgcagttggagctctgctttctctatgccgcagcgaccgagattag

SEQ ID NO: 175980 - DNA, 297 bp, Arabidopsis thaliana landsberg
tcttattccctggaaattgaactgaaaactttcgaccaagccatagtttctgacaaatggaaaggggctttaaatgaggagttacaggctatggaacagaacaagacatggagtgttacatctttacctcctggaaaaaatgtggttggttgtaaatgggtcttcacgatcaaatacaactcagatgggactgtagagcgttacaaagctcggctcgttgcaaaagggtttactcaacaggaaggggttgattttaatgagactttttcgcctgttgctaaactcacaagtgtctag

SEQ ID NO: 175981 - DNA, 649 bp, Arabidopsis thaliana landsberg
  unsure (1)..(649): unsure at all n locations
atggttcgcaatcatgacacanagnnnnnnnnnnnnnnnnnnggacctgaaggaatcgctcagaaagtatctgtatctctcgctgaaggtgtacgttcgagtgaactacacatcagagaaaaaatctatggagaaaaccgttatactgagaaaccagccagatcatttttaacgtttgtttgggaagcgcttcaagacattacccttatcatccttatggtctgcgctgtagtatcaataggagtgggagttgcaacagaaggttttccaaagggcatgtatgatgggacggggatcttgcttagtataatcttggtggtcatggttactgctatcagtgactacaagcaatctttgcagttcagagatttggatcgagagaaaaagaagattattattcaagtcaccagggatggcagcagacaagaggtctccatccatgacttggttgttggagatgtggtccatttatctattggggatcaagttccagctgatgggatttttatatccggatacaatctggagatagacgagtcaagcttatcgggcgagagtgaaccatcacatgtgaataaagagaagccgtttctgctttcagaaaccaaagtccaaaacggctctgcaaaaatgctggtgacaaccgttg

SEQ ID NO: 175982 - DNA, 68 bp, Arabidopsis thaliana landsberg
atgggccgcaaattccgccatgtgataaagtttacgattacattctttttcgtggaagtgacattaag

SEQ ID NO: 175983 - DNA, 426 bp, Arabidopsis thaliana landsberg
gcagggaagccgctgttgtttgagcggccgctgctgcttacgccgcagctgctcaccaagctggcgccgggcgtagagcgccccggcatccatataggcgtgtggtttgaaggtgaagagctgtatgtgtggggcaccactatcaagctgcccaacctgtgctttgtgctcgacgtttccgagccggggctgctggtggtgaaacaccgccgcgccgcggggctgggcaagttcaccaacgtagccatgctgcggggcgaccaggtgaaggtggtgaatgaagacagcggccttttgcccgatagtccgcctatactccggtcgctgctggggcttaccccttcctgcttatggaacaacaacgtaaatgtgctgatccagatagccgtgtccatgcgggcgcacaagcggggcggcattttgctg

SEQ ID NO: 175984 - DNA, 426 bp, Arabidopsis thaliana landsberg
atgcatgccctgccccgcgatctggccaagtataagggacgatttgatttgggctacgatgctgtgcgagaggagcgcgttaagcgattgaaaaatctggggttgatgaacgcgcgatggaatgtcgctccgacagtgggtgactggagcacggaaaagaataaagaatgggaagcccgttgcatggaagtctttgctgcgatgctggacaatatggatcaaggcattgggcgcatcgtcgctgaactgaagcgcagcggtaacttcgacaatacggtgattttctttctacaagacaacggtggttgcgccgaagataacggtcgcaaaacgcccaaagatgcttctgcgaagaagttcgaaccgatgaaggcggatgaattgcaaacgcaggccaaacctcgccagactcgcgatggccgcccg

SEQ ID NO: 175985 - DNA, 274 bp, Arabidopsis thaliana landsberg
atgcaaagcttttatcaacattactataagaagtatattcaagctttgcacaatgctgctgataagtgtgaccggtatgtctaacttacttaaattgtctttttaagatgctaatttgtgttttgccagtgtttgagagcactaaattctcttaatgatactttgaagtgctgttaattttcagtgcccagctgacaaaggcataccaatctgccaatgttttgtttgaggtgttgaaggctgttaatctgacacagtccattgaggttgaccg

SEQ ID NO: 175986 - DNA, 204 bp, Arabidopsis thaliana landsberg
ttttttctctctttggctgtgatttcgtcggcgaagagagacatagatcggatatggcggctgataatacgggttcgaaatcgagctccgctgcggattcttacgttgggagcttgattagtttgacatctaagagtgagatcagatacgaagggatcctttacaatattaatacagatgaatccagtatcggacttcaaaacg

SEQ ID NO: 175987 - DNA, 610 bp, Arabidopsis thaliana landsberg
atgcagacacctcctcatgggttcatggttaagagaaaaagcagcagaatcaagatcacgcctggatctggtgaagcccttttgagaggacaagtcaaaacccttttacacaaggttgaagaaggatcagagcttatccattcaataaagactcgtccttttatccatctggtcacttctccaatgagacttctcgctccaactccagcaaatactccccaatttccaaacttttcagatgatgatgtcaagattaagatcgcatctccgattgttgctggaaacttgagaacctctcagatatctgaagagaaagaagacaagagtatgagcataactcgttctttactgtttgacttcaccgacaagtcagctttatgaggaagaagaagaagaagaagaagaagaagaagaggaggttgatgggttgtgtgaaggaatgaagaagatgaatgtagagacgaatcaagctgaatttgcagggaaacataacagatttctttacaacagtgaagacgatgagatcgtagaggctaaagaagtgttgcatttgaaagggattccaactccgagaggaaagcattttaggtttgctactcaagaagaataa

SEQ ID NO: 175988 - DNA, 335 bp, Arabidopsis thaliana landsberg
atgagtctctttgaaaataattctggtaagacgcatttgcgaatattaactcctttttttttcccgtgttctcacccgcatgcgcagatggccttgacgaagagattcgcaaggcgcaggccgagcgtgccaaagcgcaaggcacggcggtcggcctgggctccacgggcggctttgattcgtcgctttatggtggtggttccaaggaggactacgtgacctccatcgcggtcaatgcggacgaggaggagctggaggcggactatgcggcgcggagaaagctccccagttatacagcaccgtcgcaccttgtgtccgacgtgcctcgcgacgag

SEQ ID NO: 175989 - DNA, 1015 bp, Arabidopsis thaliana landsberg
gactgataacgccataaagaaccattggaatagttcactgaagaaaaaattagagttctacttagcaactggtaacttgccaccgccagcaagcaaattcatcgttctgaaagatattgctgatggagacagagattccaagcagtctagtgcaactaaacctttcaaggattctgattcggttacccaaacctcttcaggaaatacagattcaaatgaagttggaagagaccattttgactcttcttccgctctgcttgaagaagtagctgcttcacgaagaatcggtgtcaatgagtatgcttgctctcctgttgagtacaagcctcagttgccaaatctggaaccaatttcagaggaagtcagaatccactcaaaagcttattttgagagatcaatgcagaggaaagaagaaaacgggtttggaactccaaagcatgggaatttatactataagtctccacttgactattactttccatcagaagcggatctgcaacatatgtacggatatgaatgtgcttgcagtcccggtgctgcatcaccagtcagcttaatgactacaccctgtaataaagacagtggtttaaccgcaacgagaagtcctgaatctttcttgagagaagctgctaggacttttccaaacacaccttctatttttaggaaaaggcgaaaggttgttttggcagcgaaaacagatgctgttgttgttgttaatggtgtagttaaggaagttgatcgaaaagaagaaagtaaagatatgagagaaagtttgttgctggagacaactgataattgcagtgatgatgaagaactcgggttaaatggaaatgctttcaatttatctccaccatatcggttaagagctaaaagaacagctgtaatcaaatcaagacagcttgagtttacatctgaaaaggagaagcagccagataatgagattgagtttacatctgcaaaagagaagcagcctgataatgaaaccaaaacgtctgaggaagacaagcctgtgtag

SEQ ID NO: 175990 - DNA, 230 bp, Arabidopsis thaliana landsberg
aagcttcaacggcgtcggtcggggaagaagataaagcttcaggacaggagcaagaggagaaagaagaagagaggaggaagaagacagcagctacaaaggaaacggtgagaacaagtacaggcatggagacaaagattcctttctgcatcgccggagaagaagaagaggaggaaaacgccattggtgaagacagaaagaggagagatctcagtgtgtctctggtcgcttaa

SEQ ID NO: 175991 - DNA, 151 bp, Arabidopsis thaliana landsberg
atgggcagccgctccgtcgccgttttcacccttgaatgctggctggctggctggctggctgggggagttcgccgctacatacgtaacgtacctaggccgtctggtcgatgtcgcgccatgtatcgtcaggtgctagatgttgctgttgcag

SEQ ID NO: 175992 - DNA, 104 bp, Arabidopsis thaliana landsberg
gtgagcctgatccagagttaaagatttcctgccggcaaatatcaccttttataccaaacaattatcgagatagtagtcttccagcagctgtttttgtatatact

SEQ ID NO: 175993 - DNA, 339 bp, Arabidopsis thaliana landsberg
aggaatctaaagggatcggagctaatcgacgagttatctcggagaatcgagcggtttccgttagcaaagtgtttggttctagaagatatcgacgctctcgtcgccggagacttcccggagattgaatcggcgtttgaagaagacggcgaaggaatcgtcacggagatcgagagaggaatctttgaaacactcgtgactgaaacgacgacggattatttagccacgtggtgggtcaaaacggcgccgctgaaacgtaacgatgatgtcagtggcacgtggggtgttcacgtgacgagatactctacaaatgtgggtcccaccacgactcgtcctcattga

SEQ ID NO: 175994 - DNA, 43 bp, Arabidopsis thaliana landsberg
atgcaagtctcccgagtgcttcctgctgtatcgggttgcaaag

SEQ ID NO: 175995 - DNA, 394 bp, Arabidopsis thaliana landsberg
cccgattttcgcgccaaataatggtccggtacaatttgtccatcacaacaaggtcaatgcaaccacagcagaggagaatcggagacaggacgaggcggcatctacaacatcctcctctatgttgccgcaagaaaacacctccgccgctaatgatgtgggaggatttttagatagggaaacagagatagttgagattcaagaccagccacggccaatccttcaagagcttttgccgcagcagcagcagcaaccattaataatctgctatttaccagtctggcagatgcgaccacatatggttacttatccagtggctgcttatgcattgactccaggaacagaacattctcctaggttagatcctgtaccggaaaatcaagaaaacgcgacctga

SEQ ID NO: 175996 - DNA, 201 bp, Arabidopsis thaliana landsberg
actgatcagttttgcgctgtaatcaaagcaatcaaccaatcattcgttcattacaaaacatacatgataactgattgctacaatcacatgaccgagcagttggataagtcagttcgtcataagattgctgaatcttctgacatgattttcgagggttatatcgagagaatatttgcgagaacaagagcatcaaaattctaa

SEQ ID NO: 175997 - DNA, 226 bp, Arabidopsis thaliana landsberg
aaccaaggaagaagaaagaaagagagagagaggttcttaccaacgattcagaagccgattcaacgaggaacactttgaagaaacgaggatacaattcgctatcgtcagccatggaatgatgttggaaacgagagagagagagagaatcgaaatgggtttcttagctagtgagaggaagataacgttgaaggttcagagtttaaaggagaaagagagagagaaatga

SEQ ID NO: 175998 - DNA, 237 bp, Arabidopsis thaliana landsberg
atgaagttgccaaatcgggtgattgtgaaagagtatatggagttcttggaggagggtatggatccttgggctatggatgaaagaggcagaacgccatacatgcttgcaaatgagaaggaagtgagaaacactttcagacggtttatggcgttaaaccttgaaaaatggaattggcatgatgctaaagtacccagcccgctcacaaaagagatggaggaatctcaagctgccaagcag

SEQ ID NO: 175999 - DNA, 830 bp, Arabidopsis thaliana landsberg
ggattctttcctgtgagagacagatcaaaattaatcacagaatgcgagaatcaagtcaaacagttggagctccctcaggcattgacgccttttggccaagatattgttagtatccaataccccattgatgttggtatttcacccgtctttcgttcaatgtggatgctatatttccttgaacatgtcatgtgcaggttatttgtggagatattagtagagctgaagtgtcgatcaaatcagtagaggtagctttggagaagtacaaaaatggttcagttataggagtggccgccacgccacaggatgttgattttcttgagaaaataaggaacaatatggtgatgctgtatcaaaaatggcgtgcaatatttgtttggcaagatgggccccttgtggaagctatgagagctggaaatatcgttcttgtggatgagatatctttggctgatgacagtgtattagaaagaatgaatagtgtgttggagacagacaggaaattggtgagtaaagctaccctgccttcatgttcatcatttagccattccttatcattttcatcatttctccatgttggtttccattttcttcgtagagtttttatttctgtttaattgtcctctcgtatgttattgtttccactttatctttgtagtccttagctgagaaaggtggtcccgtcttggaggaagttgtagctcatgaagacttttttgttctagccaccatgaacccgggtggtgattatggaaagaaggaattgtcacctgcgcttcgtaatcgttttactgagatatgggtccctcctattacagatactgaggagctcagaa

SEQ ID NO: 176000 - DNA, 31 bp, Arabidopsis thaliana landsberg
atggggaatggtagaattgttgacctgaccg

SEQ ID NO: 176001 - DNA, 571 bp, Arabidopsis thaliana landsberg
cggcggcgactgggacgccacgcttcgcaacgcggacggcctgattgctccggacaaggtggccgaggcggtatttggcgccgttcaccaggcgctcgatgcggtgcggctggattcgttgcgccgcatcggcctcgagaacgtcgacatagtcttgcccgatgccggagacgtcaggctgctgcggatagcccgcgccactatcaccgaaaccggaccgggcgagatcgagcttgcggcgaatgtcgacatcgacggcagggctgcgaccgtgacaggcctggcaaggcgcgaggccggttctcgaagcattgctgcgctggaggccaatgtggagatggcgggcggggagggcgaaacgaattcccccctcgcggcgtcgctcggcaagctcgccctgcgtgtcagcggcgcggaaggcagcggcgactccgcctcgcatctgaccgcctcgatatcgataggcggtgcggtgttcgatcttggttcgcacgggcttttgccggccgacatcgacctggatgcgacgctcgccctcggtaccaacaagctcgcagtcgaccggctgcac

SEQ ID NO: 176002 - DNA, 1504 bp, Arabidopsis thaliana landsberg
agcaacaaatttacctttagtgggttccaacttctctgaaacagaggaccaagtgtgtccttcaagtcttctgcttgatgaagttacagttggagacttggtaagcagagtaagacaagaccagctttgaacaaatgggatgtcggtaagactttcttcaatcttctcttgtttttttccttttgcaccttcaaaaaaattcttgatcgtatctttcgaatcatcaaattctcaaaccaacgaaatctcacctttctccctatttatgtgatctcagagtcaagaagaagatataggcacaagtgatacactaattggatcgttgttgaggtccatttctgaggtaatcacatccttggagtccttacaagcagaaacagagaggttcctcgaatgcgcttgctacttttatcgagtttcagttgtgttaatggagatacagacagcagagagcaacgtcatatgttcaattgatatttttgaatcactatccgatagtgtagatgttgccaagaaactggttgagaaatctcaagaaagcaacgaagccgaatcaactactgatctgagaagcattgaggcaggttttgaaggcgttgtaaagcagatgggtgaaactttgcagtccatacctgaatcaacattcgacgaggaagaatatataggagttgttattcagtctctttcaaatgagatgcagaatgctaccattggagatggtagtaaaagtgagatgatacacaatgggcagcagaagatttctgcaaagcatacaccggatattgtgtctgagcaaatggaggaagacctctatcccactgatcctgaattttcctatgaaagttacatgatgtatagtgaatcacaatcacaaatgactgatataccagatatcccaagcaagagcacagatgttagccgccagagaaagcatggaaatcatagtgaatcacaatcactagtaaccgaaataccagatatcccaagccagagcacaaatgttagcagccagagaaagcatggaaatctcagtaaatcacaatcacaaagtaccgaaataccagatatcccaagccagagctcgaatgctagcagccagagaaagtatggaaatcttagtgaatcattgtcaatgttaccacaggtgacacagttcatggaacctccataccaagctttcatctgcccgttgaccaaagagataatggaagatccagtcaccacagaaacaggagtaacctgcgaaagacaagcagtaatagagtggtttgacagttttggaaactccgatgagatcaactgtccagttacgggtcaaaagttgaccactgaattaagtgcaaatgttgtcttgaaaaccatcattcaggaatggaaagtacgtaacgaggcagcaagaatcaaagtggctcatgcagctttatccttaggcggttcagaaagtatggtcattgacgcgttgagagatctgcaaatgacctgtgaagggatagagtacaacatg

SEQ ID NO: 176003 - DNA, 264 bp, Arabidopsis thaliana landsberg
atggtccatttacttcgagtagcttgcacttcccgaggacctttggctgatgcattacctcagataactgatgaactgcatgagcttggtgtaagtcttttggataattgtattttttttatccatcgagggaagtttcttcattttttcccccaaaactatgttaaaccatttcagatattgtctgaagaagtgttggatctagcttccaaatcatcttcagactttaatagaacctttgaacatgcattcaatcaaaacatg

SEQ ID NO: 176004 - DNA, 341 bp, Arabidopsis thaliana landsberg
atgggttcttgtttggagcaaatcgcgcctcataacgacgaagagagcagtaagtattatagaactttactttcctgtgtagaatttctatgatgtattgtaacattgttttcttctgtaggtagaatcttgtttatgttgggtaaagtacagagtgagcttcaaagacttcttgacacatatgtaagttgtttgttacaaacatgaattccgcaaaagctctatttattactctatgaaagcttactctgatcatggttttcgttcttcagcgtagtcatatattcgaaactattacatccccgtccgaggcgcttctcaaggacctcagatatgttgag

SEQ ID NO: 176005 - DNA, 111 bp, Arabidopsis thaliana landsberg
atgatatctgcagagggtgctggtggcaaaggaacttggggaaagcttcttgacactgatgatggtgactcctgtattgataagaatgatcccacatacgatagtggagag

SEQ ID NO: 176006 - DNA, 156 bp, Arabidopsis thaliana landsberg
gtcagtgagaatgaaccgtccaagaagatcaagcagctactgcaggcgcatgccaagaaggccagcgccaagctggcgccgcgcaagcccaagtacatttgcaaggccgaccgtttgaagatggaggccgaggcggcgggggatacccccacctga

SEQ ID NO: 176007 - DNA, 1375 bp, Arabidopsis thaliana landsberg
aaccatctatgatgttactttacatccaacatcaggacttgttgtcacagtgggacaggtattgttacctttcggtgaacattaatatattaccaccttatctcgagcacattgagtcaattaatcgtacacctaccatcagattaaacaagaagtctgatgctttatctcatgatcccaggataagaagataaacatatttgacatagaaagtggaaagcttgtcagatcattcaagcaagaccgagaccatggagatcccgtaaaggtgcattgaacaaactgtttggttagacttcaacattgtttgatgttctagtgctgacaatatgatctcttccacaggtcattttggacccaagctgcaactacttggtatgctcctactctaacaggacaatttgctttgtggactttgtcaccggagagctggttgctcaggccacaggacatggtgaagctgtgactggtgttattttcctacctgattgcaaacatatcatatcagtaagtttctgaattgtagttttctgttacttacaactgtaagaaccatgacttttggatgatttcaagatcaatgtctcattcttattgaattgaatcaccgtaaaagagctttctctgctcaaaagcctggatctatctttcttgtatgcctcaaatgaaaacgaaaaagtgagataaaactttgcttttaacttttctttggtgtttattgtcaggttgcaagtgacggctgtatttttgtctggaaacttcctttgcgaatggctactcgtattatacgggcagtaaatgaaaatggcaggttaactgtggcccaactggaaaagttcaagcaaattgcggttgatttggaggaagacaatccaaatgatgcatcatgttctgcaaactataagccagtagaggagaacgcagatcagatgcagcaacgctccccatggacatcctcatttaagttcagcgtttctcggcttcctaaatgggctcaagctaaagtggaaacatctgatattgctaccaattgtcaagattccatttcaaaccaggtacaaccccaaaaaagttgcctgctttctgattttaggaatcaggatagagtgtatctttatgaaatgctttgtgagacccaaaatttcagctaaggcttttagttcttctgatattgggcatctttattgcctccacaacagaaacatgaagataaaagtatggcaaatactattgacaatgctgaagaatgctcttctgtgaatcttgaataccaaactcccaagcaaggttcaagaaccgaaaatgcatgccttggaagcctgtccaaaagctccaacgatactgaaacttcagggcttcaaggagatgatcctag

SEQ ID NO: 176008 - DNA, 120 bp, Arabidopsis thaliana landsberg
gaaaaaggtaaagataaaaaagttctctcaaactttgaatcctcgtatacccttattaatggaccattgcctacggtttatgattcgatttcggatagtcgtaaaatagaagcaatctaa

SEQ ID NO: 176009 - DNA, 218 bp, Arabidopsis thaliana landsberg
atgtccgaaccaagtccagtcgctgatccttatgcttatcttaacatcgtaaagaatccagatggttcaatcactcgcgacctcaccaacttcccctgcaccgcagctacacctgatccttccccactaaaccccgccgtttcaaaagatcttcccgttaaccaaattaaagtcaacgtggctccgtctctaccttccctcctccgccgtcaacgagg

SEQ ID NO: 176010 - DNA, 184 bp, Arabidopsis thaliana landsberg
ggaatgtattcgtgaagtaccgacaagtacggagaatattgcgaaagcgttcgtgtgcattagtgagactatgagagcattcgtgaaaagcacagaatcttgtagaagtacctttttcgcgtacgaacttgtaccttttgttctaaatcacgaaggaccctacttgtgtcatcttttgttgtaa

SEQ ID NO: 176011 - DNA, 623 bp, Arabidopsis thaliana landsberg
gtggcagtttgcaatttccctacagttaaggatgctgcagacgtggccattgccactatgatgtctggaatacaggttagacctctgcttttgaattatatgatttaaattttttatttgaatcttctcaaccgcaccttaacccccatcaggtgtcaagagtggaactccttgacgaggttcaaatcagagctattaatatggcaaacgggaaaaatttgactgaagctccaactctgatgttcgagtttataggaacaggtgatgctgcatcatatttcttgtactttccaagtgatatttcaagctatctaagattatacatctcttgtagcagtttactctttgtaagcaatatctgtagatattacagaaatcatattcactcccctgtatcctctattttattcggttacaggattctcatgctcagtgttgccactagacacagaaagtgagaattgttgccttctaataccctaaatcatttttttccttttctctatctcttagaggcatatacacgtgagcagacgcaaattgttcagcaaattgcttccaaacacaatggatcagactttatgttcgcagaagaacctgaagcaaaaaaagaactctggaag

SEQ ID NO: 176012 - DNA, 139 bp, Arabidopsis thaliana landsberg
gatttgccggtgcgtcacaacattgatgtcatgcatgttgagaagaatgtgtctgacgctatgttgtccactgtgatgcaaaatgctaaatccaaagatggcttgaaggccagaaaaaacttagaagatatgggaatac

SEQ ID NO: 176013 - DNA, 469 bp, Arabidopsis thaliana landsberg
gcaggaaatccgagcttcaacaagttccatgacttcagttcccaaaccactaaagtttctgcgtccccattatggaactcttaaagcgtttcatgaaacaatggctgattctgatctcaaagtatgtcatcattgatttcaagtcattaacaattcttatattggtatggcttaaaaattacatttgctatgtttgcagaagtacctgtccgatatcctgtctgtcctggcccttaccatgtctgcagatggtgaaagggtatgcttctactgacttgggcatactttgtattctgatttgtattttttgaggcatactttgaactgctaatcactttcttttacaatattattccaggaaagcttaaggtttagattgattggaacagagggtgacattggatcgtggggtcatgaatatgtcaggaatttagctggagagattgcacaagagtatacaaagcgtcag

SEQ ID NO: 176014 - DNA, 177 bp, Arabidopsis thaliana landsberg
acaaagctatacactgaggattggattggtctgaaaaccttggatgatgctggaaaagtgaggtttattagtgtccctggcggacacatcgaaataacggaagaagaccttgtcaaatacgttgtgccttacctccagaatgagtctttgttctcttctgaacacgagacaatatag

SEQ ID NO: 176015 - DNA, 58 bp, Arabidopsis thaliana landsberg
atgggggcgttcgcgctgacggcgactcgacgtcggtcggcgtgggtggcggcgacag

SEQ ID NO: 176016 - DNA, 494 bp, Arabidopsis thaliana landsberg
atggagtatatgaacataaccgttgttacttcaaacgaaccttatggattattcgacagttcaaatccattcttttataaaagaagaactccaaagtttaacctaacccttggaggagttcacagtggccatgttcagaggggtttgcgcgacccaatctgcatatcgactagcggaaaaggaaactgcagggtaacacatgtttttccctaatcttgtttcagttttagagtacacaatgcaattacattctcttttatttattctcatattaggatggttacacaaaagagacctccggacctgattcagttcgtgtacttgtcgcaacacgagctaaaccgagcaagaacttgaatagtgaactggatagagagttttatgatcattttttggaagtaagttttaatgttctcatgaggacaatatgtctgccctagaaaaatatgacagatcaaatgtttcttttatgttaatagcatctccatcagtga

SEQ ID NO: 176017 - DNA, 123 bp, Arabidopsis thaliana landsberg
cctttcgacaaacaatctctactggattctgggatattatgttgtttaatacacactttcaatgcgtttctgacatacagtgtagccagtgaaggtgaaaaaactgttaattatgaagaaaag

SEQ ID NO: 176018 - DNA, 750 bp, Arabidopsis thaliana landsberg
atggcattttcagtcgaaggtatagatcttagagatcacagagtagtggaaaatttcaactttccatgtgtacctagatcatgatcagtctttaagaggatatcctactgtgcctctctcgtgtgactctaactttctcctttcaggattaggtaaaataaacacggaaactccagttaattccccacaaccatcagacaggtgattagcattcacgagtatttttttttcttgggacttgtttgcattttgtttgttttcctttttatttatttatactgttttctcttacattagcagtaatatgtaccacttaagatatagatcagtgatttatttaacttgtgatgtgaaagaacttttgtgtaccggtgctcctctccatggaaggatactggtcaaccagatacatcacatgtcagggaaaggctcaacgactttgagaacgaagtggtaacaaagtctcgtcatcttatcttttagctgtcttccattcatttctaactcttttttcctgaccggatattttcatctccctcttacaggacacaatgattcaaagtagcaaaatgttccaagatgacagcctttataggtctccaattggcatacatgctaaagatgggggcagaaagcaaaaactgcaaactttcagtgatcacttgcacaaacaatatagcgactctagaaattacttctgtgacgttgcagatttcaacaacagcaggttctctgacgatgaatggaatg

SEQ ID NO: 176019 - DNA, 814 bp, Arabidopsis thaliana landsberg
atggcaaatgataaactagcagagatggccatgtctgaccctaaacgtgtcaaaaggtacaaatattgaatcttgactaacattaccggtttataatcatatattctgatgtttaaggaatgatcctcttttcagaatcttagcgaaccgtcaatccgcagcacggtcaaaggagaggaagatgcggtacatagtagaattggaacacaaagtgcatactcttcagaccgaggctaccacattgtctgctcagctcacacttttgcaggtgcgttgtttacaatgttataaaagcgcctagattggtcaatttttgttttgttctaacgatcttagttactgcattatccagcgcgatatgatggggttgacaaatcagaacaatgagcttaagttccggcttcaagcaatggagcaacaagcgcgtcttcgcgatggtatacatttctcttcacattgtatcaaatttacgatattattaacatgactttaacaaaaaatggaaccagatcctatatgctttaaaaaaatctccatttttgcgcttaacgaatgtgaaatgacgatttttttcccccgctttgcagctctgaacgaagcactgaatggagaagtccagcgactgaaactggcaatcggtgagagcagtcagaacgaatcagagagatcaaagatgcaatcactcaacgctgagatgttccagcaactcaacatcagccagttaagacagcagccacaacagatgcagcaacagtctcatcagcagaaccaccagaatggaaccatggcaacaaaatctgaatcaaatgaatag

SEQ ID NO: 176020 - DNA, 74 bp, Arabidopsis thaliana landsberg
atggatttggatggacctcttgatttcgagaacgaagatcctctcgttaaccctccaacgataattgaaaaaag

SEQ ID NO: 176021 - DNA, 2752 bp, Arabidopsis thaliana landsberg
atggagacgaagatggaaattgaattcactaagaagccctacatcgaagatgttggtcctcttaaaatgtatgttctttcagttttttctgctcaagttaaaccattggttctattgatataatttttctcaagtacgctccttttagcagctggatcatactcattgtgcataaaatttgtttctttttgctaatgtataatttatttgttccaagctctgaaatttggatttgggtgtctgaactcttttgtcaactagatgacatattctctgctaaatgctttcaagagtcttagtttatgtctgtctgtagattttcttgatacaatggatattgtgtgccttagggcgttgttcatgaatctctgatttgattttatagtttttgagattttgatattgtggagcaaaacttgtttgtcagtttttgttgtttttcctggtgggatttttgacactactattatctctgcagaaaaagcataaacttctctgtgctttctgatcttgaggtcatgaaagccgctgaagttcaagtctggaacatcggtttatacgaccacagttttaaaccctatgaaaacggcttgttggatcctcgaatggtatccgattttcttatatacacctactatcttttggtttaacttctcttatgccaataaccatggcaagtattgtatgtcatgtttttgcctcctgcagttatttgcatcagtatatgtgattctaaacattctatactccaagatatttttttcattgtaagaagataagtactaaatggtttgttcattatgattttgcagggtcctccaaacaaaaagtctatatgcacaacctgtgaaggaaacttccaaaattgtccgggacactatggatatctgaagcttgacctcccagtttacaacgttggatactttaattttatccttgatattttgaagtgcatttgtaaggtaacagagttagcagattatgtctctctagtttctgttctatgttctgtttgttgacccttttacatttgttgaatggagaaagtggagaaaaatacagcataaaaaatatttcttgggaagatgcctttcaaaaaaaaaaactggctggttatattgatgtctttgtagcatcaatagtacttcacaaatattgtttttttcttcccacagcgctgttccaacatgcttttagatgagaaattgtatgaagatcacttgaggaagatgcggaatcccagaatggagccattgaagaagacagaattggcaaaagtcgttgtcaagaagtgcagtacgatggcgagccagagaattataacgtgcaaaaaatgtggctacctgaatggtataattttgaactgttttttggcttaaactatttagattcgatgatgcttttttgaagttaataatttataaccttgattttttttctcattcctcatgcgtttcatcttaggtgcaaaatttagctcgtagaacattctaataagtttcttaagtagcacaagcagaaaattggggtttttgcgaattctaatatctaatgccaaaatcctttaacctctgttgttattggttaatctgaacttatgttatattcttcttcccacccaattcgttttgatatcgtggtaatggttaatctattgataatttcagggatggtaaaaaagattgcagcgcagtttggtataggcatcagtcatgaccgatctaaaatccatggtggagagattgatgaatgtaaatctgcaatatcccacacaaagcagtctactgcagcaataaatcctcttacctatgttcttgatcctaacttggtgctcgggctttttaaaagaatgagtgacaaggtatatttgagtttttatctataatgcacatctttttctacatagcttcctgcgttatgttctcttgctctcagaacatgtgcattggtataaaaggattttcttatttactaataattcagtcatgctgattcttattatttttcctttttctttcggaaatcgataacaggactgcgaacttctttatattgcctatagacctgagaatcttatcataacgtgcatgcttgtgccacctttatccatccgaccgtctgttatgattggtggtattcaaaggttagctatcgttttgtttatctctctcatgtcaattatattttctactgctgaatttttcttgaaagaatgtgttttcttgctgcagcaatgaaaacgacttaacagcgcgattaaagcaaatcattctaggcaatgcttctcttcataaaattttaagtcaacctacctcatcccccaaaaacatggtacaaggagtttctattacatcaatgcgtccctgttatatttgtgaatttatgcattctgtactgtaatgtgtttgtctctatttttgttgaatcttacttcaaaatgattttttggtttacgtttttattccaattttctgttatgactatatctggttcttttattatcttctttcttatttgttgagttttttttttgttttagcaagtatgggatacagttcaaatcgaggttgcaagatacattaacagtgaagtccgtggttgtcaaaaccagccagaagagcatccactgtctggaattcttcagcgtctcaaaggaaaagggggacgtttccgtgcaaacttgtcggggaagcgtgtcgagttcactggtagaactgtaatttcacctgatcccaatctgaaaattacagag

SEQ ID NO: 176022 - DNA, 109 bp, Arabidopsis thaliana landsberg
atgaagacaaactatgtagaaacaattgacttagctactcttacgggtgaccggaacgcgcagtttggaatcgatttcttggtagacgaaaatgtcaaactgaagacag

SEQ ID NO: 176023 - DNA, 215 bp, Arabidopsis thaliana landsberg
gtgaatcgaagaacaagaaagtggtgataataccgggcccaaaaggagagcgtcctgatattaaggtggtagaaggcccatcaacagttgaagatgacttttgttacgattgtgtacgtcgttgtatggtaaagggtgtcggtttctattttcgtagttgtaaaggctttgtctgtcgttgttattatccattcatgggtggctacggaccgtag

SEQ ID NO: 176024 - DNA, 611 bp, Arabidopsis thaliana landsberg
gaatatatataggcgatgagaaagtcattcatttcacttgtggaggtggtctagaaactggaactgggaccttcttggacaagatcgtcgttagtgtcatccctaatcataaaggagacaatccttgttctaattgtgaagagcaattgaatctcgaaggtgtaatctcttcttgccttgactgctttctcgccggaggaaacatctatcttttcgagtacagtgtctctccagctgcatttatcgccaaacctcgacgcggcacatgcactatagcaccttcggatccctgcgatgaagtcatttcccgcgccaaatacctcttattgcggaatgggtttggtgattaccatgctttggaaaacaattgtgaagattttgcaatatattgtaaaacaagcttgctggtcggaaaagactatgtgttgggaaggggcggtcaagccagctcagtgagtgcagctgcgtggcttgcgcaacttagtcctttcggcagcaaagctattcagctatttgcagatattggtatgagaaaggatgctattaaggtgcccgtcgagagcctcgttcctcgcgcatatgctactggtacctctagaaatagaaggtga

SEQ ID NO: 176025 - DNA, 342 bp, Arabidopsis thaliana landsberg
atgttgcttgccgacatcgggctcatcaatcttcctaaaggggaggtaacttctcttcaacattctgaactattgatggcattcacacaaagcacagatgtctttgatcttacatgtgaaacacagtttttctattgttctcaagtttttgatacaacaccatcaagttcaatgatgttaataaagcttgggaagaaagaaagccattgtttgtttaaggaaatctgatcatgaatcaacttttttctttcttaggggagaaggaaggagaatcttgatgtttggttttctgacaaaactcaacctttcaatatgtattcacaagaacctgaagttgttaag

SEQ ID NO: 176026 - DNA, 146 bp, Arabidopsis thaliana landsberg
ttacttcaacaccttcgaagattaataaccaaaaaatcgtcgtcgccaaattgatcggagaaatcttccggattcgtgaggttacttttcccgatctacggttacgattttcgaatctgcgtctgcgtggtttgcagaaaaaataa

SEQ ID NO: 176027 - DNA, 213 bp, Arabidopsis thaliana landsberg
aatggtaaggtgctcagcggcctgtaccgccggaacaagggtgcagtattggtgtttgcgaatccgggcgggcaggagttttctgtggccaagtcggatattaaagagcgggtgccgtctaagtatacgctgatgccggatcagttcaggaatacaattgagcagaaggattttgatgcgttactgaagtttctgctggcaacgaaggaatga

SEQ ID NO: 176028 - DNA, 366 bp, Arabidopsis thaliana landsberg
ctgtcgccaatgccgttatgtttatgggctgcaacacagaagagcttatggtggttttgtccacccgtaaacttcaagctggtacggattgtattgctaaaaaactgacattgcggcaggtaatgtttaatagtgtcatcgttcttgctacttgttttcatatacatcgatcattaggtgatgtatgagttgctgaaccgttttcacttacaggcaactgacatgagggatggaatagcaaaatttatttatgcaaacctttttgactggcttgttgagcaaataaacattgcattggaagtcggtaaatcacgtacaggaagatctataagcatccttgatatatatgggtttgaatcatttaag

SEQ ID NO: 176029 - DNA, 128 bp, Arabidopsis thaliana landsberg
atattgaatcaaaactgaaacggattgaagacgacccagacggatcgggaactactcatttgtttaattgtatgaagagtgtgacatcacgggctaatcgtgcttttgagccactttttgagagacag

SEQ ID NO: 176030 - DNA, 249 bp, Arabidopsis thaliana landsberg
atgacagaatttcttgcagtagacccttatgcgtccgatgcgccttattccaataaagaagatgatatccggctgattcataacattggcgcaaagtttattggcagggccatttaccggtggggaggagaatcggtgctcaacaaccgggactacctggataatgcgcgccgcctggtagaggaagtgcataaaacggacccggagatcatcttccaggcagccctgtttgagcagatcagcgaacag

SEQ ID NO: 176031 - DNA, 66 bp, Arabidopsis thaliana landsberg
atggaagagtcatgtaggggagcatattccctgaacaaggattcagacctaggctatagatacaag

SEQ ID NO: 176032 - DNA, 507 bp, Arabidopsis thaliana landsberg
atggatgtcccgcacgcgcaaggcatcgtatgcaagactgcgcctcgatacttcccggttcgaacgtcagctggccccatgttcaaactccatcacctgctcatgcgccaaccatcccgcacgccggttgacgacgacaccagaacgcccgcggacacagggtcggcgaccgatgacccggttgctcgacagggcctgttcgtcatcggcgcggcccggacgggcacgaccatcctgcaaggtgcactgaacgattcccgtgagattttcctgttcggtgaacccgcttttcatcgcgacccgggaacccccgactttgcctcgcgctacaacggcatgcaccgcgcctggggcaaccaggagaccaagagcagctactgccctcgcttgttcgaacacgatgcccgttggcacgactacctcgaaaaactggcccggcactatcgctacgttggctcgaagatcgtcatcaaccctcatgacgcgacagcggaatgcagcgagctg

SEQ ID NO: 176033 - DNA, 896 bp, Arabidopsis thaliana landsberg
attagaaggaactaaatttgaaattataactcagaacgaagaacaaattgaaatttcatttacaagaacgtggagtatctctagacgtggctccttggtccccctaaatgtagataaaaggtacgtagatcatcgttaatttatagatattttgtgtatttaaaaattatgacctccaaagtaaataaataatcgaatgtaaaattttcctacagatatattattcgaagtggtgtgtccggaatatacatgtacggtatattggagaggttagaaggttggcccgacgtggacatggaccaaatcaggattgtcttcaagctcaacccaaaaaagtaactatacgcttttcactagttatatttatattttcaatgccaatttaaactagtacatttagtgaaattgtttgtgacttttgacagatttgatttcatggcgatatccgatgatcggcagagaagcatgccatcgatggcagatcgagaaaattctaagtcattagcttacaaagaagctgttcttttgacaaatccaagcaaccctatgttcaaaggagaggtatatatatatatatatacctgtaatatactccatatataagtccatatctaatgatacattgcatttacatcactatagttttggttttatatctttgttaaaacaacacaaattatgaaactactaattttatatgggagaatgatgttggtgtgacgcaggtggatgataagtatatgtactcaatggaagacaaagacaacaatgtgcatggttggatctcatcagacccacctgttgggttttggatgataactccgagcgatgagttccgtcttggtggccccatcaagcaagacctcacctctcatgccggacccatcacactctcc

SEQ ID NO: 176034 - DNA, 46 bp, Arabidopsis thaliana landsberg
atgaccgataaagaaggagaagaggcagaagaaggaaatcatggca

SEQ ID NO: 176035 - DNA, 696 bp, Arabidopsis thaliana landsberg
gaaaccgctgttgtgaagaagaagccaacaacagttgttaaggatgacaaggcagacagcagttcatcagatgatggatcttcatctgacgagtcatctgacgaggtaaacatttagttttacatgttagcttaaggttacagtaattccatatgcttattttgggaataaaatttgtgttgaacacatcattaggaacctgcccctgcaaagaagcaagcaactgttgaaaaacccaaggcagaaagcagttcatcagaggaggaatcttcttcggacgatgtgagaattgcgttatacatgttatttactcaatggtaaagtaaaatcatttacttactttgagattcgttttttatcaacgtaatcaggaaccaacccctgccaagaagccagcagttgttaagaatgctaaaccagctgcaaaagattcatcatcctcagaggaagattctgatgaggaggtttgttttgtcttttaatttgttatttctcaagattagatatttttaatgacttgtgactagttttatattctatacactaaatatttcatattattttcctacttgcaggaaagtgatgatgaaaaacctcctacgaagaaggctgaagtttcgtcaaaaacttctaaacaagaaagctctagtgatgaatctagtgatgaatctagtgatgaatctgataaggaggaga

SEQ ID NO: 176036 - DNA, 532 bp, Arabidopsis thaliana landsberg
aatcgatgtggcgattagggttgggtagcgactcgtaccctgagagaccaggtgctcctgactgtgcctactacatgcgaactggtgtctgtggctacggtaatagatgtcgttacaatcaccctcgcgatcgtgcctcggtaatttcttcctctcattcattcttctttcttattattgttctgaaaccatccatactaggaggacacaatcaaatgcttctctctgttttttccgcaatgtgggtgatcactggccttatagagtctctctaaactggggaaattgttaagctttactggtttcagttgttgtgctttacgtcacgtttttttttgtcttatgcattgactctacccggtgtttccctgtatttactgatacctttgtatgctcttgtaaaagcttatcattttgtcatcttagcttggccacagtttactattttctcatgttgattcatgtataggttgaagcaactgttagagctaccgggcagtatcctgaacgttttggtgaacccccatgccag

SEQ ID NO: 176037 - DNA, 345 bp, Arabidopsis thaliana landsberg
atgattcgcacacctcaggtcgcggtgatcgcgcgaccggcgcgtgcctatcgcgatacgacgcgttggcgcgaggacgtgctgaccattcaggcgatcaccatcgacggcaagaccttcacgcgtggcgcggtcattggcgagtggatcggtgcgagccagcccgggctcgtcgaagcgctggccgggacgctcgcgaccgtgcgtgcacctgcggtcgagaaggcgaccgccgcgaaacatcgtattgccgttacctttgcgccgccgacgggatcaccgacgacgcacaccatcgagattggccagcgttgcgtcggtcgcatcgacggcgcacaggccctg

SEQ ID NO: 176038 - DNA, 670 bp, Arabidopsis thaliana landsberg
atgaaggctcctaggtaaaaattttaagctcaagcggagttcgtttcccaaaccaaacattacaatttgttaaaatatattaaaaccaacccaaaccctaactaatgcaatcacaatcccattattggatctatagccaagagttccatgaaactcgccaccgaataaacttctaaacgttgaaaaatccatatcagaactgttttctagggtttatttttgaccattttttatacaaataaacttgtttttttgcataaaaagaaatcaacgccatggctagggcttacctccactgacaaaggcatcatatggcttctctaacatgtgtccgcaaaagaaatccaccattatctgatctcacttacctcaccatcaccgtggaaaactctcgtctccattgacgtcgatctgcttctcccccttcctcctttgctttcacggctcgggtctggttgcttcttattttggacccatcacgatcttctctcttttctcttctctctcacgtagcttagatgatgacttactacagcgatcacaacatgacaacaacaacttcttggacttactttcattagatctcttatttttcttttctgtcttttgcttaagcggctcgttgaagaggatacgcgttacgcgaacacaagacacaacaaacccttga

SEQ ID NO: 176039 - DNA, 131 bp, Arabidopsis thaliana landsberg
taccgttattgctcatgccggagatggaaactttcacacatgtattatgtttgatccaagcagtgaagagcagagaagagaagcagaaagactgaaccactttatggttcacagtgcactgtccatggatg

SEQ ID NO: 176040 - DNA, 95 bp, Arabidopsis thaliana landsberg
gttcgtcggtaatattaccgttgcggataagcaagcatataaatgaagaagaaggcattccactcagacgccaagaatctctccggtcaccttaa

SEQ ID NO: 176041 - DNA, 181 bp, Arabidopsis thaliana landsberg
atggagaatgcaccgtttggcattcaactggagatatatgattttgaagcgctgaccgatgatacgagtaagcttaccatgcacgtgatatatgaatcggtggacaaacgcgaccaactgatgcaactgccgtttaaacaaggccttaacatggcccataaccgtttacaggatgtgatgg

SEQ ID NO: 176042 - DNA, 349 bp, Arabidopsis thaliana landsberg
atgaagcgcgcgtacgacaagctcgtcgccggccgggcggcctcggggttgttcccgcacatgctgccggcatcggcgagcgggccgatgcgttcacatatcggctgctacgcggaccaggtctatcccatccaggcgctttcccgctatcacgcggcgatcggcgatgccgatgcgctgaggattgccgatgtctgcgcggcgcggatctgcgccctgcagggcatccatgggcaatggtggtggcattatgacacgcgtgacgggtcggtcgccgaaggctatccggtctacagcgtcccccagcatgcgatggggccgatggcgaaacacaagcttcgcgaggccg

SEQ ID NO: 176043 - DNA, 182 bp, Arabidopsis thaliana landsberg
gtactttggatgcttttgcattaggaagaagagaagagaagccgaagaaaccactcgatcacaccctcatgacatccactcgatcgcactcgatcacaaggtcgctggaccattcaatctcgacttcacttcatttcactcgatcgcaagacggagcccctgaagcccagtttgatcaatga

SEQ ID NO: 176044 - DNA, 67 bp, Arabidopsis thaliana landsberg
atggttacggaacgtgacaattggagaagaatacggatcgaaattggaccaatgatcacaccgaaag

SEQ ID NO: 176045 - DNA, 205 bp, Arabidopsis thaliana landsberg
gtttgatgatctacaactgaagattgaaagcttgtcattgaagaagaagatgaagaagattcacagagtcatattctcatcaaagctaaaattggaatcttgtcatgaattctttaggcgaagcttgagatctgcgattgaacaagttttccggcgatttcggtcggaattaaagattcccgacgtgacaacactctgccggtga

SEQ ID NO: 176046 - DNA, 342 bp, Arabidopsis thaliana landsberg
atgcctaaaggaggaagagaggcaatcaccaagaatctgattctacgggaagatcaactccctcaaaagcttctccaccctaggaccaagaagaaagcaagcaaaccggttagtctcttcgtgtcttctatctcaaactcaaatctgtaactttgattgaaatcttaaggtaaattatgctgttgtttccagggtgatgagtacttcgtatcagatgatgtgttcttgaaccatcatagtgatagaaaggcgccattgcagcctcctgtgagaaaagctatgtcggttttcagccagaaaagaaaccctaatgacaaccattactctcgttctatgcactga

SEQ ID NO: 176047 - DNA, 1003 bp, Arabidopsis thaliana landsberg
atggaagatgcggtggcaattcatccttcattttcttctccgaagaattcggaatttcctcaacactactttggtgtgtatgacggccatggttgttcccacgtacgactccgttaccatgcattcttacgttttccgaaattctatgttttcagttttagctgatacgaaatcttttttttttccttaggttgcagcaaggtgtagagagaggcttcacaagctggtgcaagaagaactaagttcagatatggaagatgaagaagaatggaaaacgacgatggagcgtagcttcacacgcatggataaggaagttgtatcgtggggtgattccgtcgtgactgcaaattgcaagtgtgatctacaaacaccggcttgtgattccgtcggatcaaccgctgttgtctcagtcattacgccagataagatcgttgtcgccaattgtggcgattccagagcagttctctgccgcaatgggaaaccagtccctttatcaaccgatcacaaggtcagttccgttcaaaacatgttcagtttcatttaagcaatgattggatttgtggattaacttggagattgtgttctttgtaatgaaacacagcctgatcggccagacgaattggatcgaatcgaaggagctggtggacgagtcatatattgggactgtccaagagttctcggagtcttagcaatgtctcgagcaatagtagacaactatttgaaaccttacgtgagttgcgagccggaggtaaccataacggacaggagagacgatgactgcctcatactagctagtgatggtttatgggatgttgtgtcaaacgagaccgcctgctctgtagcgcgtatgtgtctccgtggtggtgggagaagacaagataatgaggatccggcgatttcggacaaggcttgtacggaagcgtcagtattgctaacaaagctggcgttggcaaggaacagtagtgacaacgtcagtgtcgttgtgattgatctcagaagataa

SEQ ID NO: 176048 - DNA, 143 bp, Arabidopsis thaliana landsberg
ataaatcggctgcttttggaagatgacactgctatagaaaatcgtgactcggagtatcactcagtcattcaagaattccgtgctttcatgagcgattgcaaggatgaattggacgaggcaaccacagtgaaaattctggagag

SEQ ID NO: 176049 - DNA, 273 bp, Arabidopsis thaliana landsberg
ggaaaaaggagaagattcgaagaccaaaaacatggaaacatcctcaaccgatatcaagagatgagctcacacagatgcgagaggagttctgggacacagctcctcactatggaggcaagaaaggtgatcatcacatataaataattatgtcaagagtcaaaagtgtttgtatttcaatgtatatacatatgtaaacagagatatgggatgcgttacgagctgcagcagaagaggatgatttatcgcttgcgcaaacgatacttgagagtgccg

SEQ ID NO: 176050 - DNA, 229 bp, Arabidopsis thaliana landsberg
gattatggcattgacttcaacgataatgactctctaatgaaaccctttgattgtctgtgtggtagcagattctgcaggaacaagaagcgatcaacgagtgagtaatatcatcagagtttgttgattctgttacatgggactgagtaatatcaatcctgcatctcactgactgaattttttttacctttgttatgttccagagaccatgcagattttgaacaaagcatga

SEQ ID NO: 176051 - DNA, 439 bp, Arabidopsis thaliana landsberg
ggttggagtatcttcatcatggctgcaggccaccaatagtacacagagacgttaaaacagcaaacattcttttaaacgataacttggaagccaagatcgctgatttcgggctttctaaggtcttccctgaggatgatctcagccacgttgtgactgctgtcatgggcactcctggctatgtcgatcctgagtaagtttccttaacacatcaccacttttaatctttaccattttggtcatgttggtctcatcataaactggtttcaaaataggtactacaacacgtttaagctaaacgagaagagcgacgtgtacagctttgggatcgtcctccttgaactcataaccggcaagagatccataatgaaaactgacgacggagaaaaaatgaacgttgttcactacgtcgagcctttcctcaaaatgggagacatagatg

SEQ ID NO: 176052 - DNA, 114 bp, Arabidopsis thaliana landsberg
atggccaaaccggatttaaccggaggtaaaatgaaaatcgggttcttcaatttcttctctccaagagattcaagaagagaagaagagccaaaagcgatggaagaagaagaagag

SEQ ID NO: 176053 - DNA, 803 bp, Arabidopsis thaliana landsberg
cagcgagccaattgccgacctgattcggaagaagagatatagaccatcccacaacagctcctcccccaaaagagacaaggcgagggcccgaactgaccgctctcctcgaccgtcgtcgccaccccgatctatgggtcctcctcctccagtcaccatatctccctcgtccggatcaggagggaaaaaggcggagcgaagtgctatccctcggcgggatgaaactgaggtccgagatgccggaactaaagctgttttggttcctcagaccaagtcgctcacgggttagaaatttcttcatattttttatcatattttttgccatttttgcttattgactcagcgtccttcgaccggtctgaccccttttttttaaaacagcgatggaaacggagaggaacgtctttcgatgtttgagaatccgaaaagacaccatccttccaaccttcgatagatggcgtcctgcaatccgcgagcgattcctactccacgcccatcactcatctcgggttagttcctttttaccgtaataaaccttttaatctttgcttctttaccctgtcgctaaccccttcttgttattatctgatccaggcgaacagtgaactcaacgacatgattgagtactatgaaaggctactgcttgacagggaaaaagatgttatggcgtggaaggataagtcttcatcccttgagtccgatctccactcttcaaaggatgccaggctgaaattggagggtcagttggacaacctctccaccaaactcatgaagtccaacggcgagctgcaggagcagtaccaaag

SEQ ID NO: 176054 - DNA, 1365 bp, Arabidopsis thaliana landsberg
atgaaaaagattctttacctggggaacacattgaaccaaggaactgcaaggggtaagtattatttatgttattcttgttctacatctttttgcacaagacattgctagttgttttgtctgtacggataacctttgtggttgatatgatccttgctttgctttctgcaggcgctgctgttggattcaagttggacagtttatcgaaattaagtgatacacgtgctgctaacagcaagatgactctcatgcattatctttgcaaggtaaatgacaatcaaaaagagcaggatctagtttctgatgaaggttattataaaaactggtctggatcaggagagatacataatcctgaaactctcatctttctttttccaggtccttgcttcaaaggcatcagttctactggacttccccaaggatcttgaaagtcttgaatcagcctcgaaggtttgcagttgttcatttctcgtcctctactccttattttctattggctcatcatttgatcgtcctgtctattgcagatacaattgaagtctctggctgaggaaatgcaagctataatcaaaggattggaaaaactgaaccaggagctcactgcatccgaaagtgatggtcctgtttctgatgttttccgtaaagtatgttgggttttttaattttccttttgcatatcttatctatcatgaaattgagattagttccatgattgtgccacattactaaatctgtatcactttgtaaaatcatcaataacccgctggaaaataattcttcagttgggttttgtttatagagttaatttcttcctgatcctaaaacctacttttatgctttgataacagacattgggggacttcatatccgttgctgagactgaagtggcaactgtatcgagtctttactcggtcgtggtaatttgtcaacctctactagattccaagcgcctttaccttgacaatgtggttgatcctgaaaatgatttttgtgttgtatcttatgttggacggcagggaagaaatgctgatgctcttgctcactatattggggaggatcgtaactgttgtccatttgaacaaggtatgacgaggaatctataaacttaaatcctctagggcaatacatagaaaaataaaaagtccctaatcgttatttagttggaagtgttatgtagctaacaataataccgggtaatggactgctgcagttactgcaaccctcttgaattttataaggttgtttaagaaagcacacgaagagaatgtcaagcaagcggagctagagaagaagaaagctcttaaggaagcggaaatggagaaggcaaaaggagtcaacctcacaaagaaaccagttgatgatagctga

SEQ ID NO: 176055 - DNA, 398 bp, Arabidopsis thaliana landsberg
aattctcacaacgattgttctgtaatcacgcctgtgtcccggagactgtggacgaaacgaggtataaggagcttttcaataagagaatggatatggcaggacttaaacctcacaaccgaattggtaagtggctaatttcaattccaattggttccactaaaccagaaacagtgattggataaaattgtgttgtgtgttttcagctttgggagtttcaggtggtcctgatagtatggctctttgtgttctaactgcaaaatggaaaacacaaggattaagttgtgttaataagacagatggttttattgatggacttgttgctatagttgttgatcatggattaagacaagagagtaaagatgaagctgaacttgtctgctccagagtttctcaaatgg

SEQ ID NO: 176056 - DNA, 409 bp, Arabidopsis thaliana landsberg
atggcagataatccagtggagaaaaagtcgcgttgtcggtttttggggtttgtgtttaacagacgtggcttgtggtccaagaaatgtcctgcggacaatggtagccataaaagcacaatgagtagcagcaatgcctccaccgcaaccgctaccaccgctaacattcagttcaccaaatctccatgtaccgaatttaacccgaggaagcttcaagaaaataaagttttacctgagccgatcgaggtccagaaccaggtacaaagacctgtttcaaaaccctcatcgcatcaatacccaaataacaatcagttaggcagtaatgggaataaccaaccaagtaataataatcaaggaccagtccaacaacaacaagcgaggaaggttccgagggaagcaattggtttatcag

SEQ ID NO: 176057 - DNA, 1160 bp, Arabidopsis thaliana landsberg
atgaaagagaagcaatatgagttgcagaagaaggttatattgcttctagagaaaagagagactatgagctccaaaactacgggtgatgttgatgttgatgatgttaaaaacattctcctgatggaaaaggtaattatttacattttgaatggacatagagttaaatacggatcttttttcgtttattttggtaacttttgaaggtgattaatctttgacaattctgttttgtgtagctggaaaaagaggtattcccaaataagaaggatttaatggtggtggaattgaattattcatgcacacgctgttcgaaagccgtattatcaggattgagatggttttgcgagaagtgcaagaatcttcatttgtgtgaaagctgctatgatgcaggacaagagcttcctggagaacacatatataagaggatggacaaagagaagcatcagctctcaaaggttcaggtgaacggcgtactgttttctacaacagaggataatgatatcatccaagaaaacgatatgttcgaaagcagacaagcgttcttagctttttctcaaaagcataattacaacttccacacgcttcgacatgccaagcatttttcttttatgatacttcaccatcttcacacctcaaacaagcatcattgctctcaaaactctagcagtctcacctgcacggcctgcaaaaaagatgtttcgacaacgatttacttcccttgtttgctctgtccggattaccgagcttgcactggatgctataccaaaaacagaacccttcgtcatcttcatattttccctacactcccttcagctaatagagcgccgtcgagaaccgtaatggtaagtatatgttacctgaaagtatatatcgtttctttggtttacttttgacttgtttactaaattaatcaacgtattactctcttaggttcttgagatattgaacgcaatatcgcatgcgcttctgtgtcagcacaagaccactaagtcatgctcatacccgaaatgccacgaagttaaagcattgttcactcacaatgtacaatgcaaaatcagaaagaagggaactcgttgtaatacttgctacaaattgtggcagacaataaggattcatgtgtaccattgccaagatctcaattgccccgtaccgcagtgcag

SEQ ID NO: 176058 - DNA, 1299 bp, Arabidopsis thaliana landsberg
atgacgaatttgggtggtggtggtgcggaggagcaagccaggttgaagcagtatgggtacaaagtcaattccagtcttgttcttaacagtgatgagcgtcgtcgtgatacgcatgaatcttctggtgaaccggagagtctcaggggtaggattgatccgaaatcctttggagatcgtgtcgttaggggaaggcctcatgagttagatgagcggcttaataaatctaagaagaagaaggaacgttgtgatgatttggtgtctgctcgtgagagcaaaagagttcgtcttagggaggtgagtgtacttaatgatacggaggatggtgtttatcagccgaagactaaggaaacaagggttgcttttgagattatgcttggtcttatccagcagcaattgggtgggcagcctttggacattgtttgcggtgcggctgatgagattttggcagttcttaagaatgaatccgtcaaaaaccatgaaaagaaggtagagattgagaaactactaaacgttattactgatcaggttttcagtcagtttgtttcgattggaaaactgattacagactatgaagagggtggtgattctttaagtggtaaagctagtgaggatggaggacttgattatgatattggtgttgcccttgaatttgaagaggatgatgatgagagtgatcttgatatggtccaggatgaaaaagatgaggaggatgaagatgttgttgagcttaacaaaactggagttgtccaggtgggtgtggcaataaacggcgaggatgcaagacaggcaaaggaggatacgagtcttaatgttctggatattgatgcttattggcttcagagaaagatatctcaagaatatgagcagaagattgatgcacaagagtgccaggaactcgcagaagagctgcttaagatacttgctgagggtaatgatagggatgttgagatcaagctgcttgagcaccttcagtttgaaaagttcagccttgttaaatttctgttgcaaaaccgtcttaaagttgtgtggtgcacccgtttggctaggggaagagaccaggaagagaggaatcaaattgaggaggagatgttggggttaggttcagagttggcagcaattgttaaggagttgcatgccaaaagagcaacagccaaagaaagggaggagaaacgggagaaagatatcaaagaagaagctcaacatcttatggatgatgattctggtgttgacggagacagaggcatgagagatgttgatgatttagatttggagaatggttggttgaagggccagcgtcag

SEQ ID NO: 176059 - DNA, 285 bp, Arabidopsis thaliana landsberg
ggagactatactttgaaaattcgtggaaagatcaatttgctggtcagcgtgatggccggcgttgcgctcgttatcggcgccacggcattgttcgctatgaacgaatacaacaataagctgaccgcatatgaaagcgcttccagccgcgcctatgccggtgagcgcctgaaccgtttcgtgacggccgtcgtcatggaagcccgcggtatctacgccgccaaggacgtcaaggacgtcgcacccttcgccaagggcattacaaccgatctcgacgagatcgacaag

SEQ ID NO: 176060 - DNA, 78 bp, Arabidopsis thaliana landsberg
cgctccacgtccgcgctcgtcctgctcctgctgtgtggggctcggacgctgcgggctgccggcccagattgtgactag

SEQ ID NO: 176061 - DNA, 1413 bp, Arabidopsis thaliana landsberg
atggctaaagagatagagaatttatggagagaagtgagagaattgagcttaggaactaaaatcgatcgttttgattctcaaccgtctccggtgaagtttctccgaaactacgtgtctcagagcaagccttgtataatctccaaagctattactcattggccggcgttaaaactctggtcagatccggcttacctcaccggagctttgtcagatgacgttgtctcgctacatctcactcctaacggctgcgcagacgccgtcaccggagatagtgatctttgtttcgcttcggctcatgttgagaaagttctgttcccggaggctcttaaggttgttcaatcgtcgtgtaaaggactgaaggttgggtatttgcaacagcaaaacgattgttttagaacggagtattcgacggttgcgttagactgcgacggtgatattgagtgggctacggaggcatttggttgttcgccggaagctgtgaacctttggattggtactgatgactccgtgacttcatttcataaagatcactatgagaatctttacgctgttgtttcaggggagaaacatttccttcttcttcctccgactgatgttcaccgtctctatatcgaacagtatccggcagctaattactcttaccaccgagtctgtgagatttttagattaaatagtttggtttcttgttaagtgatgttgaatgagataaagtttgaatctttataggatactgatgcgttcaagcttgaggttgaggagccggttaggcatgtaccttggtctagtgttgatccatacccttcgccagagaaggaagcaagcgagagattgaaatttccgttgttctttgatggcccgaagccgtttcattgtactgtcaaggctggcgaggttctttacctgtaagaatttaaatcccatagctccacagattgaaaattctcagaaactttttggcttaatttggatcactaatgtatctacttcagtcttacctttgctttataagaaacaaagattagaaatgggtgatagacctactacacaattggattttctagtcatgattctgactcataatggttctgaatattgcaggccaagcatgtggtttcaccatgttagtcaaaccccaggagatggtggttataccattgcagtgaactattgtaagagttttagttttgcttccatcatctgtttgtcttcaggtggcaagccagtacttttcgactctccttgcctctaataagctatgtatgcatctaatttgcagggtatgacatgcagtttgacatcaagtatgcttatttcaacttcttgcaatctttatcatacaagtcatcttcactcaatccaattctgtcttggggagaagacgaagattcagaatccagtgatgcagaggtatga

SEQ ID NO: 176062 - DNA, 285 bp, Arabidopsis thaliana landsberg
gaaaatgtaaacaccgagagtgagaagaaagaacaggttgaggaaaacgagaagaagactgacgaagacacaagtgaatctagcaaagaaaatagcgtttcagatactgaacaaaagcaatcagaggaaacatcagagaaagaggaaagcaacaagaatggtgaaacagaggtaactcaagaacaatctgattcttcttcggatactaatcttcctcaagaagtcaaagatgttcgcaccgatctcccaaacctcaccggattctggaaatggagggagcaatga

SEQ ID NO: 176063 - DNA, 1880 bp, Arabidopsis thaliana landsberg
atggagagatccatttcctttaatcctcgaggcgataacgagctccctgatgatcggagcagcgatgtcggatatgctgctaatgatcggaggcttgcttattctcgctcgtttcagcaatctcacggtccacgaacgccggcggtcacggaagcggctaagccttttctcgataggacggtctcgagcatcgatatgccgccggatatttactccgttgatggaaatgatgtgtttttcggggaagggaaagatgtagacatggcaaaagtgtctgttttggaaatggtttgggaggtttttggagtagtgacaagtggaaatcggcagatgaagagactgtttctgctaattgcgcttaatgtgttgtattctacaacagagctctctattggtatcttcactggtcgtgtaggtacgatttggtttcagttctctttttgttttaggattgaatctctgaattgttgatattctttctttgaattgttttgtggactcttacaggtttggtctctgatgcattccatttgacatttggttgtggtctcttgacattttctttatttgcaatggcaacttcaaggaagaagcctgatcatgcttactcatacgggtgagttacaagtaatttgattggctcagttggttaatccattttatgatctatttttctcccgagactgtaatgtgattatgctcaagtggttgtaatttaggcatccttgtcttctcttttttttgggttcccaggtacaaaagacttgaagttttatctgctttcactaatgctgtaagtatgttcttaacgtgttttggatgtcatttccagctttagtgtagatggcttgactcagtgttaaaactctttcctttactgttgctgatagaatagagtattttacagctcgttaaaaagatttggacttccatacaatctatcttttcgttttgcctttcattgtctctgtagtttatctttttggttaatactttgatttgtttaatatttgacatatgtgtagacagctgttccttatgttcatgtcattctccttagctgtggaagctcttcatgcatttatacaagatgaatcagagcataagtaagttgatattttcacaaatgacatgcctaggagtttctatatatatctctagcacttactaagtttacagtacttgttccctcttgttcctttcagtagtgtgattgactgagatttcctttatgtaggcattatttgattgtatcagcggtaacaaatctgctggtgaacctactaggtgcttggtttttccggaattatgctcgtgtcaatattggtatgtttttctctgcattttaagttctgtttagacttgtatgaattgatgctcatacgctgctttatattttgatatagcctttgttggtggctttggtattcatttgtagaaattggccacccttgtcagttttcgctttaaagccaaagaagtaagggtgtttggttaagatagaatcagtacgaggattagttgaaagagagagtcagcataattgtaactgatctgtcaaacgactattcgttgcttcttgaaattatctgtcccttctttacatatctaaaaaccacatgttatcttgaatttttttcttatattcataatatgcaatatgctgcagcctacagaaaagcagaagatatgaattatcactccgtttgcttgcacgtcatatcagattccatccgcaggtgttaatcctctctgcctttataaatttcaagcagaatcggagaaagctatatagaaaagaaaatgcttccttttgcatcaaacttatatacagtcaacatgaagttttctttgctgctgtcttttcagtgcaggtttga

SEQ ID NO: 176064 - DNA, 193 bp, Arabidopsis thaliana landsberg
atggtaagctttttttcttttctttcagagtactattcatttattttttgtgtagtgatctgccttgtgttttgtttaacacgtttttgttaaaaaatcttgcaggtgaagtttacagttgaagagcaacggaaaattacggatcgtaaacacaacatccgtaacatgtctgtcatcgcccatgtcgatcatg

SEQ ID NO: 176065 - DNA, 903 bp, Arabidopsis thaliana landsberg
gggtaaatcatttgacacaagggctctacctgccccaaatgcgtcagagctttccaatggttatttccaatcctttactagtgtgattttgattgtcggtgagtttcattagtctctggtatttgatgttagactttggtgcatgcagaagatgagtatgcaacactagagatggataaaacttcagggcctacattaacattgataaaagaagaatatgatagtcttccctctttcatgaagtctctagcatcgtgggaggtatgaaaattatctaaattctcgtattatgttaaatgttcttcttcttagctaacattttagaacatatcctagcagcgtattaagaattgaaccaataaatctttaactggagagccatgaaactttcatctttcctatagactatagtgccaagtttttgaataccctgccatcaaattcattacctgtgacaaactgagaaattgctatcccctgcaagtcttgataatctctatgcccaacgggttgaacgttttgtttatttatagtaattaaacgcataaaggttcccttaatatttttctaaatatggttaattcctgcttgtgtttccaggatctgctaagtgccgtgcagaaattcaactcggtcctcgatagcaagaaagaaataaacgggtcctactacttccgtgcagatgagattccgactctaggacttggtaggttcatatcttcctcgtcacatctgcctgtagtagcatcattaggttgatcatcttcagattcacagaaaaaatatatgatgatggtttgtattgcaggccacaaggagaaagcgtatacgttgctcctgacacggatgaagagacttgtggttgagacaacggacggagttatatcttatagagttgcatag

SEQ ID NO: 176066 - DNA, 215 bp, Arabidopsis thaliana landsberg
gttttccccaaatatgggattggatcacggtaatacacaacgagaaacacagttacaaaaatgcaaattggagaataataacctggcaccggaaaggaggattgtatcctggagacaccgtgaaacagagagtccgacacactagcgacggcagatgcgcagtccacagctttgcagtccgacacactaatgacgacacatttattaagatttag

SEQ ID NO: 176067 - DNA, 178 bp, Arabidopsis thaliana landsberg
attcgacacgacaccgaaggttgaagagtgcctcgatacaattaatggcagctgctttaacatcctacagagtgaatgtaacgagatcaaaacgaataccgaagaaaaggaagataatgcaaacagtttaaccataaaaagaaagaaaaatttcaaatgtcacctgattatcacttga

SEQ ID NO: 176068 - DNA, 125 bp, Arabidopsis thaliana landsberg
atggttttagtgggcggtgaaattaccacttccgcctgggttgatattgaacaaatcactcgcgaagtggtgcgcgatattggttataacaattccagcaaaaattttgatgggaatcgtgcgag

SEQ ID NO: 176069 - DNA, 254 bp, Arabidopsis thaliana landsberg
atgtcgtcggaggaagataagattacaagaatctctatcgaaccggagaagcaaacacttctcgatcatcacaccgagaaacacttcaccgccggagaaatcgtacgtgacatcatcatcggcgtatctgatggtttaaccgttccttttgccctcgccgccggtctctccggtgccaatgcttcttcttctatagtccttaccgctggaatcgccgaagtcgcggccggtgctatctccatgggactcggcgg

SEQ ID NO: 176070 - DNA, 371 bp, Arabidopsis thaliana landsberg
atggagatcaacggtcaagaaggtcatcgatacgaagaatcatcatcagagtggttcgtaaagtatctaaaacgtcaaggcgattggttagagaaaactagagggaatcttatggttacagctacggttatagccggtatgagctttcaagttatggttaatcctcccggtggcgtatggcaaagtgacaattgttctttcggaaatcaaaccggaaccgcaccggtttgtaaggggagagcgggaactgcggtattggagtatgagagttcaaagcgtatagcgtatattgggatgattattagcagtacagtgtcattttctacctcaatgagtctcattctccttgtcatcagcggtatacgactaag

SEQ ID NO: 176071 - DNA, 388 bp, Arabidopsis thaliana landsberg
atgaatcggcgctacgaaaagccaccgccattgtcagtttcctccaaagggaagaagaagcattttgtcaatcacacagctcccaacactcctggaaattacgagaggactcaaaccagtccaacgttatcaacggctcgatcacacgaacccgatgataagctcaattacgagatcttctcaattctcgaaagcaaatttctctttggttacgaagacccaaggctactatggattcctcggagtccattacgacccggtgattccgaagcaggtccttctcccagatcaccgttgactccaaacggcgtcgttctcccgggaacaccgtcttcatctttcagaagtccgagaggaagaatctgcgttttgagcattgacggtggcg

SEQ ID NO: 176072 - DNA, 342 bp, Arabidopsis thaliana landsberg
ggcattagcttcctgatccgacatgaaggactgcgcaacacgatatgccgcgtcaagcaagttcgcgaccgtgtacatttgaacagcaagatccggacggttggctctaacataaaacttctctgcctcgcggtggttgtgggcttcctcgtaatgctgagcgatcttgaggtagtacttgtggataaactgctcatcggccccgccagcaagactgctcagaatctgaacggctttgccaaactgacgtgcgccaatcgcagactcaatagctttctgcgtctggcctgcctcaatgtaatgattgacagcgacatccaactgcctgcactcctgtgcaag

SEQ ID NO: 176073 - DNA, 569 bp, Arabidopsis thaliana landsberg
atgagtttagaagatttggtgtctccgaactggaccgtggggatcaaggtatgaccgatcgtgtgaactggtttccttcagattctcagcaaaacactggacgagaacagaggaatcagtcagagattgaaagataattatgttaatgggtatgatgctcttaggtcttttcatgaacgtagtcgtagtgctagtgtcatgggttctccatacggaaatttagaagacgttccttatttaccaagtaatcctttctttgaccaaaccccttggagtgatgatgcatatggttatatgtatggaatccgcaatactctattatcgcgtgctaaagacggtatagagtctcacatgttgcaatatgtgattgccaagggtttaaaggagacaattgataagatatttgacaatttgatctcacatgtatgtgaattgatgcttgattattatggccataaagtctttcgaaagcttatggagaaatgcaccgatgaacagatcactcgggttttggatatagtccttgaggaaccttttgaatttgttaggctttgtgtccatacacacgg

SEQ ID NO: 176074 - DNA, 85 bp, Arabidopsis thaliana landsberg
atggttggtgtagataacgtagaagaacaacgggtttcattctgttgcggagattgtaatgatagtggtgtagtaggtcgtatag

SEQ ID NO: 176075 - DNA, 184 bp, Arabidopsis thaliana landsberg
gtgtgcaattctggtggtgagtcatggagatcctctgcagatgttgcagaacgttttccattcagcaaagcaacaggaaggagatggtttggcagagaagtttcagttgagcagagttgcttctgtcttgtcacagcaccgcaagtttgctttgctcactggggaactccgacccctcatctga

SEQ ID NO: 176076 - DNA, 158 bp, Arabidopsis thaliana landsberg
ggatcttccgtgggaacgaaaccgagaacggtgtagcggacttcgatgagacagaaggagatggagcaagaggtgaacatagagccgatgcagcaaatgagagtgtagaagccatttgtttcgagtatgagccaaaaatatcgctgagtgaagattag

SEQ ID NO: 176077 - DNA, 547 bp, Arabidopsis thaliana landsberg
  unsure (1)..(547): unsure at all n locations
atgccgaggcgcgcatcaaggcggcaacgacgccccgctggtgacccctacattcccatcagctacggcaacgccggcgatatcgccaagcttctgaccagtggcgccaagtccagtgncggtgncggcggtaccggcgtcaacggcggtcgtcgcggtttcctgtcgccgcgtggcagcgtgtcgtttgacgcgcgcaccaacactttgctggtcaacgacacggccgagaaggtcaccgagatcaagaacctcgtcgccaagctcgaccgtccggtcaagcaggtgctgatccaggcccgcatcgtggcggccacgaacgacttcgcgcgttcgctgggcgtcaagtggggcgccatgggcctcaagcacaacaataacaacaccatcgcgttcgctcccaatgccggcagtggcgcgggcaatatcatcgacaacttgtccaataatggtccgacgggactcgtgtccggcaatcgctcgggcacgagcaccagtaccgaaggccaagaattcaaagtcaacctgccgatcaccaatccagccg

SEQ ID NO: 176078 - DNA, 493 bp, Arabidopsis thaliana landsberg
ggggattgccaccattttggagaaaaagggctgcgagcatgtaaagattttagcgcaatccgaagataccttgtccttcgaagatgcgaaagatccttcagccgaagccagcatggttggtggaaaatttttcaccaatgtctgggataatggtggtcgagaaatggcccgagaaattatccaaaaaagcgaaaagggtattcacgatgctagaaaagtagcagaggctgctgagaaaagcgcagggtccgaaggacagataggtattaactaatggtttttattgtgctgtaacttttgattttaaacttcgcccgcaatttgtaatagcaatgtagccgtatcctgtcctccctcagatcctactgaagcgtcttcgggccctcagcctaaagatgacgatgaaattaaaaagatggctgaagatatcatggatcaagttgtcgatcgacttctgaacgaaactgcagaagtagttttgagagaagattaa

SEQ ID NO: 176079 - DNA, 1395 bp, Arabidopsis thaliana landsberg
ccatcggaatcttcgtggtcgttcacattcgagaaggaaaatgagaaacccatcttagtgaaagctccgaactctcgccggaaaaacgaatcggattcagtgacgatgccgacgtctttcatgactggttcgatcgtagggaagaggttttacaagaaagtgacgactagagaagctgatgatggaaatggatggactgtgatgcttgattatagaacccttaaaaccccttcgaaaagacctctcaagcttcgttctttggcacttgctaaggccattgctgctgagtgggagtatcaggtttgttccatttcactaatttgatctgttttacttctaaagtttattgctttaagctatttagctattgttttgtagctgatcagtactgggtttgatttaagttagctagaatccttgtaattgggtctgctcattgcttattcaacttaaagctgagagcttaccgttctttagtgtccctaatgtttgatcggtttctggactttgcaatctgagttctaatgtgatcaataggttgataattcgattagttgaagtgagatttaaagaactaggcttgcagttctctagctcattttctcttgtgatccttttgcatctacttatgtttgtgtggtagctgactcggtatcaatcaatacgatgatcttgtgttagctaacagaagggatcagaccattcacaatgccgcttatgagactagcatgtactgcacttgaaagagttcctcttacgcgttcaaagatcatagaacatttatcgagaaagatacatcaagatctcgtctttttccgagcacctgaagataatgatctaactagtgacgtccatggtataatacactttctcttcaatttcaactacctcctagattttacacttattgagttgtgtcttttgcagatattcaggtagagagtattgatcctctacttgagtggatagagtcagagtttcgggtcaaaccgaaagtgtattctagcatcttcgggggtaaacaagacgacaagctagtgaaagcagtagaagaactgctcaagaaaacgaatgatggtgaactcgcaagcattgatgcactccaagcatcagctcactctatagtaatcgccctcggtatcttctgtgggaaactccagatcgatgatgcaatcaaattgattagacttgaagaagatttacaggtttcattttgtcactcacttagccaaaatctattgctttgacattctataaaaactaatctttgtcgcatgtttcatgcaggtggacaaatggggactagtcgaaggcgggcatgacattgatgttgctgatctcaaagttcagatctcatcagctacagtgtttcttgctctatcccgtgaaaactga

SEQ ID NO: 176080 - DNA, 790 bp, Arabidopsis thaliana landsberg
gactctgggcaaagaccaaagaagcctagttctgcagtaaagtccagagagtcttctaactcaggagagaaaacaaaaaagaagcataatccagaggagaagtccaagaaacttaattcagaagagaggtcaagaaaaacacattctgaaatcaaaaggtctgtgaaagctttgatcaaggcacttgtaatagaggacaagtctaagaagaaaggccgtcaccaccgtagctgtacttatcctgtccagtcaaacacaaaagagaaggattcattgagtgaggttggatcttcagataagaactcttcaaatggtgatgaacgtaaccgtgtctttaacaagacggttggcatttcacccgcggttggttcgttgaacccgctttatctcatgtctgaggaatcaagcaacagtgacagtgaagagtttagagtagataacaacattcaagttgatgataacactgatggaagcaaatcagattttgatgacaaagagttcaagaaaaaggagaagagtgatgatgaggaagcttggtttgacccaaagatgagacacaccaagggcttctcagaaaatgatgatgatacatcacctagaaggtcaaaagcatgtcttgatgctcttaacttgatacacatgaatagaaacttcttgttaaaggtattgcaggatccgggttctcctctagcccggcatttccagagccaacaatcttttagctccagggcaatgactaaagctggatccattccccctcatcgtatcaatagagaggatcataatcagg

SEQ ID NO: 176081 - DNA, 221 bp, Arabidopsis thaliana landsberg
atgaaggctacatctcggaccatccacgggcgaagcaaggatgccgctcgcatgaccttgaaccgggcacatcgtttaagacactcacgctaccagtcacccacaaatgaagagctcctttcccgaaaaagtgtgattcgcttgccaactgtctgcactgaatcggaggataacatcgtcggacgctttcgcccaaaaaggctacccctagagtggatcag

SEQ ID NO: 176082 - DNA, 141 bp, Arabidopsis thaliana landsberg
atgcacaagggcaagcgcgtgaacgccgtcgtgcaggtgaccaagcaaggttacgtctttgttctcggccgggttaccggaaagccgctgttcccgatcaaggaaactacattcaatttcccggccatcgaaggcgagaaa

SEQ ID NO: 176083 - DNA, 139 bp, Arabidopsis thaliana landsberg
gtctccgggtgtctgtttcatgggcatccccttcagtgatcaagctcgaatcgctgatgatcgaactgctctagctgagttgattttgaaggaatccctcccttttcctgtgctactttccgaaaaagaaattcccaag

SEQ ID NO: 176084 - DNA, 4775 bp, Arabidopsis thaliana landsberg
  unsure (1)..(4775): unsure at all n locations
atgccaagtaatgatgtctcgtgccaagaaccaccaatccctgatgagaggacagttggggccgcaaatgaaaacggagaacaattggtgatccaaactcagaagcaagatttgatgtcaactgaggaagatgatgcaatctgcaaacggactagagctcgctattcgcttgcgagtttcacccttgatgatcttgaggcttttctccaggagactgatgatgaggatgatattcctaatgtcgatgatgaggaagaataccgcaagtttctcgctgctgttttacatagtggtgatactgaggttcccttggcacagactggaactaatgatgacgatgatgatgatgatgaggataacgatttagacttcgagatagaacttgaggaagcgctggagactgatgacgaggaaataatacctgaaaaggtcactacaggtgacaacataagcactaagcgacgtcctgtgactaggcagaagagacggcaaaatatctccattcatcacaaaaacaattctcctgaacaggctggcagattgttacgccctcttgtacctatcttacccattgcaccacctgagagaagggtttctgctactgaagcagttgcttcgtcagaaaacaggacaataaatggcttcactcaagcccaaatgggagaactgcattctttgattcatgatcaccttcaacttcttatccaagtgtactctctttgtgcacttgatcattcacggcaaagcattggaacccacgtccaaggacttctatctgagatgctcaaacaacaccaaggatatatctcacgccgaagtcatcttcttgtcactggttcagcatcatcggttcttgatgttgtgggtctagctggaagatatctagttgatgtttctgacggtatgttattagtgaaatagggtgctatatctccatgttttcttatctgtttatacaatataattctcttgattattgaatcattgtagctgtgcaagattatcgacggtgtcaagtggaatccggttttgatacttcgtctcaaagagtgccattatttacacttcctcaccaagaagttggcggtgagattgtaaactatcctctttcatcccctagttcaagtaagtcaccatcaggtcagcagcaggctaagaagacgttagctgctacactggttgaatcagcccagaagcaatctgttgccttggtccataaggatattgccaagttagctaaaagatttatgccattgttcaaagtatcgctatatccccacaagccacctcatgcagctgtcgccaatcgggtccttttcactgatgctgaggatgagtaagttccttcctttttcttggtctactctactaattttgtcgaaaatttattcctagtgctgtttgaatgcagattactagctcttggaataatggaatataactcagactggaaggcaataaagcagcggtttcttcctagtaaaggcgagcatcaggtaatcatcactggattcctgcagaactaggaatggtttttcggttactaagtaatcagttggtgttttattggattgctgtcattatcgtagttcgcgtaagggttattctgaccacagtctctgaagtatttagataaaaatatgaagattttaaaattcagctgctatcttgacaaaaacttctcgtccatgcaattcctgttgcagatgatgtagttctttcagttttctgctttcatgccagaaacttatggattggtgtactgatcttttcaatattttaaccatattaagttntatgtagacatgtccaagtgctcatcaaccaggctgatgatcaaggaataaaagacttgtctcttctaatactttcgacttgtatttgtttcagatttatgttaggcaaaaaaaccggagatcatctagagccccagaaaatccaattaaggtctgttatatgcttgagttggtttatcaccttttttatttgtatacttatatttctatctatcagctccataaattcagttgcctgaacttgtttgttgacaaataagcactgtgaaaccattacgtctatatgagctctaccatgcacgcaaaataaatcagtttacgaactcattgtcataaatgataacgttggatgaccatcttgtatgcttttataccgaaaatgcattatgcaaatgaacattacatgtttaaggtggacaccgactgtccccagtaagatgcctcaaccataattttaaggttatgcaggatatttcccctaactcgtgtgtatgtgtatattttgccacacaggcagttctgaggatgaaaagctctcccctgacaccacaagagatactacgtatacaagaggtaatttgacaagcgcacccttttgcaattctgattggaaattgtacttgggtgctcaatataagtttgaatcctcagggacttaagtacttcaaatatgattggacgtctgtgtggaaattcgtcgtgccttaccgagacccatcattactgcctcggcaatggcgcactgcccttggaattcagaaatcatataagctagatgctgtaaaaaaggagaaacggagattatatgatacaaatagaaaattcagagagcagcaggcatctgcaaaagaggtctgtctttcatatctctggttatctctcaaatcatacaactcatccatactgaatatgttagtttttcgctttttcgtaaaaaatgtaatttagctttactcatcttttcatcgcatgttgcaggatcgttatggggcttctaaagccaatgaatatcatgttggtggtgaattggtcgagagttcaggtgaggcatacctacatgaaggatttttagcagactggaggcctggcatgccaacctttttttcttctgcacctatgcactcctttgacaaggcaaaggatgttcccggtgatcgacatgagtcagtgcaaacatgtatcgttgaaggatctaaaaatcctgaactctgtggtgcccaaatcctgacatgtacgcagaggcttgcaccttcattcattcctatgtaccgccacacatctggtacagcacccggtgcctcaaaagcaccgataattgcgcggccatatcgttctcgtaaagtattcaacagaagtgttgtgagactagcccctgatttacctcccgttaaccttccatcgtcggtccgtgttatctcgcagtctgtttttgcgaagaatcagtctgaaacatcctccaaaacttgtatcattaatggtggcatgtcggatgtttctgggaggggaaatttcggtattgaaactccttgtttttcagctgacagagataacaacggtcctcctagcgaaaaagtggtagatttgcaggaagatgtgcctgccgagagctcctctgggatggacaagcggagcaatgactcagatcttcaaatgcatcctttattgttccggacccctgagcatggacagattacatgttaccctgcaaacagagacccagggggttctagttttagtttcttttctgaaaatcgacctcagctgctaagtcttttcaacagtccaaagcaaatcaatcactcagctgatcaattgcacagaaattcatcatcaaacgaatatgagacagcacagggcgacatctgttttcatcctcttcttcaaagaaccgagtatgaaacgagttatgttattagtagacgtgggaacttagacccagatattggtaagaaagacaaattatgtcaacttcaggatacttctggtgctgttgagaagactgcgatccctgttactggtcgtaatgatgtcagcttggaaccttttagttctagcacacctggtaaaaatgtgaacttagatatctatctaagtacaagctcttctaaggtaaataatggtggtagtgtctcagcagcaaatatttcagaagctccagacatctgcatggctcaacttaatgatggctctgaagtacctggatcagctccaccaagtgataatattagtagatgcattgaagagatggctgatcaatctaatctaggtatagtgatggagcaggaggaattaagtgactctgacgatgagatgatggaagaagaacatgttgagtttgagtgtgaagagatggctgattctgaaggagaagaaggctcagaatgcgaagaaaacattgaaatgcaagataaggtaagtttttttttttttccagttatgtacaatacccacagagctgaattatttgtttcgttagtttcgtttgtctcaacttaggctattgtgacaataagcttcaagtatatatggatcctaatttccagtagatatagagatttcctctttcttgtgtagttatgtggcttgtggatgatcttggtgatgcattaacttttccatctacaggataacagaaactctgtggtagaaataacttcaacagatgtcgattctggcaaagaactaggcaaggattctccaaacagtccttggttgagtctggatccgagtagccgtcgcttaagcagtaatgttaaggacagagagaagatagaggcagcaaatgaaacgaccatctcacagtttggtcctagtagatcacgcaaaaaagggacaccagtgaagagcagagatgcagaatcaaaggaagaagcaggagttgctcggttgagactgggtcctctcgccctccccccaatgaagaaacccagaaaatgtggtgggcaggcggaaacaagtccaagtattgagacaacctga

SEQ ID NO: 176085 - DNA, 91 bp, Arabidopsis thaliana landsberg
atgggaacactcttcttcatcctcaaaaggctcaatctgcttaggatctcggagcagcatgaaatgcaagggatggatatgacacgtcacg

SEQ ID NO: 176086 - DNA, 79 bp, Arabidopsis thaliana landsberg
atgggctacgccgcaagctacgctacctcagcattaaatacggatagggcgcaccgcctgtccatcccgctgacaggcg

SEQ ID NO: 176087 - DNA, 744 bp, Arabidopsis thaliana landsberg
gataacaaagagacgagggaggacgttggtatctgtttgactcgcaataatctagggttaggtttttggtggaacgacgagagccttgccagatcggagaatcctcaagagattagtgaagcgatcgattctatgcggacgctgttgaggaatctcaaggaattgcgtgcggatgaagctttagcctgtaatcaagctttcgttaatgatcgcgaggacctgaagaacaacgacaagtgcgattttgtttcagaccacgaaactcatgatcaaaccctaattcttcagtccgcttctccaatttgttgcatcccagaaaatctcaacgagattactcaagagccaaatcaaaccctaaatattcagtccagtacttctgcaatttgttgcgtccctgataattcacctgaaaatttcaatgagatcactgaagaacaagatcagattcgctcgatttgtgaaactttttgtgttacggataacaacgctgctttacctgaaatgaacctggattacgatcaagacattggcttcgacacgccttttgagagcgcgctaaatgattggttttcggacaacactactcatcaggagattagtgcaagtattttgaacgctgttgttgatgatcaagtctcggtggatctaactccgttttcttattttcagagatgtttggatggagataatctacgattctctgattgtttcaaagactttgcaaacactatttcagcactttga

SEQ ID NO: 176088 - DNA, 505 bp, Arabidopsis thaliana landsberg
atggggaagaacgagaaaacatctctaggtcgagccttagtgaagcaccataaccatatgatccaggaaaccaaggaaaaaggcaaatcctacaaagatcaacacaagaaggttctagaatccgtgaccgaagtcagcgacatcgatgccatcatcgaacaagccgaagaagctgaacgtcttttcgcgattcatcacgattccgcaactcctgttcctatcaatatgtgagcttctcgattcaatcattcttgtgaaattggagatttgcttgtattgaatcattttttggtttgtgattatgttatgtaaatagggatacaggttcgagttcgagtggcataacagctaaagaatggaaagagcaaaggatgagagaagaggctttacatgctagtagtcttcaagttcctcgtagacctcattggacacctaaaatgaatgtggagaaacttgatgctaatgaaaaacaagcttttctcacttggcgacggaaacttgcgag

SEQ ID NO: 176089 - DNA, 115 bp, Arabidopsis thaliana landsberg
atttgtacgtctagtagtcgtctttcgaacacccgagtttgatttatttgtacgagaaggagaactttgtccttgttcattagtagtgggtatcgatgatggaacaattcattga

SEQ ID NO: 176090 - DNA, 195 bp, Arabidopsis thaliana landsberg
atacaagcacagagagtatcgtttaaactgctaggagatgtagcagcttttacagatgagccagcagaggctgttgatttgagcagccgggcgtctccttttgctgcaggactgtctttagcaaacaggatcaagctatattactatgcggatccttacgaagtaggcaaatgggctagcctttcaagtgtctga

SEQ ID NO: 176091 - DNA, 561 bp, Arabidopsis thaliana landsberg
gttattgtgatggatcaagaagtatagtaaatggttcagggatcaatgcttctattgctgggaagtctcttggcttctctgtttacttgaaagatgcttatggttatccctcaccagtccaagtcgatagacttcaggtccgaatcgtactagagattgattcctcaattattttgccaaccatacagccaagagaggctctcaatggtataaacatattttcctgatttgcttactttcagtattggttaatttcttcactggtggcttatacaatgatttaatagggactggatcaagtcaccaagctgctactccattgtacgagaaacatggcggaagagtaagtagattatctgcatttgtgcttatgcataccagattaggcctgtagacttaaggttgtttccatcttgcaggcttcaggcaacctagtgactcaagcgagtatttttgacgtaacttatactcctaaaaggactggaatttatagaatctttatatcatctggaaacatagtcctcaatggaggccagcctttcatcaaggaagtatatgcag

SEQ ID NO: 176092 - DNA, 133 bp, Arabidopsis thaliana landsberg
tgccataagagaaaatcaacagccttatccatgtggctttttgatgccgaaccggcaaaccgaaaagcatccaaagcttccagagtcggaccggggtttgaatgactggtatcgggccctcttccgaaactga

SEQ ID NO: 176093 - DNA, 115 bp, Arabidopsis thaliana landsberg
atctagttcgtataagaagacagagactggattcttctctcatcgatcgcaaagagtttctcgataatactttcacaacagtcgtacagactcgtcatgtaactctctcagctag

SEQ ID NO: 176094 - DNA, 662 bp, Arabidopsis thaliana landsberg
atggcggatctgaaagacgaacgaggaaatccgatatatctcacggacgcacacggggagccagctcagctcatggacgagtttggtaacgccatgcatttgacaggtgtggcaaccaccgttcctcacctgaaggagagcagctacacaggtccacacccaatcactgccccagtcaccaccaccaatactcctcaccacgcacaacctatttccgtgtcccacgaccctcttcaagaccatgatctccgctggttcggcaccagttcggtacgattaaatatctattacatagttgtattgagattcaatatctgtatcactcgtaagtaagttctaaaagcatgtgaacgcaattgtctaatagtttgcgagtagaaattctacatccatttcatttttatttatgtatgcgtgtatattattttaaaaattattatcaagattcactgtccatggtacgtataaaaatgtagacggaggagaatggcgaaggagtagggaggaaaactaatataacggatgaaactaaatcgaagctaggcgtcgacaagccatcagctgcgaccgtaacaggatcaggatcaggatcggttcacgagaagaagggtttctttaagaagattaaggagaaactttctggccaccataatgatctttga

SEQ ID NO: 176095 - DNA, 269 bp, Arabidopsis thaliana landsberg
atgcagatgcaggtaatactttcaaatcattcatggctggaagagcaacaatctcattatccaattttagccatgattgcaaaagacgttctttctaacccatttctacaatttctatcgagcgagcttttggcattggaggtcaaatactagatgaaactcgatcaagaatgaacccagattctcctgaagctcaagcatgtcttatgattggaccagagccggatatagacaaccggaattcctacgagataataaagaagaattag

SEQ ID NO: 176096 - DNA, 139 bp, Arabidopsis thaliana landsberg
atgaaaggtacgcactgctcggcttgcagcacgagtgtcccacaaccgtgctgtggaatcgcatgaaccagatataaaccagtttgggtttgatccactgattgagacgctgcaagaatggggaataatcaccaagtaa

SEQ ID NO: 176097 - DNA, 344 bp, Arabidopsis thaliana landsberg
ggtagatctattcccggtgtgttaccagaggccctttcaccagccgctaggataccccagatctgcttttcacgaggttagatatgtcgctcttctcttctccttcgtccccctggaatcgcttttccccgattcagggatgttctctggcgcctcctccagaccccccgccgaccaccatccttctcatcctcagccatcctcacagttcccaagacagttgacgatggaagaccaacacgggacgtggtgacgctttctccaacgatgaacaattcctcttggatgggccatttttctgagatgggcctgggcttctacatctattgggcctatggtgccta

SEQ ID NO: 176098 - DNA, 34 bp, Arabidopsis thaliana landsberg
atggtgaacggtgcatgtgaagagcttttgatac

SEQ ID NO: 176099 - DNA, 184 bp, Arabidopsis thaliana landsberg
atggaggcagaagttatggaagagattgcgagaagaattagagcgcaagcaataggaaccctaactccctccatctatagagagaaggatgagagagctagcagagaaagagagaaacgtgttatggagatattgaagcaacgagacttgtggttctacttaataatttatagaatgcagagtg

SEQ ID NO: 176100 - DNA, 129 bp, Arabidopsis thaliana landsberg
aaaaagacaaacatcttgaaaagaataaatttccgaaaacttaactctatttttgcgatcgagatggagactgaggagactgagatcggagacggagacaccgaaattgaagagacaggaatcatatga

SEQ ID NO: 176101 - DNA, 177 bp, Arabidopsis thaliana landsberg
  unsure (1)..(177): unsure at all n locations
atgaagaagacgaagaagaagaagaagagagtttattnnnnnnnnnnnnnnnnnnnnnnaaatgaattcgaaatcggcgatgattgttacgttaagagaagagaagatttgaattcagatgaagaagaagatcctgaaattgaagattgtcagatttgtttcaaatcagatactaag

SEQ ID NO: 176102 - DNA, 116 bp, Arabidopsis thaliana landsberg
ttggttcgaagcgctttgagcatcttcagactacgaagcttcggcgagtggaagttgatactcatctggtttcaatgccaaagcgaaatcaggaagtgttggtgctgtctccatga

SEQ ID NO: 176103 - DNA, 81 bp, Arabidopsis thaliana landsberg
atttatttgaggttgttgatcgaagagcaaaatcagtggttgaagatctttcagaagaacagaacgatttgcagttgccag

SEQ ID NO: 176104 - DNA, 405 bp, Arabidopsis thaliana landsberg
atgccaagcattagagctccagctgcgaagaagaccactacactcacggttagcaatcctcgtagaaaatttccggtttaattcgtctgaaaatttcttgaccggtttaattctctgtgttttccggtaggttgctgtgaaatgtagaccgttaatggagaaagaacgtggtagagacattgttcgagtgaataactctaaggtctcttcagaatttgtttgatttttctgatttcaagcttttttcgattttaaattttcgccctaattttttgttttcgattttaggaagtggttgtgttagacccagacttatccaaggattatcttgaccgaattcagaatcggactaaagagaagaaatattgttttgatcatgcttttggacctgagagcaccaacaag

SEQ ID NO: 176105 - DNA, 945 bp, Arabidopsis thaliana landsberg
gagttttttcggggaacctatctgtagaccttagcgaaggatcaaaatggaacatcagtcgaagtggtttctgtggaatgcgctcaaaaaaggtgaacaacacagagctttcatttatcttactaaccattcttattcaaaacatattttctgcatgtcagtctttgtttgaagaaaagaaggaaaatgggttactatatcttagtcctggttttgtaaacgagagactttttgagtcagcttactattgcaactaattctagcatcctctgcttttctagtttgatggcttcattgatctcgatgggtatgatgcaatagccctgaggatcagaggagatggaagatgttatatctctactgtaagttttatgttgatacgcacttttccctaactccagttgaaaaaacaaatgttgtaggagcaaatactaaaccttgattttgattcagatctacaccgaaaactgggtgaactcaccgggacagtcagaagataactcgtggcaagcttttgtttttgctccaaaggacagttggtatactgttaaggcaagtcctactacttctatagatgttaccaacaaaaagcttagagcattatacacatccttttttgttttttaactctctttagacaaaaccttcggctttagatgaaaacataaccaaaaagacggatctccattatgaatcaacttgaatatttcacttgtcgtctaaggcctattaataacctgatgttgaatatatcagattcctctagctcgatacttgccaacatggagaggaaatgttatagatgtggaaatggagatgaatccaggtcgtgttctaggtatgtcactgtccgtaaacgcagaaggtggtgcagttggagctaaatcaggagcaggtgatttccgagtagaaattgactggatcaaagccttgagattgccgtaa

SEQ ID NO: 176106 - DNA, 652 bp, Arabidopsis thaliana landsberg
gcttgacaaccttcaagaactacatgagtctcttgacaagcttatcagccgacctgtcacacaacaggctctttctcaagagcataacaagaaagccgttgaacagcttcttgatggatccctcaggatcttggatttgtgcaacatttccaaggatgctttgtcagagatgaaagagggtctcatggagatccaatcaattctaagaagaaagcgtggtgatctatcggaagaagtcaagaaatacttaacctcaagaaaatctcttaagaagtcattccagaaagtacaaaagtctttgaaggttacacaagctgaagacaacaacgatgacactttggctgtctttggagaagcagaagctattacactttctctgtttgattctctccttagctacatgtctggatcaaagacttgtagtaaatggtcagtcgtctcaaagctaatgaacaagaagaaagttacatgtgaagcgcaagaaaacgaattcacgaaggttgattccgaatttcaatccgaaaagaccttgaagatggatgatgttcagaacctagagtcatgcattcaagatcttgaagatggacttgaatcactttcaaagtcattgattaaatacagagtctcatttcttaacatcttaggccactaa

SEQ ID NO: 176107 - DNA, 280 bp, Arabidopsis thaliana landsberg
atgatcttcaggtacacaacagatggagggacaaaagaaactcttgataaaggaactgtccctgtagctgatgtctactcaggtaaagtatatgtttactctgcatccatgattcatagtaaactgaaataatggtctgtttctaacattgtgatataacaatgactagcaagttctttctcttgatagctgttgatttctctaccggtgatgatccttggccaatatttaaattgcaaaagaagtttaatgctccaggaagatcacctccactttcctc

SEQ ID NO: 176108 - DNA, 454 bp, Arabidopsis thaliana landsberg
ggcgacgggtggctttgagcggctgcgcgactgggcgctgctccagcgggattacctcgaccagcacccgtggctgactcagatgccgctgcccgggccgccgctcgcgccgaattccgcgcacttcgtcgagcacgcgctgggggccatggacggaaccggcctgtcgctcgccgacaagatgcggatggtcggcctgatcacgtccttcaccctgtccgatgccaagatgtaccacgacgcgcggcgagcggcagcggcggcggcccgggcgggcgcggggcagatcgcgggcgcggaacagtcggcggacgcggaacagtcggcgggcgcggaacagtcggcgggcgcggaacagtcggcggtcgcagaacagtcggctgacgcggagcagggggaggatgcccggcgcccggcggagccgtggacgtactggggcctgctgcgggaactg

SEQ ID NO: 176109 - DNA, 492 bp, Arabidopsis thaliana landsberg
atggttggaggaagaggaaaacctggaggaaagggaagacgcagtgtgaagaaacatgaagagaaagaagttgaacgtggtagagatgagtttttatcaaaatcagaaactcctcatccaaaaggatttcctccaatgcaagatctaagcaccaacgtggcctcactaatagaggtggattgcagcctatgaaggtaatgtagtagtatattgttcgttttttgttaattgttttcggatcagtatactttttcttcttttttcttaaggaattgtgggatgtaaaatatgttcacatccctaagaaattgagcttgaaaacggttcttgacaatatgaaacaaactatggctcaacgtgggttctacatccgatccgtagatgcttatgttcggaaaaggttcctcaccgagaacaaaccccttattaaacgtcttcgccgatcagacgtgaacataattgaatcacaagaatacccagaggaatatctag

SEQ ID NO: 176110 - DNA, 2501 bp, Arabidopsis thaliana landsberg
atgaataacgatttgtggttacctgaagaggacttcaagggtctaccggataatttccttgataatctcgttgatcctaccaatgatgtttctgtagaagatatagagaccggcgatgatgagggagattgggatgccaaatttcaaaagctcgtacctccaccattggatgagctaatgagtttgtcctatgagttcacttgcaatggacagcgtgtgcaagttcagaagcatgtgccaattttggtgagttcttaagcttgtatatacatttatttatgcatctcacttgatagagtctctatgaaatcaccattattcttatttgcattatgttcagatttcatatttagcattatgactttgttatgttagaaaacatgtaaaactaaatgatcatgctttacttgatagactattttactcattcactgcgcacgtatgaatttcggcattgtttggccagtattatatgtataatataacatattcttttagatataagccttgataaatttttccctgcatgtaagttagaaaagtgcgtgcaagcgaaccatgtctctatatattttacttattacattatgccatatttaacagcacgcatttgagttaggaaagtctgtctaattaacagaaatatactttccccttcaagctttgatagctttttatcgagtaaggttagataagagcgtagaatagtaatcacacttatattccattacgtaaaatagttttacacggtgacaacacaagtttttttagggcaataatttagtataatatattacatcattgttcagattcaaacctcaatagtttttttaccacataactcataaggttggaaaaatgcgagaaaaagggaatccactttgcatcattgatgcaacttgatatattgttcacacaatcacatatgtgcatattaaaaatagcaattcttttggattcaagcttcagttgaatttatcgtataggtttcgaaattgcgttaaaaagaattactcatatttgcattaggaaagtgcatcattttgtatctgaacttcatttatttacgttacttgatcattcacacatattaggtcatgtatacaatatttatttcattaagaaagaatttggtatattgtctgttggattcaagttccatagatttttgctgctttatgttagaaatgagtgtaaaagtcaaagaatcatgcttgcgtccattatcgatgctactaatgtagattgcatatgcatttatttttttactctttatgcatcagttattgctttactagattatcaacatgtgtacacaatcatgatgcatttgcaagaggaaagttattttgtgcagtactagcgtaatgcgtctattgagtgtttatgttaagttttgaaagtatacaagaaaaaggattgtgcagtgtcttaggtctttcactttagcttgttatcttgagtcaaatgtacatggatttgaatggtttccagtttggcaactgggatgtggtaatagaggtaagggtgttgagtttgtgtaatggcttagggcctttgtggcaaggatatttttaggtctctcttctatatggttagtgtagttattgagagaggaataaagttgttctcaaaatctatccatgtatatatatatataacataagaatggttaggcattagtagatcattgccaatcttatatgatattcgttgatctatatgaaatcagtcgtgatcgattagtataccttctagatgggtccagtaagttgatatgtggtttaagtgtatggatctctttgtctgaaggagtctagactcttcagtgtttgaactcatattctttgtctttgattttgcgcgtgcagaagcagtcgagttcttcagaagtcttctgtactgttgataactcccctcctaatgtcaaagtctcaaagttgttgcaatctttaagcccagtctcagtcctcaagaacaccaacggttttggctcaccccaaaacccaaacggagatcagaaactggcctttctcgtgaaaggcatcagaagcaagcgcaaacgccccacactaatgagagttacattcctcaaatcatttctattagagatgtcacagcagtttgctccggatgaatctgaatcttctgagatttccgccttgaagaaacgcaagaagaacaagagtcgtcgcttgaaatgcactcattgcgagacaaccactaccccgcagtggagggaaggacctaatgggcgtaaaaccctttgcaatgcttgtggaatccgctttagatcgggccgtcttgttttagaataccgtccagcagcaagcccgaccttcatcccaaccgtgcattcaaatttgcacaagaagatcatatatatgagaatgaaagataacgaccagtttgataccagaaagatccgtgctgagacatccggaccagagactagatcaaggcttcgtaacttcggcagaccaatgagttatggtcaatga

SEQ ID NO: 176111 - DNA, 210 bp, Arabidopsis thaliana landsberg
gcgggaaagagcacgagttgccgattctgctgtcggaaatcaaagaaggcggcgccgtcgaccgctccaaggcctgctttgtgggcgacgaggtgctggaggtcaacggcgtcaacattgagcagctcgaacacaacgatgccggcaatgtgctgcgctctaccttggacgactcgcgcgtcagcctccgcgtccgatttttccctgccg

SEQ ID NO: 176112 - DNA, 889 bp, Arabidopsis thaliana landsberg
atgaatgttctaggttccaagtgggtttttagaatcaaactcctagcagacggatctctagacaagtataaggcaagactagtagctcaaggcttcaaccaagaagagggaattgattaccttgagacttacagccctgtggtcagatcagtccgagcagtcttgcatcttgcaacaatcatgaattgggaactgaagcaaatggacgtaaagaacgcctttcttcatggagatcttaccgaaactgtgtatatgaaacaaccagctggttttatcaacaaggccttaccaaatcatgtgtgcttgctacacaagtctctctacggactaaaacagtctccacgagcttagtttgatgaattcagtaacttcttactctcttttggttttgtgtgcaatttctcatatccatctctctttgtctgcgtaaagaactcggatgttatcatgttgcttctctacgttgatgatatggtcatcactggagacagctcaaagctactgtcaaatctcctcaacgaactcaacaaacaattcaagatgaaagatctaggcaaactcaactattttttgggaattcaggctcaatttcatcaaaagggtctcttcttatctgaaccaaaatatgctgaagatctcctcatcacagctggcatgaaagactgtgctccagtggcaacaccattaccaattcagccagacaatgctcctcatcagtcagaactctttgataatccaacatatttttgcagtctcgcgggaaaattgcagtatctgacactcataaggccagacattcaattctctgtgaaatatgtctgtcagaagatgcacgctcctacgctatcagatttccacctgctgaaacgcattttaaaatatatcaaag

SEQ ID NO: 176113 - DNA, 764 bp, Arabidopsis thaliana landsberg
atgtcgaatacaccaaaagacggcgacggagcacaggtaattacaggcggcttgttccccgtcttccctacttcggcgaactccatctcagctattacgaatgctcctcaatggcttcgcaacgctagatatcaaaacggatctctctgtcatcaacgctgccgcttcgacggctccttcctcatccgaggtcgaggctggagacgacgaagatgaagaacgaggagctgatggaaatatcggtttagctaatcaggctagggtttataatttggttgaagaagaagggtctttggagtctgatgacgacaaggtaaagaggaagcgagagaaaaagaagaaacggaagagtgataatgcttcggatgaatctcgttctcgtaaatctgatgaatactattcgaaacctgtgaaggattattacttggacactcgtcctgatccagataatctggcttatggctctatttacaggtactttgcttataatttgtctagttatggttggtttcattttctgtattctgtgcaaggcgttttaagagtgtagggatattgaaattttgcttctgtttgcataatacaggatgaatgttcctcgttataaacttgacaattctcagagagttccagggtcaggttctctgaggttttatttgcggaatcgacgtagttctatgcttgacacagagattgatattgattctttggaggggagagcaaagtctgatacccgatactggtatgcaaaacatgctgccatg

SEQ ID NO: 176114 - DNA, 433 bp, Arabidopsis thaliana landsberg
caacgctccgagtaaagcgggttggctcttacgggatgatcgaggaacctttctaggtgcagctcatgctataggctctattactaccaatccgatggaaagtgaactccaagctttagtcatggccatgcaacattgttggagtaggggctataggaaaatttactttgaaggtgacaataaagaagtctcagagattgtcaatggtcggtcttcaaattttgcagtttttaattggataagagatataagcgcttggagatcaaaatttgaagaatgcaagtttacttggacaaggcgattttcaaacatggctgcagatgctctggcaaaacaacaacttcctttgaacactcagttttattgctataactatatcccgtttgtaataactgattttttacatcgcgactttgctacagcaaattattaa

SEQ ID NO: 176115 - DNA, 84 bp, Arabidopsis thaliana landsberg
atgctactctctggggtaacatctttgagccccgttaggtggggcattgcactcaacatcctcgcttatttcgtcgcggctcat

SEQ ID NO: 176116 - DNA, 836 bp, Arabidopsis thaliana landsberg
atgaggcaggcaaagacggctttccctggacttggtgcacctgttactcatgtggatgctacattcgatgggaaatggattgttggtacaactgacacatatttgattgttatctgtacccttttcactgacaaaagtggcaaaacaaagaccggcttcgagggtcgcatgggaaataagattgccgcaccaaggttgcttaagttgaggcctcttgatgcacatttagctggatctgacaacaagttccgcaatgctcagttttcttgggtaagcagaactctagttgcagtgtatattcttgctgagaaagtgacattcttgaaattttcatgttttgctcatagcataagtgcatataatattgaagtcttaagaatttttgtggaaattgaattataatgttcctcagttgccttgtgtttcaaccttgatttttgatagaggaacttttactactgttgaatcattcatcaattgaaataactttttactaatagttgattcctgactctttttgtctatcttttcttgttgaaaatttcgatatataggtcacggaggatgggaaacaggagcgtcatgtggtagcaactgttggcaagttcagtgtgatatggaactttcagcaggtgaagaatggatctcatgaatgctaccatgatcaggaagggctgaagaaatgctactgctacaagatagtccttcgaaatgaatctatagtggacagtcgcttcatgaatgacaactttgcaatctctggttcacctgaagcgcctttggtcattgcaacgcctatgaaagtcagctctttcagcttatccagcaagcgatga

SEQ ID NO: 176117 - DNA, 518 bp, Arabidopsis thaliana landsberg
ggtaaggttgttccggatggtgagaaggaatttgagcattgtgagtatggctcagacatagctacaagttatggagctggtgcatttgtgcttctcttcattagtcaagtcattattatggtggctagtcggtgtttctgctgcggcaaagctcttaaacccggtggttcaagagcttgtggcattatgctcttccttatttgctggtaaaactctatacttaaacacaatctctataatttatgactttgacttgacacatcattctacacttggttttgaacagggtgtttttcttgattgctgaggtatgtttgctcgcgggatcaatcagaaacgcgtaccacactacgtacagaaggatgtggaacatcgaaaaccctcctagctgtgaagtgatccgtaaaggagtgtttgctgctggtgcttcctttgctctcttcactgctattgtctctcagttctattacatctcctattctcgtgcccgagacggttaccaaaccccacattactag

SEQ ID NO: 176118 - DNA, 158 bp, Arabidopsis thaliana landsberg
aaacatctacccggtcccgctttgaagataaacccattgattgggtttatcgatttgctgaaaatttgaggaggctcaacgcacaactcatccagtttagcttccatcaacatttccttactgtgtacttgcgccagacctctacttcccgctcttag

SEQ ID NO: 176119 - DNA, 407 bp, Arabidopsis thaliana landsberg
accagtcggtgattgacctggccggtggcaaggtttcgctcgtcggctcgttcctgggctcaactggcggcaccccgtacctgaccatggagttctacaacggaaacgaactgatctccagccaggtggccgagggtgacgtgttcaactcgaccacatggaccaagtccgcagccacgttcacgatcccaacagatgtgcagataacgagggttcggcctatcgtgggcgctaaggaccgagcgataaacgacacagtgtcgttcgacagtgtcggcgtcatgctgggcgacacagacacctaccgtcccggcaccggccgtgacgcgcacccgatctggtccaaggctcagatccagtaccaagaggacgacggtactggatatggcgactggacgaacctataa

SEQ ID NO: 176120 - DNA, 240 bp, Arabidopsis thaliana landsberg
atgatttccatttgttattgcagacttgagaatctttatggtggaaaagcttatgtaggacttggaattccagatgccgacactgcttctagacaagacattgatgttgttcttgttactaaaggagatgttgtagtgatttctgtgaagaatctatcggggattgttacggtaactagtgatggtagctgggtttgtgaaggtggcaagcatcatactactgagactttccctgatcct

SEQ ID NO: 176121 - DNA, 198 bp, Arabidopsis thaliana landsberg
attcgctgtgggatacgggctttggcctccatgcccaattcggcccaaacacaaatagaccaagtcaagaaagctcataacaaagaagaacggcccatcagaacaacggcccatcagaatgactactcggcccatcacagctcggcccagcccgataaattcagaaaggcaaaaaggagaaatcgcaagagagactaa

SEQ ID NO: 176122 - DNA, 254 bp, Arabidopsis thaliana landsberg
ctattgctgtatcccgagatcacaagcctgatcaaagtgacgagcgccaaagaattgaggatgcaggaggatttgtcatgtgggctggtaagaaaacatttaactgaaactctcttcttatttgtgcttatataatttgcttaattggaattatactaaaaggaacatggagagttggaggagttcttgctgtttctcgtgcattaggcgataggttgttgaagcagtatgttgttgctgatccggagatacag

SEQ ID NO: 176123 - DNA, 150 bp, Arabidopsis thaliana landsberg
catcgaatgcaccggacatggtctgcacgctgtcaagatgccatcagaaaacgacaacaatgccgccggaatcaaccagacgacaacaacttcttacgtctgaccgagaactacgtcacattaatcatcatcatcactacacaagattag

SEQ ID NO: 176124 - DNA, 235 bp, Arabidopsis thaliana landsberg
tgtcgatgttgagtttgatgttgaaggagtgaccaggagaggcgttgttgttggtgtagtaggcgtatttaattctgagacaagcgactccaaaacacgtcttacatctttagatgtgaggcctatacatatcatctccatccaagcatttcatcgattaatttcttcagtcttggattcgtctcgcttggaagttcaggcctttgtccctaatgaacacatgaccgcaatttag

SEQ ID NO: 176125 - DNA, 1451 bp, Arabidopsis thaliana landsberg
ttgaattcgacactgtgcaggccgttgagttgaacgatattgatgataaccatgttggtatagacctcaacggagtgatctccattgagtctacctccgctgaatattttgatgaccgagaggcaaagaacataagtttgaggctggcgagtgggaaaccaataagagtctggatcgaatacaacgcaactgagacgatgctcaatgtcacattggctcctctagatcgtccgaagccaaagttgcctcttctctctagaaaactaaatctttctgggatcatctctgaagaaaattatgttggattctctgcagccacgggaactgtcacgagctcacattttgtgctaggctggagcttcagcatcgaggggaaagcatcagactttgatatcacgaagcttccctctcttccagacccgctacctccattgtctccatctccgagtcctccggtttcagtcatgaaaaattcgagtaacacgatgctgatcataatcattgctgcatcagcaatatttgcaatcttgatcataagcttcttaacggtttgctttttttgtagaacggaaaacttcaccggaggcgcacggaaattctcccaccagacgatttccagcgcgacgggaggttttgacaactctaagcttttgggagagggaaactctgggagtttttataaagggcaacttgctcctacagagataattgccgtaaagagaattacttgcaacacaaggcaagaaaagacagtcctaatagccgagatcgatgcaatctccaaggtaaaacaaagaaatcttgttgatctacatggttactgcagcaaaggaaacgagatctatcttgtttacgagtatgttatcaatagaagcctagaccggttcttgttcagcaacgacctaccagttctcaagtgggtacaccggttttgtattataaagggtattgcgtcagcacttcaacatcttcacgctgaggttcaaaaacctctcatacacggaaatgtcaaagcaagtaacgttcttttggacggagagctaaacgctcgactaggagactatggacatggaagcagacacagcactacgggacacgttgcaccagaactagtcaacacgggaaaggctacatgtgccacagatgtgtttgaatttggagtgttaatgatggagattgtttgtggaaggagagccatagagccgacaaaggaaccggtagagatcagtttagtgaactgggtgcttcgaggggtcaagagcggaaatctcttaaggagatgcgacaaaagaatcaagaaaaagaatttagtctctgaagaagtgatattggttctgaaaacaggacttctctgcgtgagacgatctccagaagataggccaatgatgaagaaagtgttggagtatctcaacggtacagaacatctccctcatgatgactacgtcgtctaa

SEQ ID NO: 176126 - DNA, 452 bp, Arabidopsis thaliana landsberg
gaagactccgagaagattcgcgagtattatcaaaagagcggattcaaccaagtctcggtcaactataccatcgagcgcgatcgcgcgacgggtttcggcaccgtgaccttcaagatccacgagggcgccaaggtgaagatcgccgacgtgcgtttcaagggcaacgtccacgtcaaaagcaaacggctccgcaaggaaatggagaccaagaaatggtggatgttctcatggctgctgggcaccggccggctcaagaacgacgagttcgacgacgatctcgacaagctccgcgactattaccgcgagcaagggtacctcgacgtcgagatcgcgccggaaaaagtgtccttcgcctatcccaagtccggccgcgtggtcatcaccatcaccgtttccgagggccgccgctaccgcatcggcaccatcaccttcccgggcaacaaaatgcatcc

SEQ ID NO: 176127 - DNA, 123 bp, Arabidopsis thaliana landsberg
accccaaaacgggttctatcaaaaaccgaaaacctagatgatgaagcagaatcagaatcagaaagacagatacttttaaatgagattgaaaggaaacgattagggaatatttggtccatctga

SEQ ID NO: 176128 - DNA, 264 bp, Arabidopsis thaliana landsberg
tccaagccggtcgtcaagacgctgggcttcgcggtcggccatgtcagcctgctgctgagcgtcgtaagctgcggcttcgccttcccggtgatcagcctggcgcgcggcttcttcgattcggcgcccggtctcgacgatgcggtgatcaagcggctgggcgagaccgtgacgcagcggacatggctctatggctgggcgtggcggctcgcggtcgccggcggcctgggcttcgccctgctggtcgcgctggcgacgattcattga

SEQ ID NO: 176129 - DNA, 135 bp, Arabidopsis thaliana landsberg
gtggcgacccggaagatcgaagcccttcgccatgagcagaagctgctggcgcaggccacgccggggcagccaccgcgtggcacgttcttcggtcagccgcaaagctactggcagagcctgaacgactaccaccag

SEQ ID NO: 176130 - DNA, 495 bp, Arabidopsis thaliana landsberg
atggtccgagattcttcagtagtagcacctggctttgttcccagtgaacttgatgaaaggatccttcttgaacttccaacatctatggtccggccactaagggttgtgaaaggaacctttcaagtatgttagaccaacctgaatgttttggattttctacaagtagctaacatgaaaagagaggaaaaattggatataatcaactagattagttagattggttagatccaagtgaagtcaagaattgtggcatgtagacatcatagaaaaccagaaattggcttatgtttccaaatatgcttttcttgtatgacatttggattgctgattatacctgctgtgcatttctcagattacaacacggagaataaattttattgttgacaacagagaaagccagaatttggctgatcactcagatgagtcccaatcaggtgatcaagaaaaggatcgtagttggccaatgtcttctcttcatcagatttatagccggag

SEQ ID NO: 176131 - DNA, 349 bp, Arabidopsis thaliana landsberg
atgcatttaggcaactttcgaaaattcggactcttgcccgtggccgatgtccttaagcgggtcactacattctcctcctaaggattagatggtccggcttcatcctctgtaatttcctggttcgaaaaactgtggatattttgttcggaacttttcctcatctttccaggtagtaactttacgattttgccttcccagaacacttgaatttgcggaatccttctattctttagtcccgcattcgtctttcaccaatgccaagagggacttcgggataggtgagattcgttctttactcttgtatcggctcgagtatgataacaataggatccggaacatgcttccttaa

SEQ ID NO: 176132 - DNA, 335 bp, Arabidopsis thaliana landsberg
atgaggtgccctttttgtaaaactcccaactatgctgtcgagtatcgtggagtcaagtcaaaggaggaaaagggcattgaacaagttgtaagtcttaaaatttccacacaacataacttttttctagataagctttgatgaaatggtgctttactcaagtggtatattctgtcactgtatctttttgcaggaagagcaacgggtaatagaagccaaaataaggatgaggcagaaagaaatgcaggatgatgaagagaaaatgcagaaacgtcttgaatcatgttcctctagcacaagcgcaaagactggcgagatggaatatggttcaacttcag

SEQ ID NO: 176133 - DNA, 976 bp, Arabidopsis thaliana landsberg
atgcaggctgaaaaagaagctagcttagcattgtttgagaagaatttggagagactatcaaatctagaatctgaagtatctcgtgcacaggcagactcaaggggaattaatgacagagccgcaaatgcagaagctgagatccaaacgctcagagaaaccctctacaaactagagtctgaaaaggaatccagctttcttcagtatcataaatgcctgcaaaagatagctgatttggaagatggactctctgtagcccataaagaagctggggagcgagccagcaaagctgaaactgaaactctcgctttgaagcggagccttgccaaggccgaaactgacaaggaagctgctcttattcaatacaggcaatgcttgaatacgatatctaacctagaagagagactaaggaaggctgaggaagatgcaaggcttatcaatgagcgggctgaaaaggctggggtagaagttgaaaacttgaagcaaacagtctcgaaattgatcaaggataaggaagcttctgaacttcagttccaacagtgcctgaatataattgcgagtctaaaagtcaaactacaccatgctcaagaagaaacacagagtcttagccatgaaatagaggatggagttgctaagttaaagttttctgaggagaaatgtcttttgcttgagagatcaaatcagaatctccactctgagctggatagtctcttggagaaactggggaatcaaagtcagaagctcacagagaaacaaaccgagctagtcaaattgtggagctgtgtgcaagcagagcatttgcatttacaggaagctgagaccgcgtttcaaaccctacagcaattgcactctcagtctcaagaggagctaaataatttggctggggaacttcaaaccgtgtctcatatcatgaaagacatggagatgctaaacaatgagttgcatgaggaacttgagcaagccacggttgagaacaaag

SEQ ID NO: 176134 - DNA, 288 bp, Arabidopsis thaliana landsberg
atgagtgatttcaaaattcaaatgaggaaaatcacggagcttgtaggcggatttcccgttggcgaatatatcccgtgtatggcctggatcgataaacttcgcggtgtggatgaaaaagccgaggaagtgagtaaagcatttggagatcttatggaaaaagtgttgcaagagcatttagatgccaccgataaaccaacactggatttcgtcgatgtattgctatcccttgaaagacacgagagaaatggagtacaaattcgacgaagcgacattaagttcataatcttg

SEQ ID NO: 176135 - DNA, 97 bp, Arabidopsis thaliana landsberg
ggtaaaaggggaaggctttttcatcagtgtcctgcgcaaaaagacgggcggcgatacattcagctaccagcgcttcaaaacggcgcaaaacaaactg

SEQ ID NO: 176136 - DNA, 426 bp, Arabidopsis thaliana landsberg
atgagttctgaagtcgaaccaccgcagaaaaagaagcagccgtggcttccagattatatcgttgagaactgtttagcacacatatcgagatcgtactacccgaaactctccctagtctcaagtcctttcgctctctcgtcgtatccaaagagctcaacaaagcgcgatatcgcctcaacaaccgaagaatacttcttccacgtctgcttacagcttcctaagagtcctcttccaacctggtacacgctctggataaaacctgatcagatcgagaagaagaagaagattaatacgtttactggaaatactcggttggtacaaataccatcttcctatcattatccttttgacctagtgttcatctttaatctttatggtgctatgcgttcatccaaggcaatggtccgtcccccttcatatgggttg

SEQ ID NO: 176137 - DNA, 118 bp, Arabidopsis thaliana landsberg
atggtcgagtccgacttcaaagtgtgtcgagcggaagagctgttccgcactgttattagagaacagctttcccgtattgaagatgccgaccgattctggtttgagaattcacagaatg

SEQ ID NO: 176138 - DNA, 193 bp, Arabidopsis thaliana landsberg
agctgaaccatcgaagggttactcctggagctgtaccaaatggaactgtaccaccaggagccacacgatctccaagtcctgcatcttcacatgcaaacaactacagccaaagaactcttgatgcattgcttagtgcttctgaaagagaatcacagccacatctgcaccctagaaagcttaatggagctttatg

SEQ ID NO: 176139 - DNA, 236 bp, Arabidopsis thaliana landsberg
ggcacggtgaagagcgtagtaatatatatgaacaacagagctcaaaacgacagatctttgcaaacgggccaaaagatacagaagcccaatgcgattcagtcttcaccaaagcccatctccatacaacggctacctgcaacaagcgacaaacacagaggatcagcagagcaatccgtatcatcagacaatacggaagtgacgacgaggaaccgttacgacgctctcagattgtgtga

SEQ ID NO: 176140 - DNA, 125 bp, Arabidopsis thaliana landsberg
agaaagaaatcgcgttcgcgggctggatccggatcggagcttcgatttcggattgtcgtgaatccaagtcggatactatagtagatgtagtagctattacatccatgccaactcaaaacatttag

SEQ ID NO: 176141 - DNA, 393 bp, Arabidopsis thaliana landsberg
acttgtcatctttattgtagttcgttatcatgtcttccgaagaaagtgtttcacaaaaccacaccacactgatgagccagtcaaaacgtgttacatacttctaagacttcgtgactttatgggagtttggcatatcgttaacaagaaccaattggtaagaagtaaatggcatggtgaatgttagaaagaacggagcgattgctcatgtcctccacgtcacaaagaactgacttctacatgggttatagggtggttacagcatgattcaagggtcactacccaaaccggttttaggggaaaccagttagggtggtgtcaactgaatcatgccgaaacaatccattaacccgttcggaaacaggttctatgcggcattgtgaacatcggcaatag

SEQ ID NO: 176142 - DNA, 873 bp, Arabidopsis thaliana landsberg
ggattgctgttcttgttgctgcaggtttctttggttatatgctagctctgttgcaacgaagagtcggctctatcgtgtcttctcataatgtaagtgctcgtctcaaagactaccctggcttattattattctgctaaaactattcaaatatttcttacacaggatcaagaaatgttcgaagctgatcctgatcaaaagcctatgaaacattccagaccatctctgattccggctggagacgagcagctagagaaacaagaggaaacatttgtggtatcgctgggaaaactcgtttcaaatgcttgggagtcagttatggagatccttagaaaaaagcagacaggcaccagctttcagcagtactatgggacaacaaagcagtctgctgcatttagcacatcaactccatggccaattcaagagagctttgtgattcgagacgaagacggacctcctcctgttgagcccaggaacccaactccaagaaagacttatgcttttatgtccaaagatgcagagaaaatgcagcagctacgtcagagccgtgcattctacagtagctgggacgctgagttccctaaccagcagcaacagcagcaaaagcagcaccagaagcatcagcatcagcaacaacagcagcagcagcatcgaaggcattactcatcgatcccgcatacttattatgagcaggacagtgaaaagtctaatgagatagtctttggagcggtccaagaacagagcagcaagcgtgtggctaagcctaagccgaagcctatagagtctggagatcaaatgaataataatactcaacagaatcttcactacagatctcattctgttagttacccatatggatactatcctaatacatga

SEQ ID NO: 176143 - DNA, 303 bp, Arabidopsis thaliana landsberg
cgcatcgaggtcgagaagctgggcaagggcttctataccgtgcgtttgcatcacggcttcttcgagacgccggacgtgccccgcgcgctggaagaggcgcgccgcttcggcctggcgctggacctggacactgccaccttcttcatcggccgcgagacgctggtgcccgaccagcgctccgaactgggccgttggcgcaactggctctatcgcctgatggccggagtcgcactgtcgcccgcacgattctatcagttgccgccgggaagagttgttgagctaggatcgcagataacgatctag

SEQ ID NO: 176144 - DNA, 1238 bp, Arabidopsis thaliana landsberg
atgaaacgctgtcgctatgttatgggtatgggctttcaagagaaagatgctaaaggagctttgcgactgaacaatcacgacattgcaagttctgttggatgtcttatcgaagagcgggcgaaaaaagcccaacagcgggagcaggatcttcagagacaaagcgaaatactgtatgttcttactactgtaattatactagttatgatctttaactttgtagtgactttatgagctctgattcagtgagcagaaaaagtatggagtaacacccatgaagaaagctgttgatatgcagatgcttgagaggctcgtctctattgggtaagtaacaaactgtaaatagttttactgttgtcttcccctactatgagcttctcgatgtttgtaagaaagccttcaagctcccccttgtatacatataagtctttagcttaagaactaatgttggttttagttgttttttcaatgcttaactagtggaaatgttctatttggatatctgaatttgaaacttttcagattagtttatgtatttagtatgacttagagcgtttacttgtgcagatatgcgagggaacttgctgctgaatccctccggagaaatgagaacgatattcagaaggcgcttgatatactcacagacccaaaagttaattcaacgatacaggcttacattgaatcgaggaaaagaaaacggcaagaacaactggtaggcatatcagttgctgaacttgtgtctatgggctttgaacgaggaaaaggtaaatttcccatctggatagtttctgcaattgcatatattgtaaaagtccacggtagagaattgatgatctctggtttgcactgcagctacctctgctttggaagctggtggcagccgagaagatataatccaaaggctactatctgcatcagtagcaaatccaggaactactactacctctgttataaatgcaacaagtagcacaaacaatgtgggtgcggagagcagtggttttggcggtggggcagagcaggactctgagatgaaagatgaaacaacggatgacattgcaaaccgagcaagcacatccagtgacggcatggaagaagagcgggactctgagatagaagatgaaatagcagacgagattgcaagggtcgatgctttgtcggcttatgatatcaatcttgacaaggaaattgaagctataaatgagtacctggccatgctggatgcatcccaggagtcttgttga

SEQ ID NO: 176145 - DNA, 203 bp, Arabidopsis thaliana landsberg
atttgtctaacgaaccagagacccttgtactcaaggagattaacagaagaagaagaagaatcgtaaacgagattcttctcggaagagaaactgttttgcttcggagctcatcgtcgtcgccgatcgattccatcaccgaatcagtagtagcatttgcagatgaaggaacctctcagaattgtgtaatttgcaaatcgttttga

SEQ ID NO: 176146 - DNA, 146 bp, Arabidopsis thaliana landsberg
atgtgccggcagccttttgagtcaatctccacaaaaacacagataagaagtttatcagaagaaagactctgtccaatagttgagcaagtcaaaagcttcaaactgttctactggaaggaactagaaggaaccacaaaacaagggag

SEQ ID NO: 176147 - DNA, 132 bp, Arabidopsis thaliana landsberg
gctgttagaaagctttccgttttcgagattggtggttatataacgtgcctcggtataacctatgacaacgatggcaaagtagaaaagcgtgaccacggaatgcaagatggttaccctggagaagaagtagag

SEQ ID NO: 176148 - DNA, 411 bp, Arabidopsis thaliana landsberg
atgggcacgctggcggcgaacatggaatttgaaagagccgagatcgtcaagcacaagatggtagcgctgcagcgctaccagcaaaaatcgacggtggtaaacccgcgcctgaacaatatagatgtggtctcgatcctcagcgatgaaaagaatgcctttgtgaactttatgatgctgcagaacggcaccatcatctacgccaacaccacacagatcgaaaaaaagatagaagacgagacggacgaggatatcctcgcgctggcctatgcgcacctgcgtgaaaaattcaacagcgtggcaacggagctgatcgcccccttcaccatagaattgccggtggaaacgatggcgctgaccatccccaagctgggcgataaaaaagcgctgctggacatgagcctgaaaaatgcc

SEQ ID NO: 176149 - DNA, 139 bp, Arabidopsis thaliana landsberg
atggtaacgccttcttcttccaagcttctcgtggatgcttttaaatcaggcaaaaattatcttcattcactggagattcgaggatacaatttggaatcgctgccaggtatgtcctttcttgccttctcttctagtttaa

SEQ ID NO: 176150 - DNA, 94 bp, Arabidopsis thaliana landsberg
atgagtcaaggtttcgaaagatatgagagacaatactgtgagatttctgcaaatctctcaaagaaatgtacttcagctattgctcttgatggag

SEQ ID NO: 176151 - DNA, 146 bp, Arabidopsis thaliana landsberg
atgccacaaaacatatcggtgtgggcatacctgatgaccagccggccaaaaacatatgcatagagcaagccccgaagagatatgctgaacagaaagtgaagacgtgcatctcccacgaacaacaaaccaacgaagtgtccgagtga

SEQ ID NO: 176152 - DNA, 9 bp, Arabidopsis thaliana landsberg
atgcagtcg

SEQ ID NO: 176153 - DNA, 138 bp, Arabidopsis thaliana landsberg
atgacacgttgtgttggtttggttagccgtggaccagaagaagaggagaaacaagaagcaaacgaccctgaacacgatggcaagggaagtagtgaagaagacggccaagatgatctgttcgagataaacctgaaggcc

SEQ ID NO: 176154 - DNA, 418 bp, Arabidopsis thaliana landsberg
agggctccagcttagtggaaagtttgatattgatgaggaaaccaaatactcatcggtctgtgcgactaatagatttgatgatacgtgttatgaagacgatgaagaagaagaagaagatatattattggattgctgcaacaatttgacttttggtgattcttctgcttctgatggcaaggaacctgcttcaactggcaaattctatgaagattcatgggtatggttgagttcttcactcctagtagtttctaggagaatcataggtgatattgccattttttgtccttcagggtgacagcctgcatttacggagtaacaaaatggtagatcagagctggtcgaactcaaataagcatactcgccagcttatgtccgaactgccatccaaagatttttctgttgcaggaaacaacatcag

SEQ ID NO: 176155 - DNA, 337 bp, Arabidopsis thaliana landsberg
atggttcgtggattgatgaaattcccaggaatctcaacgaagttattaaacataagcgttaattctctctgcaaatttcgaaacttggagagagcagaaacattactcatagacggaatcagattaggtgttcttcctgatgtgatcacttacaacactctaatcaaagggtacactcgtttcattggaatcgacgaagcttatgctgtaacacgtcgtatgagagaagctgggatcgaaccagatgttactacttacaattcattgatctcaggagctgctaaaaacttgatgttgaatcgtgtactccaactgttcgacgaaatgcttcactcag

SEQ ID NO: 176156 - DNA, 216 bp, Arabidopsis thaliana landsberg
atgatctccaccttcggctgcaacaatggccttatcctctccggcgcccgcgtgtaccacacgatggcgcaggacggcttatttttcaaaaaggccggcactctgaacaaaaacgatgtgccgcaatgggcgctttgggcgcaattcatcgttgcggcgctgctgtgcctgagcgggcgctatggcgatctgctggatatgatctcctttgtcgtg

SEQ ID NO: 176157 - DNA, 143 bp, Arabidopsis thaliana landsberg
ttggaaactctgactttgctcaaggcattatggacgcaattgagtttttctttcttcctgattttgtcggacgtccaacagcgaaaagacactcaccacgtaaaagtcaaacgactaacaaagaagtcagcttatttggttga

SEQ ID NO: 176158 - DNA, 36 bp, Arabidopsis thaliana landsberg
atgtcgtactgcgcaaaagaatatgatggaaacaaa

SEQ ID NO: 176159 - DNA, 74 bp, Arabidopsis thaliana landsberg
atggtcgaatttacaagtcggaccggatctgcaaatgccgaagcgactgtaatgcgggcaaatggcttgaccag

SEQ ID NO: 176160 - DNA, 445 bp, Arabidopsis thaliana landsberg
atgcagggccacttgagctcgaacgccattgttgaaacttggcacggaccggatttcgtcaagaaggcggccgccaacggcaatcgcatgattctggccggggcgttttatctggatcattcggcggcgcccatcagcgtgcgcacgctgcaggatttgttccgcgccaacacgctgggcaacccggagcttttggctcatcccaagaccgttctgggtggcgatgcgccgctgtggggcgagtttgcgatgccggtcaatggcatggcgttcatctatccgcgcctgctggccattgccgagcacatgtggaatccgtcatcgcacgactggaacgatttcaagcgccgcgtgaaggtgcaggaggcgtggctggcctcgcagaacgtgccccccgggccggccgacatggacatcatccgtaacgcgaagagtttcgtgcccg

SEQ ID NO: 176161 - DNA, 132 bp, Arabidopsis thaliana landsberg
atggcggatggggtcgctagcatctatctaaagcttatttctgtagccagcaaattttctaatgaaatgaatagtggaggattaagtatctgtagcctttctagtcgagcactccaaaaactacgtaacgag

SEQ ID NO: 176162 - DNA, 246 bp, Arabidopsis thaliana landsberg
gctttaccgtacatggtgaccttaactacaacggctcctatattgtaagcctcggcgaagatgcggaaacagatgtgacccgcgacgcgcgcacgcagattgatgccaacgcctcttaccagctgaataaatggtttaccatatatgtagaagcacagaatcttacgaatgcaccgcaaagagcctatttcggacaaaaaacacgcatatacgaaaaacagttctattcctactggggacgcgcag

SEQ ID NO: 176163 - DNA, 103 bp, Arabidopsis thaliana landsberg
gccttccaatgtagattcttccaaagatatactgactaaaaggtatttatggattcggattggaggtcttgggaatgaaagtcttatagaggagactggcttc

SEQ ID NO: 176164 - DNA, 111 bp, Arabidopsis thaliana landsberg
tgatcgagtatgcatctagagggttgtctctctcggttcttcagttcgtcactattgtcctactcagtcgcatggtcttctgtatgaatgcgggtcatcggaataattacg

SEQ ID NO: 176165 - DNA, 95 bp, Arabidopsis thaliana landsberg
gatttcgtgattctatagatgacaagtcgaaggctaatgtggttcaaatcaaaggaagattttcagtaacatcagaaaacttggatcttgcaagg

SEQ ID NO: 176166 - DNA, 247 bp, Arabidopsis thaliana landsberg
atgaccgtgcgcgcgtggaggacactgacagagggaccccaggatgtcggcgcccaccggaagacgtgggccgtgcgggtggaaacggttgtcgggccagaccacggaatccgaggcccagctggcggttactcctggactgttatcgccggcttcctatgcgcgcccgttgcaaatccaaccgaattcaagatggcaagtcaatcctcgcggccacattatcacgatgccgagacagtgaaaagca

SEQ ID NO: 176167 - DNA, 1041 bp, Arabidopsis thaliana landsberg
  unsure (1)..(1041): unsure at all n locations
gttttcagttcgttaacccgaaccattgcaactgctaaaaatattaatgggaagaacccacgagagagctttctggacagattaccaaagtccactaaggatgaagttctacacgtaagtccgacattttccagtgtcctaagtgacaagaagctctatatgtactagttagtgaagattatgtagtaatgcatatggataagaggacttttcttctttcatctacagcattggacatctttacaagaattactgagacatttttggtcaggttatccgataacaaccacatatcttcataccaaggtaatgttattgcaattttcaaatctcccagtcccagaaattgctatatatattgattcctaggctttcacgggaaatttaatcttattatacaccaagagcaagttattataccaaatatttttcgtggattcttgtgatgttatattattatcatgcaggttggtaaactgaaggatgcaatgtccaatacatattcaaaacttgaggtaagctttgaaattcttcatctttctgacagaataagcaactgatagtaaatctgctatgttaaaacagtagttcctaatcgtaccaatgcgtttacgaaaatgaaatttttgggtaattaaaattgatgcagtattgtagtcgaatcttatttgcatatatatggtcaactgtacggtttccttgatattaaactccatgtaactcaggcaatgaaagagtcggtgcaatctgatctccggcatcaggtttctctactggttcgtccaatgcaacaggnnnnnnnnnnnnnnnnnnnnnnnnnnnnnnnnatacttttattacatcatgtctcggttaagtctatattttccactcatattgcatctatatccagtttctacagccttgcattgtaatccggtttgaaaattgatcttaatcggttttctctgctaggctcttgacgctgcgttccatcactacgaagtggatctgcagagaagaacagctaagagcggcgaaagaccaaacggctacgtatag

SEQ ID NO: 176168 - DNA, 157 bp, Arabidopsis thaliana landsberg
cgacagcgaccagcgatcagctacagcaaccagcgacaacatacattgtttgtttgtctgtcgctggattcagcgaccaattacagcgacaatcgctaataactgtcgctgtgttgttcgtttgactgtcgctataaacagtcgctatattgtttag

SEQ ID NO: 176169 - DNA, 274 bp, Arabidopsis thaliana landsberg
atgagagaagtcgtaaaagacgtggcttcgaatttcccgactgctattgtcaccgggagatccattgagaaggtacattacatttttaccaaatattgactattttctatataacagatcatttaatttacatattaatggtaaagacgatatataacgtacgagtatgtttttgttataggttcgtagatttgtccaagtaaacgagatttactacgccggaagccacggcatggacattgaaggtccgaccaacgaaaatagtaacggccag

SEQ ID NO: 176170 - DNA, 2179 bp, Arabidopsis thaliana landsberg
atgccgtttatctccgagactgctagtgccatcaagcgccggttcggattcaacgaccgtcccgctccgtcggaatctctccgctctgtaccttgcacgccagaagctaacaccgtctcgagagataatcacactcatcagtctttgcttttctcttccgccgttcgaagcatgcctgaattggacgaagatggtgcgatttgcgctggatctgctcagatatcgaggtctcaaagctttgagttcaatgaagatcccgctttttggaaagatcacaatgttcaggtattgagcgattttggtgattgattcgtgtagatctgatttcgcctagcttctgtgtagtagtcacaatgcctagtttttggttcaattgaattggttgctcttgaagaatcttaatgacgaaataattttcggattttgtggttttaacacattaatgaattgattttgagaacattttagggttttgttgatttttctggataaaagaaaactaagtttgttctatcgtttcttggaatgttgaaaataggttatcataagaactcgtccacttagtagttcagagatttctgtacaaggcaacaacaaatgtgtaaggcaagacaatggtcaggcaattacttggattgggaatccagagtctcggttcacatttgatctcgttgctgatgagaatgttagccaggtattgccgattgtttatgcatatttttttcgaagctctagaatgttcctgagtctgcttgcttttatttgttcttacaggagcagatgtttaaagtggctggagtacctatggtagagaatgttgtggctggttacaatagctgtatgtttgcatatggccaggtgagttttctgactgtgagttttatctgtatttgctttctagtgtttccagtctgatgactgatggtagtcttaatttgtagactggaagtgggaaaactcatactatgcttggagatatcgagggaggaacacgtagacatagtgtcaactgcgggatgacacctagagtttttgagtatttgttctcaaggatccaaaaggtttggtgtgtttgtctttctgtatgcatatgctttagctgtgaaatgctgtgttctaacttatctgtcttttctttaccaggaaaaagaggttcgcaaagaggaaaagctacatttcacttgtagatgctcatttctggagatttacaacgagcaaatccttgatttattagatccatcgtcttataatttacaggtatacataccaattgtatcatggcaacttgtgatctgaatttcgtatcttatgtgggattaaccaaatatcctcttttgcagctaagggaagaccacaaaaaaggtattcatgttgagaatctaaaggagattgaagtttcaagtgccagagacgtgattcaacaattgatgcaggtaatttatttttattctcttagctatttgatattaggtgcactttgtctgttcttcttggtttttctgactctgacctgctcccgtactacttttcctaagtataaaagtttgatcctatgtaagattaaatttctcaaaataacctgttatgtcaaattattcagtttccatggagaagctttaatgacactattttcttgaactttcatcttttcttttgcatctactaactactttgcatgctagatgctctttccttccatagtcagaaagataatgcaagaagtagttgacaatttgctcatgtcattcatttatttcataatagctttctcatgcaacttccacatcttttatgtgtagggtgctgcaaacaggaaagtagccgctactaatatgaatcgtgcaagtagtcgatcccacagtgtatttacatgtatcatcgaaagcaaggtaattaattgcattcaacttgctacttgagttctcaggctttatttctgaaatcgttatgatgaagtatagcttatcaatttctcaaagtaaaagttatcctgatctgtgttttctattagtgggtatctcaaggtgtaactcatcatcgttttgcacggcttaatcttgttgatttagctggatctgaaaggtaatggcagctataagtttcaaacatactaccctttctctgttcaagatattctgctaacatctggaataaaggcaaaagagttcaggagctgaag

SEQ ID NO: 176171 - DNA, 279 bp, Arabidopsis thaliana landsberg
atggtggagagacggaatcctctggttctatcatccacaagaagtactctccgttcagtgctcaattcgtcacaacccagctctgccgacggcgaccgagttctgaataaagacggtgacttgttacgagggaacgctaggttgtctgcgggcattctccggtggcggaaggacggagaaaatgtttccgatgcaaaattggattctttagatgactctgcattggttggactctccactcaattgcttaagagactatctatcaactctggttctttg

SEQ ID NO: 176172 - DNA, 391 bp, Arabidopsis thaliana landsberg
gttgctggtggtctggccgctggtcaaacgccatatgcaattagtgccgttgtaactgggttggctcggttgacttatgaattctcagagcttatcggagtcgcatacaagctccttcctcagactttcttgcttatgcaaaggaacaaccgggaaatagtcaaagtaaagcacacaacagaattcttgcttatatctttaccctttcaaccatctataatattttgtctgacttttacacttgcatcgacgttgtggtcaggcgaacttaggttttgtcaaagctttagttgctaaatctaaagctgacatattgcatgaacacttgactggagttgttgagggcctgctgagctggcaaagtgatacaaagaattcctttaaagctaag

SEQ ID NO: 176173 - DNA, 534 bp, Arabidopsis thaliana landsberg
atgccagagaccagcgacagtgaatttacatggaaagattatcaagcccgtgtaaataatgaacttgtagctattttaggaaactttgtgaaccgtgtaatgattttgatgcacaaatatttcgaggggaaaaccttggatgcacaaaaccttaaagacaaagcaataaacgagcagattaaaaccgcttacgccgatattgataagcatttaacagactttaaattcagaaatgcgatatctgccttgatggatgtagccagattagggaacaaatatttaacagaaaaagaaccttggaaaacttttaaagagcaaccagaagcaacaagagaagttttacagaattgtttacacatcatcggccacttagccacactttcgcaggcgtttttaccgcatacaagtaagaaaattgctggtatgcttaatctttctgatgaagctaagggctatgatgaagctattacgtttgccaacgggcatcaattaaattcagcaactttattgtttgaaaaagtggaggatgagcaa

SEQ ID NO: 176174 - DNA, 399 bp, Arabidopsis thaliana landsberg
atgggtttgttaatagaggctatcattgcttcgatattattgtctttgcgctttacaataacagagtcagctccaaaatctgctctcattaccaacctttctggtttcaacggcacttttccatctaaacactatgccgggtatattacatttttgtgaaattctcatctatcagaaagtttgatcatagactttcttcaaaataattttaattaatctctcttttcttatgaaatttggtgtgtgatctaaggtatgttgcaatagataaacatcgtaataagaatctatggtattactttgtggaatctgagagaaatgcttcggtagatccagttgtgctttggcttaatggtggtcctggttgctctagcatggatggatttgtctacgagcacg

SEQ ID NO: 176175 - DNA, 606 bp, Arabidopsis thaliana landsberg
atggcggacaagtcaatcactcgtttctattttgaattttcggcttcatggcctagaactcctagttggatatctttgttaggcagtgatatattttacccaagttttgctcgcatcttcaagcgattagcacaagaatgtggagtgcctgtgttactggcactaaaaagccccttagaggagttttgtaacgccaaggagagaccaaaacagtgtgttgctgctgaagcattagcaggtgtactgcactctgatgttaatggtctttttaatgagtgggatagctggataatggttcagttgcagaatgttattcttggccaatcagtagaatccataccggagtgggctgcttgcatacgttatgctgtcacagggaaagggaagcaaggaaccaaaattcctgtcatgagacaacaaattttggactgtatagtggcaccattaccaccaactgcgaccacaactgttgttgcaaagcggtatgcttttctttcggctgctctaatagaactatctccaccaaagatgcccgtaacagaagtgaagctgcatatcgtgcttcttgatgagttgatctgtaatatgtcccactcctcggcacaa

SEQ ID NO: 176176 - DNA, 539 bp, Arabidopsis thaliana landsberg
atgaacctcagtttttacggcttgttaattgggaaggcatcaaaaaggttagtaggttaattaaccacagacccataaggtatacagtctacttggtagatgcattgaaacaagcagagttcttaagcaaataacttacatatttctttccctatcgacgttgtctgttgttgcccgttgtttttacttcatcagtcacgttccatccgagattttgacaaccatgctacctgtctagttggaaaattcgaggtattagttctcctccatattatcttaacttctgatgttagttttccaccgcaattggctttgtaatttatatattcatctttgcaatgctcttcataatcaccattaagttctctgttgatttaataaaagtacaacgggttgcacctttatgcagactgtggatacgtattaccgaaaatcgagcagcactcaatacgtaggaaatgtggcggtgccactactctgtataagtgctctagatgatccattatgcacaaaggaagctattccctgggacgaatgcg

SEQ ID NO: 176177 - DNA, 510 bp, Arabidopsis thaliana landsberg
atgtcgagaaacatctccaacaccgatacctttgaattcaactccaagttcaccgataagatgaggagaattagggtatgatgatattttcattagcgttgtgttgttattttcatgtaagcccggatcaaaaatgatgtgtttttcttgaacaggtgcctctgcctccgatggatgagaggaagaaaattgttgaagatgttgataaagatagacgctatgcaattgatgcagctcttgttcggatcatgaagagtagaaaagtgttggggcatcaacagttggtctctgaatgtgttgagcatctcagcaaaatgttcaaggtaaatacaaaaactctaattctgtaaatgtcttgtaatttgtgtccatcaaggaaatttacatattggttttatttatttgcagcctgatataaagatgataaagaaacggattgaggacttgatcagcacagattacttggagagggataccgacaatcaaaacactttcaagtatttggcttag

SEQ ID NO: 176178 - DNA, 301 bp, Arabidopsis thaliana landsberg
  unsure (1)..(301): unsure at all n locations
gtccaagtcgctcgagacggtgaccggggtgttcgggccgaccaacctgaacaccggcgcgccggtgaccagcggctacgtggtcagcctggagggcacccccctcaccccgatccagcccaagtggtcggtccaggtcggcggccgctacgagcacgagcttttcaacgacgtgcgcggctacgtccgggccgactaccgctggacgtcgaagtacaccctgagcttcccgggcacccagtcctacgcccccgacgcggcccagggcatctcgaccgatcgcctgaacctcagggccggn

SEQ ID NO: 176179 - DNA, 974 bp, Arabidopsis thaliana landsberg
acgagaaactacatctctacgttccaatcaaacgaagaaaaattcaaaattagcgacacaaaatgaatcaatcatcaaagatttacctcatcgaagaagaaagatgctcttcagtgagacggagcagtctgttcctggtggtggtgagatgatttggaaggagccaaagctttgttgtagatctgctcaccgacgagataaacgcagaaggcggcgacgccgattccaagtccgggaagagcgtgtctcatttgattcgaaagcatcggatgcttcctccattcatctcttcgccggaaaaattcgccggttgttcccaaaggcttcgccattttctcaggtattcgattaatctcctgcgaccgtactattcctcttaactttcttctcaaatgacaaatcatgggcttctttgatgtatatgggctttaaatttattttttgtcgtcatatgggctttaactttaggttatcatttgggcttcttttgaaaaaaaatcggaaaataataatgtcgtaaactagttttcttatggttctctttaatatcaaaatataatgtcggaaataagtaattaagtttaataatattgcatagcatcatatataaattatatcagaaatctatcattgtagagttgttattatttatttcttgttaaacagaaaataaatacaaatggtaaatcatagtgaaacgatctactgatctttctagcttatgactctggtttatgggaagacaacatagtgatctcatcagaaaaaaatgtcttcaggcataaacatggtgttcttgtcgttagcggcttggcttggtggatgatgaccatgtcctggaggaggaggatcttttgcaggagaagatggaactgttgggccttttcctggtggtgaatgaccatgataacctggaggagtatgttttgaaggagaaaaaggatctgtttggattttatcggtttcgtcggtga

SEQ ID NO: 176180 - DNA, 449 bp, Arabidopsis thaliana landsberg
gatccattctcggaggcacttttgtgttttggagcaagctctgtagctgtagatgaagccatcgaagaagccgaccaagatgagacttctcttgcttcaaaagaggtgaaaaatctatgctttgatcgttttttgttcagctccatttccagaaagcaccaatcttttgtatgattgaacaatgttagagcaaattgatgcaataaaaggaacgattttgctcttaggaagcatcgtaagggttgatctgtctatattcttgtagtctcatcaatcatgcttgtgctctttggtattactctctgcagatatgtatagaatcaatatttccagtgcatgaagaggtgaaaatgtgcatttcacaagctgcaaattccataggcttgaaagagatacccaaattcaaagaaaaaatgggagatgaacttgactggattaccaaaaaccag

SEQ ID NO: 176181 - DNA, 55 bp, Arabidopsis thaliana landsberg
atggggtcttcattgaccaggacgtccgccaacgccatccgaaggccgagctatg

SEQ ID NO: 176182 - DNA, 769 bp, Arabidopsis thaliana landsberg
atgtcgagagaagcagaggaaagagtcagctcgtcttcagacagtgaacaggaagctgagtgctatgaacaagcttttgatggaagagaatgatcgtttgcagaagcaagtctccaacttggtttatgagaatggattcatgaaacatcgaatccacactgtaagtccttgaatcccttttgctaaatgcattgttgagttgttatctttgatgcttgtatatgtatttgttctttaagagttctctgttgttagagagtgactggtgaaatctctgtgttgtgtcttaggcttctgggacgaccacagacaacagctgtgagtctgtggtcgtgagtggtcagcaacgtcagcagcaaaacccaacacatcagcatcctcagcgtgatgttaacaacccagctaagtaaggaaggctctttttttgtttgtgaatttctcattgtgacattatgagaagagactaaatggagtgtttttttggtagtcttctctcgattgcggaggagaccttggcggagttcctttgcaaggctacaggaactgctgtcgactgggtccagatgattgggatgaaggtagataagttgaagtattttaacgttttcatatgtggaaatgaagtggtttttagaaaatgttttaatatgtattttcatggttatgtatgtagcctggtccggattctattggtatcgtagctgtttcacgcaactgcagtggaatagcagcacgtgcctgtggcctcgtgagtttagaacccatgaag

SEQ ID NO: 176183 - DNA, 477 bp, Arabidopsis thaliana landsberg
atgagtctttacaagcgaaaacaatttattatcacgcgcagacatcgcgtgatacacgtgatcgacacgcgacactgtataaaacagcgtgcggacgacacgcgaaacaacgcgcacgacagcgcgcgacacgctcgagtcaatgtgactacgtgagcgaacagcacgatgacacgtaaacgatgttgcgcacgatcaataacaaacaagtaaattattaaaaatatttaagctggtagtaatcaagttaattaacatttatatttataaaagcacgagttgaaactatagactcgttctaattaagttgttattttattaaccttcttacaaaccaataattaaatatttagctataacatgcgacacgacaacaatgagcgcacgtgtgaccacgtgcaactgacgcgcgacatgcgtgcgaacagcacgagtgatccgcgcgagcgacgcacgcgattacgtgatactcgctaa

SEQ ID NO: 176184 - DNA, 113 bp, Arabidopsis thaliana landsberg
ctgggatctacggagacgaccttaacgagacaatcgagaggttggataagaagtacaactcgttactcctacgtgctaccatctgcgagaaacgcataaaagagaactcatga

SEQ ID NO: 176185 - DNA, 273 bp, Arabidopsis thaliana landsberg
atggcgagtttcgacgcctgcacggtttgtatcgcaacggcggatttgccgccatccctggcccggaaatacgaatattccgcagtcattgcgtttcctgaatatgatgatgtttccgggttgagtgttatggaacccctgcccgcgagtcaattccggaaatattttgcggtgccgcaaatcagggctgcacgggcgcttcaatccaggccgttcggcaggcggctcataaggatgaaagagagcatagtgaatggccgcgaagtacacgag

SEQ ID NO: 176186 - DNA, 120 bp, Arabidopsis thaliana landsberg
aggaagtaaagcatgactgtcccaggattgatgcagccattgtaccaccaactgaatcgcagcctttgctaattaaagctcgcaactacatgcgagcttacgcgcagcacatcgctcgcg

SEQ ID NO: 176187 - DNA, 87 bp, Arabidopsis thaliana landsberg
atgggagcagaagaagtggagaatgctgacttaatcgacaaagctttggtgtctgccattacagaggtccttgcatctgcccaaagt

SEQ ID NO: 176188 - DNA, 64 bp, Arabidopsis thaliana landsberg
atgacgaagagcaacggcaaatcaagcgtcgaacaagatgaaaaacttagagaaattgaacaag

SEQ ID NO: 176189 - DNA, 372 bp, Arabidopsis thaliana landsberg
atggccaagccttgtgctgcatttcttgtcttcctctgcctttccatgctcatcctgtcaatccctggtgagttctctaatgtaatagtaacaatatcatatcattataaattcaggatatacaaaattaaggaataaactaactatcctgaaaaatgcagaagtggatgcttataataagctatgcatatcaatcaaattaaaacgttgacagatattagttgccagatgaacgattgcgactgcgaccacgaccacagatgcggtgagtgggaagatgagagccatgggaattgcaaacaacaccatctccgagtcgtttgcacatgtaccttggactgtcctgatatttcatctacgtcgaacgcataa

SEQ ID NO: 176190 - DNA, 102 bp, Arabidopsis thaliana landsberg
gctggtctctcgcaagaatctccatctgtagatggtttgcaagaatatgcaagcacagtgattgagaaaagtattgagagcttatatgcatgcggaggttga

SEQ ID NO: 176191 - DNA, 368 bp, Arabidopsis thaliana landsberg
atgagagctgatccaatccgtgtcgtaatatgggtgccaagccgcagtacaattagatctgcaagaattgcagcagaaaagctcttaaggtaatcatcaataacacagtttcatcttctttcttggccaaaatctatcaattctctaataataaaaaccattctatgtgcaggatagttggagcaggatctgcagatccattagcttcatgctccatagtaaagaagagaatcaaaaacaagcgtccaatggtctcacacctcagaaaacctgtgagcgaccatcaaaaatttgtgagaagcacgagcatgtacccagtggagcacagtccaggacatggtcagctttgcattacaccagctgactaa

SEQ ID NO: 176192 - DNA, 89 bp, Arabidopsis thaliana landsberg
atggtggaagctccactagatcggtacgagaaatattatggctcttggtcacctacacatgccatggacttaaataaaactgactcttg

SEQ ID NO: 176193 - DNA, 228 bp, Arabidopsis thaliana landsberg
gtgttcaagaatactgttgttaaaagcgacaaattcaagacaggacaagacaactatgtcgagaagaagatactggatgtcaaaaagcaggacattctaattggtagcattcctgtcatggtgaaatctatcctttgcaaaacaagcgagaaagggaaagaaaactgcaaaaagggggattgtgcctttgatcagggtggatatttcgtgataaagggggctgagaag

SEQ ID NO: 176194 - DNA, 548 bp, Arabidopsis thaliana landsberg
atgctggctgttggagctctttgtgacaaattgaagcaaacggatccctataaatctcaactagagctaatgttggtgcaacatatttttcctgatttcaatagtccagttggacatcttagagcaaaggtatttttggctttaatctgtgttgtggatatctcagtaatccattgttactagcttaccagaatgaggattttgttttgcatttccacgaagtctgttgtacttcaatttattctagaacgcttagcattgttgcttagttggctactgcattgctgtcgatagtttagtatagacttcccgttgttacccagtatttgatgtcatattctttgtgatctcctttgatctgtttgacggttgcattttttggatgtaggctgcatgggtagctgggcaatatgcacacatcaatttctcagatcagaacaactttcgtaaagcattgcacagtgttgtttcgggactgcgcgatcctgatctccctgttcgtgttgattcagtttttgcattgcgttcatttgttgaggcgtgcaagg

SEQ ID NO: 176195 - DNA, 46 bp, Arabidopsis thaliana landsberg
atgaagtggatctacaagtttggtgacacgacaccaaatggtttag

SEQ ID NO: 176196 - DNA, 381 bp, Arabidopsis thaliana landsberg
atggatgcggagtggcgccagttcgccgtcgccaactacctcgacatcctggagcgcaatgccttccgcaactaccggcagctgctgcaggaggtgacgctctccacggcgatgggctacttcctcacctaccgcggcaacgccaaggcgaacaatcgcggcagccagcccgacgagaactacgcgcgcgagctgatgcagctgttcaccatctgcctgctgcagctgcgcccggacggcagcgtcgcgcccggcaacgtggagacctacgaccccgaggacgtgagcgggctcgcccgcgtgttcaccggctgggaccgcgacacgatcgggcttgcgtctccctataccgccgatgtgcaacgccgcccgatgacgcag

SEQ ID NO: 176197 - DNA, 1071 bp, Arabidopsis thaliana landsberg
atgcataatttggtagaccaaactgcaagagcaattgttaatcaagaatccatgcagaggcgccatggacgaggagttttgtggaatccttatgaaatttatgaattactgaaacgtaacacggtaagcacttacagtgtctatctgtaacatcgttgttgttcatggttgtttctgcactaagcttgttcgtaggccaactaattttatcgtatttaatcccacagacaagcgaaccaaccaattgcatggcactacatatgtgtgacatggcttatgcattgcatctgggagggtatacagcggaccacgatgctatcaaattcctgaagatctacaagcactcgaaccatattaagtccaagctgcttttcagcggtgacgatacaaatctactttcatcaaggcttaggttactacattgggacgcatttcccttgacaaccttcccttgccgattccagccgcaagatcttgttgaaatcattctacatcgcagcaatctcacaagcttctggaaagaaaccgtggtaaaagctcttaacagatctatgcttataacaatgtatcttctggtacttaacattctcgcaattttcctattctttgttgaatatgctcaggggatgccaaacttgagaagattggacttgtcagattctgaaaatctggaacaacttccagatctttcaatggccgttaatttggaggaattgataactcaaggctgcaagaggctgaagaaaattccagagtccatcagctaccttactagattgacgacgcttgatgtctcatactgtgaggagcttgctagttatatcactataagggaattgaataggagcggccgtcaaattgctttgtatttctcgggtaaagaagtggaaacgaggtccattgcaaatctatctattggaggaaacatacatattcagatgttttggcttgatggcaacgtagatcatctcagttttactactgagcaacaaggacctgataaattgacaaagaaagagaagcaacaagcacctggtgaattgacaaagagggagcagcaacaagaacctc

SEQ ID NO: 176198 - DNA, 180 bp, Arabidopsis thaliana landsberg
atggttgcgataggttgttcaccggataagattacagtgagttctttgttatcttttcttcttaaggctggtatggctaaggaggcctatcacttaaaccagatagcacgtaaaggccaaagtaataacgtggtacctctagagacgaaaaccgcaaatgcgactctggctgcctgctag

SEQ ID NO: 176199 - DNA, 62 bp, Arabidopsis thaliana landsberg
agagtctccggctgaagaggagactacagggatacaacagtttccggcgagagtcgaagtga

SEQ ID NO: 176200 - DNA, 104 bp, Arabidopsis thaliana landsberg
taaaaaagcctaaaatccagagatcggtacagcgaatcgctttagcagtttctattctagtacataacgatgataagcgcgatattgatgatgacttccaatga

SEQ ID NO: 176201 - DNA, 358 bp, Arabidopsis thaliana landsberg
gacggggagctgagcgcggcactcctgcgcgcccgcgcgggcgacgagaacgccttcgccgtcgtctaccggagcgtgcagccccggctgctcggctacgcccgcgggctggtcggcaacgacgcggacgacgtggccgccgaagcctggcacgacatagtgcgcgacctggcgtcgttcagcggggacggcacggccttccgcgcctgggccgcgaccatagcccgccaccgcgccctggaccacctgcgcagggccggcagccgcccgcgcacggcgccgctggacgaggtcacggcgcagccgccgcccgcccctgactcggcgggcgtggccctggagaacatgtccaccgccg

SEQ ID NO: 176202 - DNA, 410 bp, Arabidopsis thaliana landsberg
cgcgaggaacaggccgcacgtcaccgcaagtacgacgacaccggctacaagctggagcccaccgtcaaggaaggcccgggcggcctccgcgacatccacaccgtcggctgggtcaccaagagccattccggcgcccgcaacttgatcgaactgcgcgaccgcggctttctcaccaagcaggaatgcgatcagctgtttgccgaccagtatttcatctggcgcgagcgcttcgccctgcacatgatcaccggccgccgcgaagaccgtctgctgttcgatcaccagatcaaggtggcggcgctgttcggatatgtccactccgaccacaaccgcgcggtcgagcagttcatgcagctgtactaccgcacgatcaagtcgctgtcctgcctcaacgacgtgctgctgaaaaa

SEQ ID NO: 176203 - DNA, 547 bp, Arabidopsis thaliana landsberg
cggacccgtgacggttagacagttcgccgcgaaagtctcggacgaaatcgccagacgtgtccaacttctggaggagaagcggtgcgtcagtatcggagaatatcggtcggaccgctcccaacactccgaagacgaaacgtggccgccgcttcctcacttgatcgtggtcctggatgaatgtgacctgcacattctcgacggctccgggccgctcgttgaattggtcagacacatcacgcgggttgggcgcgagatcggcgtgcacgccgtgatcttgtgccagcatgtcagctccgagttgctgtgtgccgacttcaccatgaacctgacagcacgaatcggcctgagcaaagtgaaaacgcgggagtccatcggcatgttcggagttgcggggccacgcatcaccgacagcgtcgatatcggagaggctgcgttcgccattgttggcgagccgccacggcacattgacctgctcgccccgccgcgcgagtccgagctgctggaacggctcggagggatgtctgaccggcgcgtcactgcgtctggg

SEQ ID NO: 176204 - DNA, 658 bp, Arabidopsis thaliana landsberg
atggggttttctttttctttctccggtcgacgccagaaccgttacgatcaggtaattaattattaaatttaatttttttgcgataaccgaagtttttgttaggagagaaaaaatcagcaccatttgtttgggtttattatggttaagaaaatttaagagttagcaataattttagtgtatgtgttattgataaatttatcaagtgatgttgatgttattgatttggatatttttggttcatatgtggacaaatagtgtgtagtattatcctcaaaaattctatttttattctttttatttttcgaatttctagatttactcggtagattcaagaacctttatggtgtcgacagaattgaccttatctttaacatggtccaataaattgacccatgtgtcgattattaggtgacaaattagcagtggaatagagaataatgaactcattgatcctatttgctacaatcatgggtcttcttataattgatttgggttttggtgattgttgtgattgtaggaagtggtggaagagaagagtgagtggaaagcaaaatggcaaactcagctctcagggttaaggagaagaagcaatcagaaagataataacacgatgtcttgggctgcaagaatgcgtcgtcaacaacaagaatcttcttaa

SEQ ID NO: 176205 - DNA, 1562 bp, Arabidopsis thaliana landsberg
gtctttacatgtttgggatgcatttggagattatggagcattctggagcaaaacagacaacttaagctgcggcagcaatccggagacaaaaattgacgtaggtgtcgatcgacacaacccccggtgttgagcgacaccaatacctgacggtaagggaattgcgcaacttattgatgtttgaagattttcaaattcggcccagaactttctcctatttttgaagaagtccttgcacgttttaggtcatatatatagttttaaaagtcattgtttagacctaactctgattatcttttttattcttggaagcaaaaccctgtggagactccctttagagaagattcttctaaactcttttctcttcttaattccatcattgatttcttattcaatcatgttttgttcttctatgatcatgcttgagtagttctcttgttgggtttagagattcttattagggatttggatggattagtagatcaaaaaccctgttaggataatatatttagaattcttcatttttgattattcttaatgctagttttagttagttctagagtaaatagctagaacttgattttaggttattaggtatgcccaccataggtatctaataatggaactattttagatgagcctagtatttagatgcgtgctagtgtccattacttaggtgaacttatcaaacctgattataatgcttgcttagttctagggatttacaagagagttaggatcaaaactattgagcatagtgagtttcgcggaataccaccggttactttatattagtgatttgtgttctagagtggttcgataataatcctaatttactgctagatatactattctgatatttcctgaggatttccctaaacccaacatcttaatcatctgaatctacaatctcttttatttcttgtcttgtcttttacttttattacattctctgtttagctttattcgaaactgttaatctactgtgtgatccgacaactttgtagaattcgatccctaagtgctataacaacctctttatttgagagagtagtcattagggtaatttgactcatatcagcccttatctggttggttcaaaggtaattgtgcatacagatcattcaaaactcaagtaccttatgcagaaaaaggatgctaagccaagattactacgatggattcttcttcttcaagagtttgacatcgaagtacgggataggaaagggattgagaatggagttgctgatcatttgtcaaggatcaagtttgaagatgacgttcctatcaatgattttctacttgaagaaagtatctacttggttgagacaagtttgcaggaaaatcatggcagtgtcaattcacgcgcagatgagagctgcatagaatcagtgtcgattgacaccacacccctgtcgatcgacaccatcgcgtttcacagacagatggttctgcacaatcagtgtcgatcgacacgagatgctgcacatagccgatatgtttacacatcgcctctgaaggcgagattgcagcataagtccaattttcctccatccacatcctga

SEQ ID NO: 176206 - DNA, 201 bp, Arabidopsis thaliana landsberg
atgcttgcgcagttgaaaggtcattatgtagagctttcaatgcagaaatttagtagtcatatggtggaaagatgcttaacacattgtccagagagccgtcctcagatcgtgcgcgaactcatctctgttcctcattttgatattctaattcaagacccttatgctaactttgtcatccaagctgctcttgctgttaccaag

SEQ ID NO: 176207 - DNA, 245 bp, Arabidopsis thaliana landsberg
ttatacaattaagcctcgcagttacacaaagtgaagtccatactatttgctcatctccaacatcaaatcctttattttgctacaagtttttcaagttagatcctaaaattggaaaacttgatcttcctggcgttgccaaatgtttgattcattatgctcaacaaaatgccttagatacacataatcagttacaattacttgctaatagcacgactgataaccgtaccaaagaatcttacatctaa

SEQ ID NO: 176208 - DNA, 174 bp, Arabidopsis thaliana landsberg
atcggcgatgacggcaaataccgcgacaccacctgggtgcgcggcatcggcgacggcgacgagttgatgcggctggccttcggcaatgccgcgcggtacgcgccgaacacggagctgtactacaacgacttcaacgcctggcggccagcgaaggtcgccggcatcgtgcgcatg

SEQ ID NO: 176209 - DNA, 76 bp, Arabidopsis thaliana landsberg
ctagatcaagatgttagagatcattacggtaagaaaagtgttcttgatcggattcttgatcttgatactgaattgg

SEQ ID NO: 176210 - DNA, 124 bp, Arabidopsis thaliana landsberg
ctacttcacctctgacacatatgctaatgagtattcagcacgtgctgctagacttgcagcaggtttgtgcgctgatctagctacagatattttcactggccgtgtaaaaaatggttttgctttg

SEQ ID NO: 176211 - DNA, 1290 bp, Arabidopsis thaliana landsberg
atgccggcgaaacagaggaccccgaaggtcaacagaaaccctgatctgatcaggggtgttggtaaatactcgagatcccagatgtaccataagagaggtttgtgggctatcaaggccaaaaatggaggcgttttcccacgtcacgacgctaaatctaaggttgatgctccggtggagaagccaccgaagttctatccagctgaagatgttaagaaacctctccccaacaggcgcacggcaaaaccaaccaagctcaggtacttagtctgacactggtatcgatgcaattatcttccatgtgtttggttgatttctttggctcgtttgctaagtgggtttgtataagatttgaatatctgctggaaaagtgtccaaattttgcattgtgtaaatcatttgtctctaggatatttgaagaatagttgaaatgcattggtttgtgaagattgttagtggagttaaacttgaatttcaaaaggttcataatttctgtgaatacatctagttttcttgtacattactgttattagtatgattaagcttgtctcaggttgatagtaaaaagaaaaaaagcgaatttgattttcatttgtataccaaatttaatgtctatgctctgtaacgtcttcaatagatctaatatatgtttccaacatgatccgatcttcttatatctgtattgcagagctagcattactccaggtacagtgttgattatccttgctggtaggttcaagggaaagagagttgtcttccttaagcagcttgcctctggtttgcttcttgtgactggtgagttattctctatctgttctcatgaacttgtctcctataaatcatttgaagcgaagctcattcactgatttttaccatctgaattgttcatcctttttttaacaattctttaggaccattcaagatcaatggtgttcctttgagacgtgttaaccaggcctatgtgattggcacttccacaaaggttgacatttctggagtcaccctcgataaattcgatgataagtactttggcaaggttgctgagaagaaaaagaagaagacagaaggagagttctttgaggctgagaaagaggtataaccttatatcgcaaaacatggaaaggacgcaattcatcttgtgtttctctcctttaaatttggttatcacagtttgttccggaagaatagacattgaaaatatctttatatcacttgttattttccaaaccaaaacatatgcttgacataacatctctcttttatatttcacaggagaagaaggagatcccacag

SEQ ID NO: 176212 - DNA, 639 bp, Arabidopsis thaliana landsberg
atggagcttgaattaggtctgaagatcactcggactaaagacgatgtttcttcctctacagattttcgggttgccagagattcttttggtcatcgttcactttctcgagaaaccaactctgttttcttcctcattcttcatctcaaaggttctattccctctcatatttattcacctttttttcttacctagcatagagattgagattgaaaaccaaatgcaggatttaagaaggatggtatcgatatcgagataaacaaagaagggaatctgattaagatcagcggaagaaaacaggttgaagagatggttttggtaaagtgggtggaatggaaaaaggaaacagaaataaaggaattcaaaaaagtgtttcggattccagatattgtaattcttgacaagatcaaagcgaggtttaatgaagaagatgggactttaactgttacaatgcctaagaaagttaagggaattaccggtctgaagatcgaggaagaggacgaagaagaggagatgaaagagccgatagtagaagagaaaacagaggagaaaacagaaccagaagaaggagtcaaagaagagacaaaacctgaggaagaaaacgaagaagcagaagagccccacagagaagaggaagaagag

SEQ ID NO: 176213 - DNA, 42 bp, Arabidopsis thaliana landsberg
atgcgagaaagaacttacaactaccgaggctactgtcgaaag

SEQ ID NO: 176214 - DNA, 235 bp, Arabidopsis thaliana landsberg
cgtcgcccttctacggcaccgacgaccgcggcaagacgggatgcttcttccccttcccagatctgtcgatccgcaccaacggcgtgtaccgcctgcgcttcacggtcaacgcgaccgtcgagacaccccggccgggcttccggctgcccattgttgccgtcgtcacgagtgacgccttcaccgtctacagcgccaaggacttccccggcatgcagaagagcacccccttgaccaa

SEQ ID NO: 176215 - DNA, 723 bp, Arabidopsis thaliana landsberg
atggtacattcagagtcatcaatacttagttccttgcgcggtggtgatggcggtggtattccttgttctaaggatgaactatcaataaatggtagttacaccgatcctatggggcggaggaagtccaagcggtttaaggttgctgcggaaagtgagttttcacctgattttggatcgattaccaggcagctcagatcgagaagaatgcagaaggagttcacagttgagacttacgagaccaggaatgtttctgatgtttgtgttctctcttgtcaagctgatgttgagttgattcctggagaaattgttgcagaaagagatagctttaagtcggttgattgtaatgacatgtcggttgggttaaccgaaggagctgaatctcttggagttaacatgcaagaacctatgaaagataggaatatgccagagaacacaagtgagcaaaatatggtggaggtccatcctccaagcataagcctgccagaggaagatatgatggggtctgtttgcaggaaaagcatcactggaacaaaggagcttcacggaagaacgatctctgttgggagagacttatctccaaatatggggagcaagttttcaaagaatggaaagaccgctaaacgttctatatcggtggaagaggaaaacttggttctggagaagtcagattctggagaccatttgggtccattaccagaggttttggaacttgagaaatcagag

SEQ ID NO: 176216 - DNA, 127 bp, Arabidopsis thaliana landsberg
atgcaatatgaagcagaacctgcgaggattcacttggaaattacgaggagaaacatccgattttgtatcgacagaaaatgcaatgtggttaaggttgtaacctcaaatcagaagtcaagccaacctt

SEQ ID NO: 176217 - DNA, 367 bp, Arabidopsis thaliana landsberg
atgcaaggccggcttgccgacatcatcctgaacaatccgaatgtgctgggcgagcatacatgggtcggcctggctcagggcggcgtatctagcaccaacagcggccgcatgatcgtgcgcatgatgccattgggcgagcgtgccgacagcgttgatgaatccatcgagctgctgcgcaaagcggacaaggacatcccgctatcgcaggtctacttggagaatcgcccggcgatccgcatctggagcttccatggcagcggcctttacgaatacgtctggcagggagccaacttcgaaacgctcggaatagccgacagcgccttgcaaaagaagatggccggcgtcgccggccttcgctacatgcaca

SEQ ID NO: 176218 - DNA, 39 bp, Arabidopsis thaliana landsberg
atgctagagatcacaatagacctcacgcaccttgcacaa

SEQ ID NO: 176219 - DNA, 478 bp, Arabidopsis thaliana landsberg
atgactgctgttgtgaatggtaactctaaacgctattcttggtggtgggatagtcacataagccccaagaactcgaaatggcttcaggagaatcttacaggtatgtgattttcttgttttaacgtcccttgtatttcccacgggaaaggtcatttccatcgtgacaaatttcttttacttttagttcagttttgtgtcatgcaagatactttgtatgcgatctgcttacatgtttctatttttgttgacagatatggatagtaaagtcaagcaaatgatcaaggttattgaagaagatgctgactcttttgctaggcgagcggaaatgtattacaagaagcggcctgagcttatgaaactggttgaggagttttatcgagcatatcgtgctttggctgaaagatacgatcatgccaccggtgttattcgtcatgctcagcagactatgataaagccttcccaaaccaagaccctatga

SEQ ID NO: 176220 - DNA, 177 bp, Arabidopsis thaliana landsberg
atggcggacatcaagatcgatagcaaggtcttccaggagcgcatctcccacttcatcaatgcctggaaggccgacaagcgctccggagacgcgctcttcggcggcgtatcgtccattgtcgtaaacatgggcaaggtcgaggaagtccccgaattccacaagaataatgccatgcat

SEQ ID NO: 176221 - DNA, 335 bp, Arabidopsis thaliana landsberg
aaaatttcaattccaatcctcaaaaaatctacctcagtgactgtttaaaatcaagttggaaacagagtaatctaccattttctatttcaatatcatccaataagaaaaagaatctaccagatcttggggaaaccataatcgtagtattcaagattcagactttgggcctaattaagataaaacgactacttacacaactgctccgatcaccattggcaaagacagaaacctgttccttcgaaacattttgcaagatttataactgtctccgccgatcaatatcaatctccggtcgccgtcgctctagctcttcttccgggcacgacgaattttag

SEQ ID NO: 176222 - DNA, 153 bp, Arabidopsis thaliana landsberg
aaaaagaaaaactatgaggcgtttgatgagaagaagaagaagaagaagaagcctaagaaacgtgattccggtactgtttgcataatctcaaagaagaagacgggactcgaatctctgtatcacaactatgacaacgacagcgatgatgagtag

SEQ ID NO: 176223 - DNA, 574 bp, Arabidopsis thaliana landsberg
gtgattcaccgtcatcatctgcatctgatgtcgatagtttcaatcatcaaggggtgattaagaagtctgctaaaaccagaagaggtctttcccatgttgccggaaaccttctccctgttgctagaagccaactaaattttgttccgctattggactttgtaagttatcccaccttcatcaattatggcatgatacatttggagtatttgaaaaagcgaactgggttgtctcttacctatcatgtttgagttttgaaatctcaactaagatcctcctattgcctaaactgtggaggtctttgttatctatcttcctgtgccaaacaaagctgatattctatatttatctaatacagacagggagcatgaatctggcaatggaggcctcagcaaaatcccaaaatgcttttaaagccgtcactgacacctcagaagaaagaaagcatggagactgtatctctgctatcaaaaaggttgtcgattttagtttccatgatgttgaagcgcttataaagatgattgaggttgccatggatgctctaagttcatcaagattcggtggcccaaagtgttga

SEQ ID NO: 176224 - DNA, 1382 bp, Arabidopsis thaliana landsberg
atggaaaaatctctggaaacggtacctggattagacttaagtggcgaggatatcgaaatgtactaccaatacgtgagatttgtggatagatttctgagatttaataggaactatcagatagaatattttaagttaagctaccctggtgatgggagttctgagcgtgaagttgatctgctcaagcggtggatcgatactgtcattcagctgaaggttaaagatttagatttttttgactattcatgggaatgggggtttgataactttcagctaccttcaaccatttacatttgtgagagcttggtatccttaaagctatctactgttaccctgcctagtgtcaagtctgtttctttaccttttctcagagttctcaagctaggtgcagttaagttcgccgaccatttggatttagaaacactcatctcaggctgcactgctctcgaaaccttagctataagattctttgatcgcgtccaagttttacaagtgtcttctcagtctctactgagcttcactcatgttgcgcccaagcttgtctttactcatgctgtgcgaaagcctttggctgaaaaagatctatcaattgtaattgatgctcccaggcttgagtatctgaaactcagtgatcatcagactgcaagtttcataataaaaaatcctggttcccttgttgcggtggatattgatattaacttgtcttccggcttcgattcgaggaatatgattcgtgattttcttgttgggatctctagcgtcaaaaataggaccatctcttccattactcttaaggtaacctatgttgaattggatatttgaatgcttaactttatcttataagttttttcctcatatttctttttattcttgcagatcatctatgattacttaagatgtgaaccactacctccccattccgtaatctatatttcttgcatgttgagttctacgactacaggtttaaaatgttgcccacctttcttgagatctgcccaaatctaaaatcgcttatattggtaaggatttttcattgacccttgttataatgcaaatcgtgaaaatatcataaacgcaacttgttttggttcacttgattgtacttgcagaaatctactgaagaactggggatcaaagaaagtagtatgttttccggacctcaagatttcttaccatctctcgagtatgttgagatgaaaatgccattgaagaaagggttgctgctggagatcaggatgctagtgggttactttcttgagaaagcagcaatccttaagaaactaaccctatgctcggatgatgacagaaagagaaaagaatctttcattcccagaatccttgccattccaagaatttctacctcttgcgaagttgtggttatctga

SEQ ID NO: 176225 - DNA, 1729 bp, Arabidopsis thaliana landsberg
gtagaaggacgggaatgggatgacaaaaaacggaccagcattttgaatgtacggttgtatcttcagaatgcatcttcacggctgaatcaagctagaaggaatctcttggaacgtagccagtggcatgcaagtcgcattctcaacattacatcccaaattcgcgagtttcaagctttgtcgtgcataaaggatattcccgtacttcctctgatcttaagtcctatgaatgattctaattatgattccgaagttaaaagatcagatctgcgttcactaccacattctctacagcaaatacttaaatcatctttcaatgagagtcaacttcaggctattagtgttgctattggctcatccaatttgatgaaagcttttgacatttcacttatccagggtcctccaggttagtcattttatctctttgtcaataaagctaataatatctataatttgctctgggagaaagattagcattttacagtaattgattgttgatgtcggacatcaatgaatgtaaagaaaatttgtttgctctacagggactggcaagacgcgcactattgttgccattattagtggcttgcttgcatccgcctcacataaagctagtgacaggggaaattctgaaccaggtcatagttcttcaacctctaggcagggaatgaatccgagtgtcgctgttgcaagggcatggcaagatgcagctctggctaaacagctaaatgataacagcgaaacgaatagaaagatagcagaaaagaatggtagaggaagggttctgatctgtgctcaatcaaatgctgcagttgatgaattagtttcaagaatatccagtttaggtatatatggcagggatgggaagatgttcaaaccttatcttgtgagggttggaaatgcaaaaactgttcattcaaattcaatgcccttctttcttgatacccttgttgatcagcgattggcagaggagagaatgcggataaacgaatctaggagtaataagggtgcagattcttctgcattactgcgctctaatctagaaaaagtcgttgatcagatcacgcattttgaagctaagcgtgcaaacataaaccaggaaagtttagacgccaaagataagccggagaatgaacaccacaacaaagatgatgatggcaagctaatgtccgatgcggagctaggaataagattgcgaaggttatatgagcaaaagagaaaaatttacaaagatcttagtgctgttcaggctcaagagagaaaagcgaactatgaaatgagaacattgaaacaaaagttgcggaagtccattcttaaagaagctcaaatagttgttacaactttaagtggttgtggaggagacctgtacagtgtgtgtgctgaatctttagcagcccataaatttggtagtccatctgaagataatttatttgatgcggtggtgattcacgaagcagctcaggtaaatatttgacatgcttgatgtttggcataggtgttcttgtcaaaagtcataacttttttgcttttgtggcttgacaggccctgaagcgtggtaggttaattcctctacaactgttaaagtccaaaggagcaaaatgtataatggtaatcattgttcacttgcgtctcagaatgttctatcaaatccgcagttttatttaataacattgcttattataacaggttggagacccaaagcagcttccagcaactgagctctcaaccgttgcaa

SEQ ID NO: 176226 - DNA, 233 bp, Arabidopsis thaliana landsberg
aaactgtggaagggttttgggttaagtatccgtatttgaaggagttagtggagattattgtagctcaaggtttgatttctgaagaagttgcttttgagagagtcaagcttattggtgatgataaagctaaagagttgaatgatggatggaaagctttgtgtcttaaggaacaggatttgggtaatcagatgcttgagcttcttcttgcttcttcttctaccactaaaccctga

SEQ ID NO: 176227 - DNA, 68 bp, Arabidopsis thaliana landsberg
ggcttcaatggcatcatacactccatcatcgacgaggatgctgatgtcatcaccagtgagaagtccag

SEQ ID NO: 176228 - DNA, 1079 bp, Arabidopsis thaliana landsberg
atggggaaattagccgttgcagcgatcacgagcttgggggtgattccgatgtcgattatcgtcaatcacattgttcctgaaccctacatggtaaaaaaaaacctttttagaacttgggttcctctatctctctgattttgtgttgattactgcatctgttgaattttgcaggacgagatatttcatgtgcctcaagctcagcaatactgcaatgggaattttaggagctgggatccaatgatcactaccccacctggattgtaatactctctttttgaatcatcccttcttacgtagattctcaagtagttacctttaagtaaagtctggatttttcagtgtatgttgatgctaatttgtgttgttactgcttctttaagctgttacttgttcatgttactatgtagaggattaacttagagtttgaaattttacatcttttgaattgaaaatgttgatataaacctttcttttgcaggtactatctttcactagcacatgttgctagtttgtttccaggaatgttgttgatggaaaatacatctcagtccttttcagaagcttgttcgacatctgtcctgcggtctacaaatgctgtttctgcagtattgtgtggtgttttagtgtatgagataataagattcttggggccgaatcttagtgatagaaaagcgacttttatggcgttagtcatgtcgctttaccctctccattggctcttcactttcctatactatacagcaagggcgtacttaaccgcatgggtcttgccatgtcccttacttgtgtgaaaagacgatacgggctcagtgcattggtaagtgatctgaagcaaaacgagggaattttagacattgcttgaacttagagttacgatcatgtaggcaaattcatttccggttaggccttgcagttcgacactttagcagttgttatgcgacaaacaaaggtagcctggatgcttttcgaagcttgctcacgtattctagacttcacccttgactcgtgcaagcaaagaggacaacaagacgtctatcatgaactgcatgagtctagcgataagacaggagcaactctga

SEQ ID NO: 176229 - DNA, 762 bp, Arabidopsis thaliana landsberg
atggcgtctcgtaccgagaacagtagtagcaaaagaacccatctttcaaaaccttgtctctcctcctccattgatggatttgaagatcgtcagaatcgttcttcagctctttctgttcacttaaaggctctttctacgagtattaaattctggggttggaggtttccaaacaaaaagttcaagtcttgggctagaaaaatggcatctttgcacgaacccatttggagaaaagctgggatttttgaagctgttatagcttcaacatacaaaatccctaaagacacagatcttgttctgggtttagctgagaaatggtgtccagacactaaaaccttcattttcccttggggtgaagcaactataacccttgaagacgttatggtgcttttgggtttctctgttttgggtttgcctgtttttgccaccgtggatagctcaaggaaggagattatggcgaagctagagaaagaatggaagaagattaagaacgataaagtctgtctggtaaccaaattagcatggatggagagattcatgaacagtggtgatgagcttgagcatgttgggttccttgtgttgtggcttagctactttgcctttccatcacacttatttcatatctctgaagctattttgccagtcgctgttcatctttcaagtggaactaagatggctcttgctcctgctgttcttgcacacttgtatgcagacctaagtctcttgcaaggccacattagagttttcagtgaatcgcttattaag

SEQ ID NO: 176230 - DNA, 109 bp, Arabidopsis thaliana landsberg
atggccgtcttcattgttcctgatcacaagtccatctaccgtgaggtgatcggagtacagcaactgcactgtccagaagcctgcgtttttgaaagtcacatgctgcagg

SEQ ID NO: 176231 - DNA, 664 bp, Arabidopsis thaliana landsberg
atggaccaagacgccacaagtgactactacattgttgccagtgctagatttgtgaatgaaacagtgtggcaaagagtcactggtgttgccattctccattattctaattccaaaggacctgtttctggtcctctaccagttcccaaaacagatgtttctagcccgtggtcagcaatgagccagccgaagaccatcaggtttgtttttaaacttttttggaacaagtgcatagaaatgttcccttcttgttgctacaactagatttttttccagtgaagctgactcttttgatttgcaggcaaaatacatctgccagtggagctcgtccaaatccgcagggatcatttcattatggtcaaataaacatcactaacacatacattttgagaagtttgcctccaacaataattaacggggcacttcgtgctacacttaacgggatctcatttgtgaatccaagcactccagtgaggcttgcggatcgcaataaagtgaaaggagcttataagctggacttccctgacagaccttttaatagacctcttcgtttggatagatctatgatcaacgcaacatacaagggctttatacaagttgttttccagaacaatgacaccaagatccagagcttccatgttgatggctattcatttttcgttgttgg

SEQ ID NO: 176232 - DNA, 245 bp, Arabidopsis thaliana landsberg
ataggcgacaggtccgaagaggtccatatgcagcagctccaggggtcttgaagtggtcatcacgttcttgctgtgatgtgctcctcccacttgtttacctgcttgacaagctgcacaaggtctatctttttcgaaatgcacgttagtcaaacctatcacgtgttctccctttagaagcttgtgaaggttctacatccccacatgtgctaagcggcgatgccacagccagcccatgcaagtcttag

SEQ ID NO: 176233 - DNA, 576 bp, Arabidopsis thaliana landsberg
atggcctccattgttaatgttacgagtccaatacttacgagaaatatcattaccaaattcaaaactccacggctcaaaccagatctaccttctctacaacattctggccagttcaatgcaatcaagaatgatccaataaaaatgataaataagtacgcttcaaggagaaatatcgtggtttcatgtttggatcgacctaactctaggccgaatcaaatatctgggtatgatgctgttatgaaattttatgcctctataaacgagaagaatcaagatcaattaagtagttgcatctctagcgattgttttatcgatgatttctcctttccaaagccttttcgagggaaacaagtaagattttttctataagatctctccgcaaacttttaaatctatacgatgtgtatacatattatacatttcaagatttgttttgtgaatgaattgaaatatttttgcaggaagctatggagttcttcgaagaacttgtgaagagtatgggacaaaacgttaagttttgtgttgaaaatgtgtgtgaaggtgatggacatagtgctgctgttaattggcatcttg

SEQ ID NO: 176234 - DNA, 94 bp, Arabidopsis thaliana landsberg
tttaacacacaaattttttgaacaaaacaatatcatcaaggacggtgaagaagtagatgaacacaaggcatcgacctcgaggatggcttcataa

SEQ ID NO: 176235 - DNA, 116 bp, Arabidopsis thaliana landsberg
aactcgaacctaaattttttgaaaattgtcggcgacactattaccaatctctagctgatgagttggggctgatgaacgactatgctgatggcgatgaattattaattttggcctaa

SEQ ID NO: 176236 - DNA, 329 bp, Arabidopsis thaliana landsberg
atgattgatcctaccaatgctctcaacttcattcacaaaatccttaaatcgccacgtgtcattgccgtcgctgagccttctaacggcgacaacggtggaggacgattccgccgccactactctatacacaatcccgcttctgctcttgcctatcacgtaagccgatgctctcagcaaatcctcaagctcaagctcgaatccttcatcaaacgctacgaatttaccttcatgcccttcttcgtcgaactctgaaaccaccgtcgtcgtctttgtctccgaattgtacccatcggagcttcgttttctccggatcagccatacagagagag

SEQ ID NO: 176237 - DNA, 768 bp, Arabidopsis thaliana landsberg
attaatggaggagccagctgcatatggaaagctggggctggcaaatctcttggaacttagggaagaatgcttaagagaattccagtttgttgatgcctatagaagcatcaagcaaaggtaaaagatagtcttatctctcccctgctttgagttgctcttatgctctctctttcttcgaaattgatagggagaacgaggcatcacttgctgttttacctgatttacttgaggagcttgattcgatgagcgaggtctgtgacctttaaccttcctctctttgtaggtttatggtttgctactaaacgtttcagtgctatacatgagacaacttttcttacttggtgtttcaattgtgctcggatttttcaggaggcaaggttgcttacacttatagaaggtgttcttgctgcaaacatatttgactggggatctcgagcatgtgtggatctatatcacaaaggaaccattattgaaatatacagaatgagtcgcaacaagatgcagagaccgtggagggtgagagacaagaccaccctttttccccgctgaggttactttttcctaactgttaatttgaagctggaaatcttttttggtccgtaaaatcaggtagacgattttgatgctttcaaagaaaggatgcttggatctggaggtaagcagcctcatcgacataaaagagcattactttttgttgataactcgggagcagatgtcattcttgggatgcttcctcttgctcgagagtttctccgtcgagggactgaa

SEQ ID NO: 176238 - DNA, 563 bp, Arabidopsis thaliana landsberg
atgaacaaatgcaataccatcatctaccataatatctcaactaccaacgatgacataaacaataacaacacaaggactgataatatggatgttgtcgacgatgacataaacagagacaagtaatatgaagattttcgattgcaaatttttatattgtttttattgtttaggagcacaaagatatataacttttttattaattggatttaatttttttggctagggggaacaaagaaactactgagactgccccagttgcaacagaagctactacacatggggaaaaagatggaatggatgtgggaggttcgacattatgcgagcaaatggagtcagctactgttacagaatcttcgcaagatgtgaacgcagccacatggtccacatctactcagagaagctctgggaaaaggccggtcataccaactccaaagatgatagagtggcaatggagtagtgttggtggtcgcagaagcggtggtcgtagaggtcgtggtcgccgaggccgaggtggtcgtggtcgtgaaggcggaagcgcaagcggtagtggaaacctcatctag

SEQ ID NO: 176239 - DNA, 89 bp, Arabidopsis thaliana landsberg
atgtccttggacaaatcgttgatgtgggaagtctcgatagcattaaagcgaaaggcaaagataccgttaagttgagtttcgaaatatag

SEQ ID NO: 176240 - DNA, 315 bp, Arabidopsis thaliana landsberg
  unsure (1)..(315): unsure at all n locations
atgtttatcaccatcacttctgccacggactggactcctgctcctgctcctgcggacgcttgcatgtctactccggtcagaatccctgtccctcctttcacggcctcgtgtttcgccatccctgttcgaataatcagnnnnnnnnnnnnnnnnnnctctgtgctcacgagcatgccgatcaggtccctatccttgtagtactgccattgcacgttccgatccgagcgctcctctccgaatcatgatacgctcagagctcgactccggtgcttcacggtggcgatttccacggtcgcttccttgtctgtttggaag

SEQ ID NO: 176241 - DNA, 171 bp, Arabidopsis thaliana landsberg
cgtgtcatcgccatgtggggccatgtacgcagaacgtccgcctaccttctctcaatgatcaggcgcgcatctcgggttgttgcaaccgcgtgcgataaagttcgaatgcagggctctgtcgggtcttcaatcgacccagctcggactcctcccgtcccatacataaaaccg

SEQ ID NO: 176242 - DNA, 111 bp, Arabidopsis thaliana landsberg
atgcctttcgtcacagccattgctcggggtctgatcgagcgagctagctgtaacgacgtcagactcagtgctaaagtcatgcgtcttcactttcatgactgtttcgtgaac

SEQ ID NO: 176243 - DNA, 575 bp, Arabidopsis thaliana landsberg
atgagcggtgcgtcggggagttactccaatggaccagatggggcgcaggcggtcttcatgttcggcccatcggtgctcggcacgccgaaactgccgcacgaactcggccattacttcggcctaccccacaccttctctctgccttcctcgtccctgaaccctgagactggcgtcgccgcaactcgcggagaccggtgggacctgattgacggtgaccgcgtcggtggaaccggtggtttcaggttcttcacctcgccagcggatgccaacaactggacgagcagtcaagtctacccgatcgatcgaggcgacggaaaccgttcgttcgactccagcggacgcattacctgtgtcgtggccccctccccagcgtcatcttacaccgagacactgagtcacaacgattccaggctcatcgggaagaccacgttcgtcacgaacagtccggacaacccaggtggcagcccgccctcgctcaagtatgggtccaacatcatggggtacattggccccaacggggacaatccgaagtcgctcagtccgtcacaagcgatgatgattcgacggacgctccg

SEQ ID NO: 176244 - DNA, 1127 bp, Arabidopsis thaliana landsberg
aatgtcaaaacatttaaggacgtaaagggttgtgatgatgcaaaacaagagctcgaagaggtagttgaatatctcaaaaatccatcaaagtttacccgccttggaggaaagttgccaaaggtatagactttctttgttactttgcatttgagaatatacaattgagaagtctttgcatttgattttctcccgtctactaaagttagcattttgacctgaaacatttctgaaatgtttgcctccagggaattcttctaaccggggcacctggtactggaaagacattgctggccaaagtaagttctcacatagttgttatattgtcgtctcttgttgaattggttattacttattatgagtgtgtgttttcacagtcatattccacttaataataaattcttattacgctaccaatattctgattgattttacaataagttaacacggtttaaattttgaaggcaattgctggagaagctggagtacccttcttctatagagctggatctgaatttgaagagatgtgagccttcttctagctatctttctctggcatttgccttaggcaacattatcattatctatttagtaattatttcaatcaggtggcttcttcaataatggataatgtcttctaatatcatgtttttttcccttcgatttacaggtttgttggggtaggagctcgccgtgtgagatccttgtttcaggcagccaagaagaaggtatgactcaacttgtcactgcttatcagctattttaaaagagtttggttgattaggctaccatgaatgaacttttatatttaatgacgatcatgtgttacaggcaccttgtattattttcattgacgaaattgatgctgttggatccacaagaaaacaatgggaagggcatacaaagaagacattgcatcaactacttgttgaaatggatggttttgagcagaatgaggtacttgttgattaggagtagtgtatcttgtgattacttccgctagtttgcaggaatataatagtactttgctttctattttggttatgcagggaataatagttatggctgcaacaaacttgcctgatatacttgatccagctctgacaagaccgggtagatttgatagacat

SEQ ID NO: 176245 - DNA, 983 bp, Arabidopsis thaliana landsberg
atgaaagccacaaactttagagcagacgacggcattgaattgtggaatctggcaaagcattgtgagtgagagaagagtaaagtaaattttccggttcttacatttccactataccgagtcctggtttagacaaatttctttcaccgaaaaccaatcaaccaaaccgtaaccgaatcctgtgtgaattaaatttattgtcttataaaaattttaaagtggatagaaaagattaacgactgactgttacgtgttccgtgtttatagcttagatttgactaaactacttctattaatttagaaataaattacatttttttgctttttatcaaacaacttcataatacttgcatatttcgcggatttaattacgtttgaaattttaaatttaaatattaaaattatgatttaatagataataaaattattttagttgaacttaattttcagtaaaaatgaatttaacaagaatttcaatatattgaataatctgtttgtatattgttttctgtaataaaatatgcgcaagtaaattttatattagacttggtataattatttaattagtagattttaacttgattttataaacttatgagaagtaagagaaatatttgttttaatcgtatggattctcaataaatttagaagaaatatttttttcatttcttatttattttgaagcacacataacaaaagagaagaaaacaccggtccataaaacccaaaccaaaaacaccaaaggaaaaaaaaaacataatacttgcttaaaccataaaacaactacaccataactcttcttcttctttcattatctagttggaaggagagaagaaaatggcatcagaggtcctcttagatcggaaagccttctcaacctcgggatccaccttgaacgctgcctgcaaaacctccggcgacaaagccttccacaccgaagtcctcccggccaaatgagtgaatattggactgccaaaaacccataa

SEQ ID NO: 176246 - DNA, 151 bp, Arabidopsis thaliana landsberg
atggtcacagctcatgttgaagtcgggaaaaagctgttttgtatcgactggaagaaccaccggcagatgtcggcgttcaatgcggaagacgaaacctgggaagtggtggctcttacgctatcaggaagctcgagggccgggtttcagattg

SEQ ID NO: 176247 - DNA, 54 bp, Arabidopsis thaliana landsberg
atgggctctaacttggaatttcgtatagacaattcaaacaatcttgttgtgtct

SEQ ID NO: 176248 - DNA, 341 bp, Arabidopsis thaliana landsberg
cgcaactggcggctcgaatcggaattgcgcatcgatcgcgaaacccgcgtgctcggcggcgacgtgttcctgccggcgatccgcaacggctggctgccgagtttcggcgcccatctcgaacacacgatcgcgagcggcgaaatcgacgacaagatccgcaccggcgcgcgcatcgccagccccaacaagctcgatgaaaaagcctgggcgattgcctacctgggcgaccgccagcgcattggcgacagcttccagaccaaccggcaagcggtgatcggcagcttcacctacaccaagcggcggctcgacaatccgctcacgccgcggcgcggctatgtcgc

SEQ ID NO: 176249 - DNA, 387 bp, Arabidopsis thaliana landsberg
ctgaaactggatcagtacgacggcaccgactccaaggtctacctgggcagctacatcgccaagtacgggcgccacctgggcatcaacgacgcctccatccagctcgaagtggaccgcatccgccaggtcgacgcgccgctggtgaccagtggcggcatctcccattcgcgcttcctgttcgaccgctacgccactgcggccacctacgtggtgctgacgctggtgatcgccgtgcccacgctctggttcggcgtgaaaagcacgctggatcgggacatcacccatttggccccgctggacgccgccccggccgcacagcaggagcaagccggcaccagcacaaaggcgatgaatgccgccgaccgcgcccgccagccggcggcgccg

SEQ ID NO: 176250 - DNA, 131 bp, Arabidopsis thaliana landsberg
taagtgaacttcatcgcgccgaaccacgcgatgactatgacgaggccatagcgggcgacgagcgccgcgacggcggtcgttctggtgctcctcggctcaccaaccgcgatgtgtccggcctgatcgtgtga

SEQ ID NO: 176251 - DNA, 320 bp, Arabidopsis thaliana landsberg
atggcttggttcagtggcaaagtttctctgggaggattcccagatctcactggcgctgtcaataaattccaggagagcgttaaaaacattgaaaagaatttcgacaacgcccttggcttcgacgacaagtccgattctgccgctgaaggtgttctcttcgtctcactttttttccaatcaatacacataatattatcatccttcccaataatctgctgttagtcagctgggaatataggatttgattactcaaggcgcatttgttgataggacctgccatttttcttcttcttctttatgtaggatgtttagatcaataa

SEQ ID NO: 176252 - DNA, 474 bp, Arabidopsis thaliana landsberg
accgccgctctggccaatgatctgatcgcttcgtacgatcgcaaactgaggttgaagctcgcagacagggacaccttcgacaacttgaagaaatgtgcggaccaagcaaagatcatctatgcaagggatatgaaggagatggccgcttttaaggatgccgatgagacccacaaggcggagatcaactcgctgaatgacgaggtcaccagacttaatggtcacgaggctgatcttttgaaagagattggtgaagttcaggtcgcacttgtcgcggtaaaagagcacgaggagagagaatgtattaggcttcagaccgaccgagctgcgaaggtctcccatactactaggaaggctcaaaaccgtctcgacaagatgaaggcctatctcaccgagcaggaagagatcgttaagcctaaggtgaacgctctgaaccaagcccatggtgcagaagagatagtcagaatccggatgtaa

SEQ ID NO: 176253 - DNA, 828 bp, Arabidopsis thaliana landsberg
atgggtgaggcaataccgaaggaagtgaaggatatttgggacagatggaacatacgtagtctggtgattctcagtcttgcccttcagacaatcctggttcttctctcaccaaacagaaaacgaactcaccggcgttttttccggttgctcatttggtcggcttaccttttagccaactgggcagcagagtacgcggtgggacagatatcagataatcaaggaagcgaaccgcaacccaagaacaccgatcttttagctttctgggcaaccttccttctcttacacctcggtggtcctgacactatcacggctcttgctattgaggacaatgacctctggctcaggagcttgttcgctcttgtttgccaagcaatggtcactttctacgtctttatgctctcaataccaaacaatcttttggtacccacatcgctcatgctcgtagccggagtcatcaagtatgtagagaggataaaagcgttgcgtggagcgagtcttgaaaccttcaaggactcgatgctaggggatcctgatcctggaccggattacgcaaggctcatggaggagtattcagttaggaagatgcttagagagcctacccagataattaggatcgaggaggccgagagaggtcaacgacccaaggctttagtgaggccaccgaacgagctgaccgatctcgaggctgtccagtacgcttacaagtacttcaatatatttaaaggtcttgtggttgatctcatgtttagctctcaatctgagcagttgaacaacagcaaagaattcttcaactcattaagaccaaacgaagctttgcgggttttagag

SEQ ID NO: 176254 - DNA, 433 bp, Arabidopsis thaliana landsberg
agattgtgactacaagttctggatttagcagttgggtgaagacatgttttattgctagcagtgaaagttgttctctagacgtagagttacttgctgcacttcagcacctcttggttgctcgacctactgaacatcaggttagtagatagttggaattttttatttttatttttatttttataagctaatgtcttctttttatttgaaagttaatggagaagatgtgcgtatgataactactatatgtaaagcctggttaaagtcattttcctgtttgcttcttacctttttgagttgcaggatcttgtggacattcgaaaactgctcaaaccggctctagaatattctttatcctcaaccaggcctccacagactcttgtagctcatcaaaaactcctgtgggcaattgatgcacatgcctctgaactaggag

SEQ ID NO: 176255 - DNA, 410 bp, Arabidopsis thaliana landsberg
gggaactcgacctcgccgaaaccactcgaccgcctccggaaagaattactccgccgcctcaatcgagtttcacgactcactcaaccaccgattccggttcaccgtgaatcactccaccacgtatcgccatctctcaccaaagagttactcgactcaatttcactcgagttcctcgctatactcgaccgtttcactttgccgttcgccatcactttattctcaccaaactcgaccttctctgcgccgccagaatcgagttccctgcctcgttcatcgtcgaagtctcaggaactactcggttacaaatgcaagcctcgaccgccgaattgtggttccatcccaccaattccgactcaacctcctacaacagagccactcaaattcaccgacggcttactcgaccaacctga

SEQ ID NO: 176256 - DNA, 698 bp, Arabidopsis thaliana landsberg
atggctcgtactaagcaaacagctcgtaagtctactggaggaaaggctcctaggaagcagcttgctacaaaggtaagactcgggctctcacatgtgatctgagtagcttgataaacacatttctagatttgttctaattggtggatgttttaatttaaggctgcacgtaagtctgcaccaaccactggaggagtcaagaagccccatcgttaccgtccaggaactgttgcactacggtatgcaatctgtttcttccccaaattcaattgtgtttttactttattgatatcgtcattgattaaactctgtttctctgttttattgatcttgattgacagtgaaattcgtaagtaccagaagagtaccgagttgctgatcaggaagctccctttccagaggctagttcgtgagattgcccaggatttcaaggtaatgtgtctgttcgtctgattcagtctacaaatggatttaactttttacttgttttgtcataaacctgtgttcttatcttgtctctttgattgcagactgacttgcgtttccagagccatgctgtgcttgcactccaggaggctgctgaagcataccttgtgggtctctttgaggacactaacctttgcgccatccatgccaagcgtgtgaccataatgcccaaagacattcagctcgctcgcaggatcagaggagaacgtgcttaa

SEQ ID NO: 176257 - DNA, 421 bp, Arabidopsis thaliana landsberg
atggataaagactcggatggtagacttacggaagacgaagttagagaggtaaaaagtttaccaataaggtcttgattatttcaaatgttgatttctgcgtttacatgcagaaaatttttcacatttttaacaaataaaagatttcattgtttatgtgtgtaaattttaaacacaaacgaaattttgctaaaggttgcaagttcctataagaaaacaaaaaatgaataataaattttgaaaaatgtttacgtgttagaagagtttttgaactctactctgtatttttgtgtttggcagatcatcaagcttagttcttctgccaatcatctgtcatgcatccagaacaaggcagatgaatatgcagcaatgataatggaagagcttgaccctgatcatatgggatacatcatggagaaagatg

SEQ ID NO: 176258 - DNA, 1217 bp, Arabidopsis thaliana landsberg
atgacttttacaaacgcagatgcgaaacttacgtccctcggtctgttggtatgtcttacagagtgttattttgttcttgttttcatgatttttgtttgtttcctagttctctggcttgtcatatactgcttcattcccatatctcttaccatgagacctgactggtttttctttttattttcataaaatttctagggacatgccaaaaaaagcaatgctgccgaggaaattaccgcagaaaaaactcaaaatggtatgaacggcactcaagcaactgaagtagcggttgactcagctgtcagttctgagcatacatcagaaatgatacaagatgttgatattcctggaccattagaaactgaggaagttcgtcccatgaaaaaggcaaaatctgaggaccaaaagaattctaaaactggagatgttggtggagtttatgatggttagacttacttttctacatttccaaatgccaattaacttttgctagataatctcagatagttgcatggtttgaatacttataattactgtgtgtagctatatctcttagctatgtattaaagagaaaaagttgacgtaagaagggtgtgaggcaagaaaatatcctaatgttccagttaattgtattgatacaggcgtgaaattggaagaggaaacgaaaaagaatgggtatcctacttcaaaagctaacgtagaagatgaggatagcatcaaaattgttgaaactgatagtagtctaaagttgcaccctcgagaaaagaaaaagctaattgattttagggataagttgtaccttgcacccttaacaaccgtgggcaatcttcccttccgaagactttgtaaagtgttgggagcagatgtgacttgtggtgagatggctatgtgcacaaatcttttgcaggttaggccactaattacactcacagctatgctgcaagaatgattaaaccttttctttgtcataatgtgaaaacctgcaaaatgatttgttatagggccaagcttctgaatgggctctgcttagacgacattcatcggaagatctgtttggtgttcagatttgcggttcttatcctgacacggtgtcgcgcgtagttgaacttatagaccgagaatgcactgttgatttcatagacatcaacatgggttgcccgatagatatggttgtcaacaaaagtgctggttcaagtttttcaacaaaccattacggatga

SEQ ID NO: 176259 - DNA, 367 bp, Arabidopsis thaliana landsberg
gtgttgcccgttctgcgggtccggacccacgaccggtttctggaggagatgaggtacgatgagaggtacactcctctcctacagagggctggcttggacgtcgtatcgtaccaggtttgccgtgggctgcccaatttcaacccagcggcgttgacggctctggtcgacaggtaaagacttctctagttgtttaatatttacaattatcaaatctactttgcatactaatgattttgtattcgtttgtcttccaataggtggcggccagagactcacactttccaccttccctgcggtgagatgaccgtgacgcttgaagattgccagaagattcttggtctcagcattattggtcgtccagtgaccg

SEQ ID NO: 176260 - DNA, 376 bp, Arabidopsis thaliana landsberg
atgagtatggaaattgattctgctcctgcggttacgcagcagtcgccaacgtttaagttcgttgacgtcggagaagcccaactgctggattcgggatacgctacccagtccgcatcgcccgacaacaagttgacggagtcactctcccctgaatctcccaccgctcgttccggaccgttggcactgaccgaccttgccgaatttgacaagcctgttgacgaacatactctgtctcgcttccgccttgtctacactcagattgagaagccattgctggcttacattcgccggaaaacttttggaaggagataccggccaatttctctacgattaatgatcttaggacggaatgaggctatacagaagacgtactgcg

SEQ ID NO: 176261 - DNA, 86 bp, Arabidopsis thaliana landsberg
aacatctcgttggattgaagaatgcgaagaagaggaagctcaagagaagcattctagcctacagttcttgattcttgaaatgtcag

SEQ ID NO: 176262 - DNA, 203 bp, Arabidopsis thaliana landsberg
aggtgaagacaaatgtgattggaagcagaaaagaagagaaggaatcgatgtttcatgggaaagagactcatggaagaagtgaagacattgatgagaagacaagggttgatgatgttaaaggacctggtgttctcgggcgtatgatggaagaaatggaagccattgttgacgctgttactcctaacaaaagttctgacaagtaa

SEQ ID NO: 176263 - DNA, 284 bp, Arabidopsis thaliana landsberg
gaagttgctttgcgccaccaacaaaatatcccaaggaagaagacgaagaagaagaagaggacgaagtgattgagtggaaagcagtgtttttcgggtattggcctggactgttacttggattggtaatggcacacgttattgcttcattcaagccgaagtggtttgtcaagatagttggtccagctaagggcaagcaagtagatccagttagattgtttatgaatctggattcaagatgggacagttttaataataaggatactgtagaagaagaagtgatatga

SEQ ID NO: 176264 - DNA, 1257 bp, Arabidopsis thaliana landsberg
atgaatccgagtgaaaaaacccttgaatattcttacgtacagattaagcttgtgttttaccaatatcgtgaatccagggcaggtatgttggtgagtttagtgagagaaaccctccattcttgaatcttgtcatctggatatccttcaccaagctcttgaaagggttccgcgagatatccagtctgttttctaacattataaggatcaactccgtagaaaatggggaggatggaaagtctaccttcgctgtgagagtttacgatcttctcgagctgattgaggcacaaaacagagattggatagctctctgagactacaacaaccgcgagttttgactcctctgccagaaacgagtcatctttgaaattggtggtaatgtctttttgttccaaccaacggtccagaacagagacaaaagtttttgaggggtcttcgctgcagaaactaaggaatacttcaaatttggaggatgaagacattgctaacgagagattgagagttgcgaattgttaatttcttgaattacaattctcaaacgggaagaaatggaaaacgaaaagtatctgtttgccaaagaaagcgatgagtagaagctgccaaagtgcgcgagagtcgagatttgactactcaactatcgtgcacttaaaggtacgaaggataatataaacttttgttttgtattgtttaaggttaatttatagcagagtttgtttttgaacaggataacataaactatcttcaaactaactcacttcaattttgattttcttttttattcagttaactattttaaaaatcaacctggctctattcgtatcatttcagcgtggcttcatagcgggagctccgagacagctgctttgtcagaaacctccatgtgatcaaattgacccgacccggaaactacgaggaatactaaggggaaacaaacgaatgcagaatattttcccatttttctctttccatggattcctcgtcatcatcttatgcaactcgtctcaggcactacggatgtcttcctcagttttcgaggggtagatacccgccaaaccatcgtcagccatttgtatgtggctctacgtaataatggagttcttacttttaaagatgatcggaagctcgagattggcgacaccattgccgatggtctagtcaaagctatacaaacttcgtggtttgcggtggttattctctctgaaaactacgctacttcgacgtggtgcttggaggagctccggttgataatgcagcttcaca

SEQ ID NO: 176265 - DNA, 398 bp, Arabidopsis thaliana landsberg
atgaattgttcaatcggaaactggaaacacactgttctctacttaaccctaatcgtatctcttctctacttcatcgaatccctaatctcacacaaattacacatcaactacaacaaaatccgcctgaaaagatctccgaatcttcctctacgattccgtgacgatggcacattcaaaatcctccaggtcatgatttgtttcatcctctatcatcataaattgtgcaattcgctgctcattgatatgattaatttgatatctaacaggtcgcggatatgcatttcggaatggggatgattactcgatgtaaagatgtgttggattcagaattcgaatattgttctgatctcaacactactcggtttcttcgtaggatgattgaatctgagagaccctga

SEQ ID NO: 176266 - DNA, 49 bp, Arabidopsis thaliana landsberg
atgttctgtgtacccttgatcggtaccgccttaaacaagaccgtcgtag

SEQ ID NO: 176267 - DNA, 75 bp, Arabidopsis thaliana landsberg
gaggggaaccggttgcttgcgtcggctagtgatgatgggatggtcaagatttggcagcttgcaactaaaccgtga

SEQ ID NO: 176268 - DNA, 288 bp, Arabidopsis thaliana landsberg
ctcctaaagaagcatggctggaaggaaggaactggtctaggaatcactgaacaaggtatattggtgcctctacaagcagaaccaaaacataacaaacaaggactaggagctgaaaaaccagccaagagaaaaccggcacagcctcaggatacagcttttgaagaagtatcaaagaagagcaagaaactttctaagaaattagtgaagatgatcgagcacgaaaaacgattggcggaaaacgaatttgaacgagccttccgcagggagttctggcctgataatgtataa

SEQ ID NO: 176269 - DNA, 1159 bp, Arabidopsis thaliana landsberg
ttcatcaatcatctggttaatcagctagcaagacaccagttcttgaaattagcatgtcagctagaaaagaaaaacatgcttggagcattctctctgctaaaagtaattgaatccgaacttcagggctacctctccgccacaagaagccgtgtggtacggtcatattcatagttaccgtccatgctttcctgcaacttttggatattgaaactaattcatcgtttcactatatatacaggggcgatgttcggcactgatacaagctgcatctgatgtgcaagaacaaggagcagtagatgaccgtgacagctttttacatggagttagagatctcttgagcattcactcaagtagtcaacactatcattttacacaaattatttcccctttatctgacattttccaaacctagttttggctgataatcttcatctcttgctgttatagatacccaagccggattatcaacttatgtctcagctccagccatcattcagcagatagttgctcttcaatccgatctgtcgtctcttcagtctgacctcgagaattcccttccggatgaccgaaatagatgcattaatgagctgtgagtccagaattctcaatctcttttcacagaaacaagtatttacgatgctcatatatcacttttgtctcttctctgtttctcaggtgtacccatattcagaatctgcagcaactgctctttgcgtcttcaactacggcacaacccatattgacaccttgggtaaaataattctcagttaccaattttagtcgttaatctaaaccaatatatgaaagtttaactaaatgttgtttccttcatgtattattagccactgatgaaagaacttgatgaaatggggaaaatcaactccaaactctctacagcagtggaagaggtgacgcttgagcaccgcaataaaagggaggtgagtctcaattcctctcctatgaatgtatatatatagattatagtgaaatagacaatctgaatatactactattgttgcagattgtgaagcatcacgccaaggacgtggaacttcaaaggcgggtatttgtggactttttctgcaacccagagcgattgagaaaccaagtgagggaactcaatgcactcgttcgtgctcgccaagcctcatcatcgtag

SEQ ID NO: 176270 - DNA, 1677 bp, Arabidopsis thaliana landsberg
ggaggtgacaaaaatgattctcaagaatcctacgaggtacaaaaacggtattttaaagggaaagacacaaagaacgcaaatagttctgaggatcaaggcaaaaggtatgctacctattgcttagtattattcatcttcatgcttgccgtgttagtttcatctatataagggtgactactcttttgttccacgctggtcacaatgatgtatttgttccctctgcattagtataagtcgtggattctggggattctttgtacggccttcaaggaagaagcttgatcctgagttatcggtaagttccattttgtgatcctatctcaactattctggcaacgggctttgcagttgtagtatcctgaaattttgctggtgactcttctacgtagcactctgtgtttgttcagtctgttacttagcatatactactcttttgttttcatttatgcatttaaaatccagtcatttccagtctagcacggataaaggtttcaggaattagtttcgcatatgcagggagatgaatatattgggaaatccagtggaaacttacttagcatagactcggaaccaattgagatcagccgattcgaaattctaaggaacgagctaatagaactcgaaaagcgggtcaaaagaagcactgatcagtcagtagatgaggaggttagtaactgctgcaagatttcttagctgtcaaattgctagtttcaataatgcactcttttcatcgtaagttaaataaaaagctcataccgaaaaggaaaaatgaaaatactatttatcatttcagttgagttaaccatcattttagtaagtcaaaccctgtatgatgaataatcccgcactaggataattatgtgttgtgctcttagctctgttactttcatgattaaacttctcaacatggtagaagatgaccaatcaactcccttatagtaatccaaaatgttgggtcttgcgtcttttgtttcaccagtacaagcttccaagtgtttgttcatatgttacaggaaataatctctgaggatacacctcaatcaagcagtagaacggaaagtgttcagttggttcagactcccaagaaggaaaacatgatggagaaaactcttcaaaagctaagagaagccaccacggtatcaatatcttcaactaaagactacaactatatggcgtgtttctgtgccattgggtcattgtcttttcctcttgtcagctttgttaacatttttccatttacaggacgtgtggcaaggtactcaacttcttgccattgattcagcagctgcagtgcagctacttcggaggtctctgattggtgatgaattaacaggaaaagaaaagaaagccctgcgcagaaccatgactgacctggcgtcagttattcccatcggtattctaatgcttcttcctgtaagtcaaaaataaccttacagataagtttattttcacttctttttttattatacacttttttctgaatcactccaagctacatcttcaattagttgctttgcacaatcttatggcgataacctctgctgtttaacatttctcattcacagctccattttctaatctatgggactaatatatttagtatgctattctgaacaggttacagcggttggtcacgctgccatgctggctggaattcagagatatgtaccaggcctg

SEQ ID NO: 176271 - DNA, 757 bp, Arabidopsis thaliana landsberg
atggttaatgctctgaagaaagggcaaattggagtctgggattttggaaaagtgtatgagaagaatgtgtatggaaacatacattctgttcaagttaataatatgcggtaagtttttaaatctggctttcaatcttacagtatatgttgtggttttactttctgcattatagtatctggaaacaaaagctcatgtcttttgttttatcaaatttatcttcttttgttggtattgcaggtttagtcccacaaatgatgacatggtttattctgcatcctctgatggaacaattggttatactgacctggaaactggaacttcatcaactttgctgaatctcaaccctgatggatggcaggtcacaccatcgtctcgtttctctaatttgtcttctctgattcatttaacttattacgacatatcatcggtttatagggcgcaaacagttggaaaatgctgtacggtatggatataaactcggagaaaggtgtagtgcttgctgctgataattttgggtttcttcacatgtaagtgatttcatccccttgaactgtttgtagactagcctctttgttactgttttaaatgagtgccaaactgattttctcgtgattgcttttgtaaaaggatcgatcatcgtaccaataacagtacgggtgagcctattctgatacacaagcaaggaagcaaagtttgtggcctcgactgcaaccctgtccagcctgagcttcttctcagttgtgggaacgatcatttt

SEQ ID NO: 176272 - DNA, 497 bp, Arabidopsis thaliana landsberg
ttcctgatgttctatgcgtgctcactagatcctgaaaattgtggtgtgaagtttgccagtaagctgttggaaaaatttctctccagcaacaacaatcaagttactaggtgggtttcatgcttatccttcatggtaaaaatatctctgcacgatatcaagctaatattgttctctactcaccagactcaccgcttgtatatggttttgttttctcctcttactaagcaggacgaatgcagtgacatatctagctagctacttggctcgtgcaaattttttgtctgcttcttttgtggctagcatgttaaaaaggtagaaagagactgctagaaaaactggcaaaagatgattggtttgaatttaagtttcactttgttgtaacatagtttctcttttgctgaaatcctagattggtggacgagtgtgcggaatattgcggaacatgcaatgatgatgtgaagccagaagcacatcaagtgttctattctggatgtcag

SEQ ID NO: 176273 - DNA, 861 bp, Arabidopsis thaliana landsberg
gtatacaagggaggattgtttaaaactgcaactgagcataaagaacaaatccgctacttcagccagcaggtccaatttcaattctgctgtaaatagcagtctaattattttctagcttttcttttcttcgtttctaaatctttataccatatgatatctctcttaggaccttcgagaactttttagtcttcccaagggaggctttgatgtttcacctacacaacagcaactatacgaagagcactataaccaaatcaaactgtaagcaaacactgaattctgagcaaaaattgtgtcatgatggtttatttcgattcacttatctttgtttgttttttacagagatgaaaaactggaatcccatgtaaagtttctcgaaacccttggtatagctggagttagccaccatagcttacttttctccaagacagctcctattcaagcgatacagaaagatgaagaagaacaaataaggtgactctgtctccaaaccagctttttagttataaaacacttttctttcatctttcaatctcagtttctgatgcgttctcttacttaaaaaggagagaaacagcattgctcttgggacgcgcatcagcaagtatttcacaagacaccgtcatcaatgggtattaccaccaacagcctctttttttgtgtcaaatttatgttgtgttgttttgtataatctcatagatttgaaaaaaaactgcttctgacagggctgactatgctttcaagccaaaggatgtgaatttggacaagagaatcaacatttccccagtcgatgacaaggaattgtcagaaagcgtaattaaagcaagactcaatcgtttgacgatgctattacaaaacaag

SEQ ID NO: 176274 - DNA, 977 bp, Arabidopsis thaliana landsberg
atgggcataaaagtgaaggcagggttagatgaactagagtcatggtgcagccaagcgactgaagaggtaaaaacttgccttaaaaagttgtagtaaccaaacatatttagggagtgatttcacttgctactcttgaatgcagttcgtaggatcctcttgggatgaactgaaacacacaagacaagccgtagtgctcctggtttgtcttcttttcttgacagtataccactctccctcttctttctcgttcctgaatgtttatgggtttttctttcaggttacagaaccgaagtcaacaattacatacgatgatcttactattaacctttgctcggtaagtctctgcttctctgatgtaacaattccactaaagagtagaaggaaaattagacattacaaatgacaggtttcagaatcaaacatgcgcaaactcaggaatgcatggaggactttagattagaaaattaaatcctttgtagccttctgctatctctagaaggagccattaacctaattcttccaatctttctccgtctgtcaggttcttagtactgagcaattatatagaatatgtactctctgcaaggacaaagacgatggagatcataacgtatcaccagaggtacatagctctgagctctgattaaccaaaaaaaaagacactctgtattaaagtgtctatcttggtcttcacaatgcaggtgatttccaacttaaaacttctattgacaaatgaagatgaaaatagccgttccttcttgctggacgacgattccaggtactgactaaaatcatttaaaatttgttcggatatcttgagcatacgctcctaaataatttgccatttgtgtgaacacaacagcatcccttttgacaccgatgaaatctcgagctgcatgcaagaaaaggactttgcgaatgtaaagtcagcttcggaactcgctgataaccctaacttcctctttctcaaggaatga

SEQ ID NO: 176275 - DNA, 99 bp, Arabidopsis thaliana landsberg
atggcaattcttgaacatctcttcaggtccgatcattcttcttcttacgatgttgatgactcttctcagtttcagaaacttgctgaaaaagcttctatg

SEQ ID NO: 176276 - DNA, 61 bp, Arabidopsis thaliana landsberg
atggactggttgtgctgtgttgtttacgctttctggtccctggtgatcggcatgcgtagcg

SEQ ID NO: 176277 - DNA, 163 bp, Arabidopsis thaliana landsberg
ggtcgcgacctcttcatcgagttccggagcgacgaaggacccacgcggaaggacgataaaccgaggggcaaagggttccagtgcgaggtcacctgcgacgtgcccggcaagtcacgacctctgccggaagatcaggacggtggacgcaaagagggcagatgcg

SEQ ID NO: 176278 - DNA, 410 bp, Arabidopsis thaliana landsberg
atggatccaaacatcacaactattactccagtcaacaagttgcatcctcgcgatgatgttttagcttcaggaagttcaaggttcgggattcattacccaacagctacaatagtaaccgttggtggacactttttcttattgactgatctctcattggtgtggatttggtttgcgaaatccggttttgcaggtcgctgttcatttggaggccacaggataaaacagagatggttgaggagaagaaggataagaagattatcatatgttatggtgacagcaagaagaaaggaaagaagcaaaagcgtggcagcgatgatgaagacgatgaagatgacatatttagctctaaaggcaaaaacataaaagtcaataagtatcaagcaaaaacaaccaagaagacaaaaacttaa

SEQ ID NO: 176279 - DNA, 321 bp, Arabidopsis thaliana landsberg
ggcagcaagcgtgggaaagttagaagtttgtgaatttcttattgaagaaggagcagagatcgatgctacggataaaatgggtcaaactgcactcatgcattcagttatctgcgatgacaaacaggtaaaattttcaatctaatcaaccttaaaagcaacatttctttaaagttaaaagtttccatggatcaggttgcgttcctgcttataagacatggtgcagatgtggatgtagaagacaaggaaggctacactgttctaggccgagctaccaatgaattccgacctgcacttatcgatgctgctaaggccatgctttga

SEQ ID NO: 176280 - DNA, 408 bp, Arabidopsis thaliana landsberg
atggcggtcgccccgggggttcctgggtgccccaccagcccttccgcggtgcttcggcggtgccgcggcggcgcgaggacccgggatcgtcatggagtacgcggcggattccgagccagttttcaggatccggcggcatcctgctccaagcgcgccgcggggattcctgatgctgcggggatacctggttcagcgcgcatcggtgttttcgtgacgaagtcgttttacgcactcaggaggtcaggatccgtgccgggctatcaggaacgtcagcgcaagcgcgcacgcgagcgttttgagcgtcagcgggcgatcaggctcgagcgtcagcgcaagctccgcaagtgggctgggatctcgctcgccatcgccgtgatcgtcgcgctcgccatcacccttcccctgacc

SEQ ID NO: 176281 - DNA, 191 bp, Arabidopsis thaliana landsberg
atggggaaaggagtagtatcagagaaggtgaagcttgtggtggcattgatcacacttcagttttgtttcgcaagcttccacattgtcttaagagttgctcttaacattggtgtcagcaaagttgtgtaccctgtttataggaatctccttgcccttctcctcataggtgccttcgcttacttcttcgaaaa

SEQ ID NO: 176282 - DNA, 209 bp, Arabidopsis thaliana landsberg
  unsure (1)..(209): unsure at all n locations
gcgctgnacatcggcggggacggcgacgccgttgccgatcgacgtgctctacgaccaccttgcggcgctggccggcgcaccccgacccgccgaggggccggcgccaacgggcatcggcagcaagcgacttagcaacacgcgcctgcgcgccagcggctgggcgctgcggtggccggacgcgcgtgacggctacgccgcgctgctggcgg

SEQ ID NO: 176283 - DNA, 451 bp, Arabidopsis thaliana landsberg
gctgttgtattcaacgaagaacatcggccacttcggtcttgcgttcaagtactacacgcacttcacctcgcctattcgccgctatcccgatctcatggcgcatcgcatgctgcggaagcatctcgatggttcaatgatcggaagccgcgagctcgcgaagtatgagaatctttctgtgcaatcatcggaacgtgaagtgaccgcggtcactgcagagcgcgattcgatcaagttcaagcaggtcgagtacatgcaggaccgaatcggacaggagttcgatggcgtcatcaccggggtgactgactggggcatctacgtcgaggagaaaggctcgcgctctgaaggcatggtgcggctctcaagcatcagaggtgacttcttcacccacgaaccggagaaatatcgcgtgaaaggcagccgaaccggaaagacccatacgctgggcgatcaa

SEQ ID NO: 176284 - DNA, 911 bp, Arabidopsis thaliana landsberg
atggtgaccggagaagcgttgatcgcgtacagagcactgctcagggcaacaaagaaatcattcgccggagataccgagatgctaaaagcttcggcgtccgagatccgtaagaaattcgaagagaatcgcctcgtggcttctaactccgacatcactcgccttctagaagaggcgcgtgaagcgacgcagttcatttccaccatgatcgtccaggctaaactcaacgaacgcggcggatacggttcgttctgactctttttatcttgcgcaccatctgtttgttgaaatgcgtgagtgaaagctcatatctttggaaatttgatttttctgtgtcgtagagatgaaagcaagtcaggaacacgcgggagctactttggagcttccatcagaggagatgcttcggaaaaaatctgtatgagtgtaagtctgaaattggattacttctcccttactcgttttgtttgatcgggaaaggtggatcctttttatgcttctctgtttgttttctcttttcacggccaagttgaatcaataagaagctctttacatacatttttggatgagattcgtccatttcaaaacaagaattacagaattcacttacatccatggctaatattgattatgttgtatgttagactgtagacctcacttttctacttttcttagaagcattgtcttgtcgtagagacccatcttttgtgtcattctcaaatcttagaagccttgtcttgtcgtagagacccatcttttgtatcattttcaaatccatgtcacttttattgttagattgaaatataattatttcctacataagcttaggtttcgtcatctatctagatttccttgtccccgattgtttcacagagtctgatgggaagtttgaaatagagttgacgcgagaagattga

SEQ ID NO: 176285 - DNA, 132 bp, Arabidopsis thaliana landsberg
atttttaatcctgaagagcgtgaaggagtggaaaagtttgctacaacggttaaagaaggtccaatattgtataacccatcaccatcctgtagtttggaattgaaagaaaagttagaaacttcacacctcaag

SEQ ID NO: 176286 - DNA, 99 bp, Arabidopsis thaliana landsberg
atggctagaaacagtgacaatgatatgtgcaaagaagaacggaagagagagagcttcttcaaggttctacagagagttgatatttcttctgagaacatg

SEQ ID NO: 176287 - DNA, 540 bp, Arabidopsis thaliana landsberg
acttgcattctaaggcttgatactcagactagtggatgggacaaatctatgcataagatttttaaaggcattcatggtattttttttttctcatttttatttaaatcttgcgcattagacaaatgttgttatgttttgtaatgattttgaacagatgtaacatacacaatcgatgcgacgaaaggattagcttatctctcaggcaagatcagccctgagattattctgaggattcgtaaagctaagaaacatgctcaattaatccacatggattatggtcacgttactcctcctcctcaaaactttctgccaccgtggcaacaatattcgccgatgtatcaacaggtgtcggcgccaatgtctccgatgtctcagtatatgaactaccaacaatttccgtatactgaacaacaacaacctcctgcgacgtatccgtattattattatccttattacgtaccggaaatgtggtattcttcgccgccgcagttaccgacgcgagacggcgttaccggcgagccacagtgtcggattttgtga

SEQ ID NO: 176288 - DNA, 304 bp, Arabidopsis thaliana landsberg
cttcgttaaattcagcaaatctatctctcacgatcgaacagaactgagagagagtgtgagcttagccatgtcttctgagagaccagacgaagagaaaccagagactcgcgatgttcttcgagtccaagatctgatccatggaggaggaggagcttcacctgttcaatcaccgacacgtctcggtccaacccgcttttcagaagtagctggagacaagattcttaacaccgggtcgaattgtatcgggtcggtcttgtcttggatcaacggagatccaaaccggaatttgaaaaatccggtttag

SEQ ID NO: 176289 - DNA, 412 bp, Arabidopsis thaliana landsberg
atgcgaggtgaaaagacacgggatgatgttcggtaagagattcgatgaatttttgtcaaaaccaaaagaatttgatttgaacttttctgaaatcatcatttcgttcttgacgggtttggtcattcttgcaacctacaggcactactgtcctatgttggtagctcagtggcagcatggggtgacccggaaagacttagttgataccttatcatttgaagctctcaaaaaggtatggtttctgtttaatgcaaattctgctataataaacgtcacggcttcttgtctcaaggttaatttttttgttgtttctctcttttcatcatagctctgtggaaatcttgttataccggctgatcggttcatccacgaagttgctttcaaactttggaaagccccaaaatatggagcttaa

SEQ ID NO: 176290 - DNA, 450 bp, Arabidopsis thaliana landsberg
acttccttcgaaaacttcgcttcactgtctctgttcttcgtcttccgcttcatctcctatgtcgctcgaagtctccagtcccaattctcaggtttacccctcttaattttcgagctagaaggtagatcgatcatgttactggttttgctctttttaacgttttgtgtcaaaattttggtcagtttcttgattgtttgatctattcaagagcgtattgggttacccaaggcgtgattgcatggaatgtggatgttggtgaagggtcttgttacttttacgcgagcaaaagtgctggtttatcattcagcgaagatggaatcgatggtgcttaatcgtatctctaagtctctgtgatggtttgatttatttattttaaaccaagttcattggctttcaggttatgatttaagaatcaagcttgaagctgaatccggttcacttcctgcagat

SEQ ID NO: 176291 - DNA, 173 bp, Arabidopsis thaliana landsberg
agcgatcgcaatcctgcacaagagtgaggatgctctcccaattcgaaaccacatcgaagaggcgctcgatttgacgctagagtgcgtctatcgccgatcaagcgggcacctgctgtcgtcacggcccgcgaattcagtttcagcactgcgccctgccaatgacaatgacaaag

SEQ ID NO: 176292 - DNA, 172 bp, Arabidopsis thaliana landsberg
gtggccaaggagagtgccgacgtcatatgcctcgacgacaacttctccaccatagtcactgtcgccaaatgggggcgatcggtgtacatcaacatccagaagttcgtgcagtttcagctgacagtcaacgtcgtcgctctcgttgtcaacttctcctcagcttgcttgatag

SEQ ID NO: 176293 - DNA, 1137 bp, Arabidopsis thaliana landsberg
atgacatttcttcataaaggattcgatgagatacggcgacttggtctcaggagcgaaactgaacaggtacatactattccttcttaccatcatttagggcatcagctttcctcgtgatgctcactaacaccttacaaaatgctatctcttgatcgtgtaggtggttcgacatgcatctccaactggggaaacaggaatgcttgttgtcgattctgtggtgagtgcattgctttattaataacattcaatacataattattttcaaagaatatggctattgtttaagtgatggttaaattcgaaactttttatcctaaatttgatatgtcgtgatggtaggtgccaagtggccctgctgataaacatttggagccgggagatgttcttgttcgggtgaatggaacagtaagttgtcttgattgcatcttcttagtgagaatttaaattttttttgcctcaagtaatcgagaattgtgatatcttttgcggcaacattagtaaagaaacgtattgtttagagattggttattacctggccacagaacgtattaatcagtgcacttagattgtctagttcctttttcctcagtttgctaaatcttcctttatgcgtttgattgttattacaggtgctcacacaatttttgaacttggagaatctgcttgatgacggtgttggccagatacttgaattggagattgaaaggggtggacaaccactatctgttagtgtatcagtgagttccattcttctatttctaactttggttttatgttcctcgtagtcttctaggatcttgtgtttagtttctgccctgtcacatactgactagaaaagcaggagactatgcaaagactagaagtaaaatatatgtagccgtctcttctcttttattttggtcattaaatttgttcttgtagctcttttcgtttcccctgatagatggagttcctcaatacttaatttgcatttagaattctgccttaatgtgatttatacttcctatctatcataaaaatcaagagccttatgtgtttgtgtatttcctgccacaggtacaagatttacactcaatcactccagatcacttcctggaagtaagcggtgctgtaattcatccgttgtcttatcagcag

SEQ ID NO: 176294 - DNA, 128 bp, Arabidopsis thaliana landsberg
ctttagctgaagactctgtctccgacgccttcaaagctaaattccggcgtttggcaacatgggtattgcataaagaagccgaattgctcgaaaggaagagacttttggcggaaatgaaactggattga

SEQ ID NO: 176295 - DNA, 319 bp, Arabidopsis thaliana landsberg
atggatgcggccttaaaactttaccatgagatgttatgccaagaagaacccaagtcacaacctgatgttgttacttataatatacttcttgatggcttatgtatgcaaaaagatatctctagagcagtagatctcttgaactctatgttagatagaggttgtgatcccgatgttattacgtgtaacacctttttgaatactttgagcgagaagtcaaattcttgtgacaaagggaggagttttctagaagagcttgttgtaaggctcttaaagcgtcagagagtatcaggcgcgtgtaagattgtggaagtaatgctgg

SEQ ID NO: 176296 - DNA, 116 bp, Arabidopsis thaliana landsberg
aagcagagcgcgatatggccacaacacaaaagaccactgccaatagtgtagacagacaacaaatcattaaaaagaaagttgaacgccggttgcgaataattagagccaaactataa

SEQ ID NO: 176297 - DNA, 99 bp, Arabidopsis thaliana landsberg
gaaactggaggggttctagtggagatgaagttcgctgaaacagattcacgttctggattcttggtgacagagtactgtgatatgttccaaacggattag

SEQ ID NO: 176298 - DNA, 123 bp, Arabidopsis thaliana landsberg
cttttccagctgcgcttttacgaggggcaggcccttggcccagatgagttcgtggttttgggtattggcagttgtttccgccacttatacgctgcgcccgctgccgagtattgccatcagtaa

SEQ ID NO: 176299 - DNA, 187 bp, Arabidopsis thaliana landsberg
atgccgctcgcgatcccgccgacgacgattgccaggatcgtaatggtgctcaacaggctgatctgggacgcgttgattccgtacgccttttccagcgacggtcctaccgatgagacatcgacctgctcgaatacctcgaacattcccccgaggaccaccaggatgatgagctatgtaatgggctcgg

SEQ ID NO: 176300 - DNA, 661 bp, Arabidopsis thaliana landsberg
gccctttggcacccttacactcttatctatgttaatgggtgaagttgtcaaagtactaatggcgaatagtactgatgaagagacttggagctatgaggcacgcgatatcttgctagatacctggaccacactccttactgtgagtatagttaagatttattttactactgctgcatctatccataatatcatgaatcactgtgtttatgaaactgtgccatatctggctctctgggggtactttgggcattttctttgtgattgtcagggtatttataaagaccgatcattgtctttgccaacaaattttttatagtctagaagaatgattcatttaaagtaaattgtgtcctatgagatactagtgggcactatttgaccaaaggttgtgatgactcctgccagtcaatggatggttctgggggtaatgcgtggctaccacctgaggggatacatgctgcagctagtctcttttcattgattgtggaatctgaactaaaaggtaaaggtttccagacttttgacctctgctttacaacttttgttggtttggaactcttttctttatcaaatctatatacaagctgaaagtttgtttctctagtggcatctgcgtcagctactactgaagatgatgctgactgcctggcttctgtatccg

SEQ ID NO: 176301 - DNA, 838 bp, Arabidopsis thaliana landsberg
ggaagattcaaagcttctagtgtatgagtatctcgagaaacgcagtcttgatcaatggttacatggaaagaagaagggaggtaccgtagaggctaataaccttacatggtcacagaggttgaatatcgcagttggagcagctcaaggactttgctatatgcatcatgattgtactcccgcaatcatacatagagatgtcaagtcgagtaacatcttgcttgattctgaattcaacgcgaagattgcagatttcgggttggctaaactgttgattaagcaaaaccaagaacctcataccatgtcagctgttgctggatcctttggttacattgctccaggtaatacccgtaaacaaaaaacattctttagagtcgaatagagtcgctcattgtgtgatctctaatatttttatgttgcagaatacgcatatacgtcaaaggtagatgagaagatcgatgtgtacagcttcggggtagttttgctagagctggtgactggaagagaaggaaacaacggagatgaacacacaaacttagcagattggtcatggaaacattaccaatctggaaaaccgaccgcagaggcgtttgatgaggacatcaaagaagcttccacgactgaggcgatgacaacagttttcaagctaggtctcatgtgtactaacacattgcctagtcatagaccttccatgaaagaggtcttgtatgttctgcgccaacaaggacttgaggcgacgaagaagactgcaacagaggcatatgaggcacctctactagttagtttatcgggtcgaaggacaagtaaaagggtagaagatgaagatttaggttttgtataa

SEQ ID NO: 176302 - DNA, 172 bp, Arabidopsis thaliana landsberg
attgggaactgtgttggtgcgggtaatcacaaatacttcatagcattccttatctcagccgtcattagcacaagctatgctgctgttatgtgtgtgtataccttgattcatatcttgccacctattgaaaaaggagctgcatatgcatccgatgtggcccatgtggcgcatg

SEQ ID NO: 176303 - DNA, 369 bp, Arabidopsis thaliana landsberg
attttggaccgtttttgcgaagagctcggccgtaccgttggaaaagccaagcgctccgtcgatggaaacgacggagccgaccaagtccggtcggctggcggcgacgcgtgctgcaatctgtccgcccatggaatgcccgacgatgatgaattttctgccggcgtgtctcgaggaaatcagtgcctggatgtcggcaacgtagtgagccggcgcatacgcgccggaaggaatgacttccgacctgtcatgtacacgaagatcgggcgcgatcacgcggcacttgctttcgaattacggttgttgccagttccagtcattggaatcgaaagtgcagccatggagcatcaggacgttcttgtccgtacccgt

SEQ ID NO: 176304 - DNA, 374 bp, Arabidopsis thaliana landsberg
gtaggcgaaatgattggtgcttcttatgcgaatttgaaaatcatcttgacagagcaaactatagccggtttcctttttcaccaatgaacattatctcgcggctgcctaatattggtggaaatcttgggtatgggagacaggaggatgcccatgagttgatgaggtcagctattgttccttgttggtgtaatctagcggtggagtttctgtcattctgtcagctaatgcttttaaatttcatgtgatttaggtttgcaattgatatgatgcaatctgtttgcctcgacgaatttggtggagaaaaagtggtgcctcctcgcgcccaagagacaacacttattcaatatatatttggtggtctccttcagtcacag

SEQ ID NO: 176305 - DNA, 138 bp, Arabidopsis thaliana landsberg
tgaagcaactcaaggatggcactttcatctcccaaaagaagtacacgcaagacttgatcaggcggtttgggatgaaggacgccaagcccgcaaagactccaatgggaactgacggacacgtcgacctcaacaaaggag

SEQ ID NO: 176306 - DNA, 210 bp, Arabidopsis thaliana landsberg
gcccgagccgacccaatcggcgtgagcgccaggcccgcacgcatggcgagctcgccggtgccggccgcttcccccagccaccgccttcccccgagcgcctagaaaaggaccggctcgagctccatcggcgccacacaacgccagccagccccacttccctccgccacgagccggtcaagcaagcgcggcctcgctccttgctgtgtgccg

SEQ ID NO: 176307 - DNA, 3035 bp, Arabidopsis thaliana landsberg
aaaaaaccttttatctgcaaaaatggtgcaacatatcatcatatactggaatccgttcaattattgactggatgtattacaagcagcgtcttcattcagctattcaaaaagttattaccattcctgctgcaatgcataaggttcattgtgacttaactattttcactcctttttatctgagtctttgtttactgttgaaaaacatttaaccacttatatgacctctataggtggcacatcctgtacctagggtgcatcatccttattggctctagaaaaaggtctgtgacaaattccgtcagggaaaaatagttgatatgtttagctcagcaaacaaagatggtgtcttggacaaaaatcattcgactgatattgaagatttttgcaaagaaaacaaaccttccgtaaaagggccaaagccagttgcgcgttcatatgaagtcgatagaaatcactctgagcaagaaagttgggatccagagttccatgatatctcattacagaacgttgacaagaatgtagattaccaaggatggcttgaattggaaaaaagaaaatggaaaatgactctaaagaataagaaaaaaagaaggtactcttcaagtttatttggttttgatttggaacaaaatgtagatcaataaatatactcttatgaaaagtttcttaacttgtcgacactgtgtaggtttgatgatctaaagccttgtaatcagattgatgctcacaagataaataaaaaagtctgtaagggaagagcaggtgtaggctcatactttaggaggcctgaagaagctttgactagttcctatttgcaggtatgcatgacatttggtgagacctcatataattggcttctcttttgcaaccatgttaaatgttgtctttccgagtttctcagataatacagttggtccaaagtccacagagcgggcaatttattgcttgggttgttgtggaaggattgatgcttaagatcccattgacgatcccaagggtgttttacataaattccaaagcttctatagctggaaacttcacgggaaagtgtatcaacaagattcttcctcatggaaagccttgttacaatttgatggaggcatgtcttttacacaatacacatcttgcttcttgtatttcttctagttagttataattttcctttatttctttacaggtcaatattcaggaagatcaatttaaaaaagaaagcaaaaagcttgccgctctacttgcagaccccgaaattgaggtactattattattaagtaatctaataaaatgccatcagaatcccaacctttgagttctatcgaatacccttcacatgccttgactgttaaacaagaaaaaacttcactgttttaacgattttgactttggcagggcatatatgaaactaagatgcctctggagtttagtgctatatgtcagattggatgtgtatgcaaaattgaagacacggccaaacaccgtaacacccaagatggatggaaacttggtgaacttcacaggataactacaactgagtgtcgctacttggagaattcaattccacttgtttatttgtatcacaggtagagctgagttctacttcttcatcaaggaatgtcttgcttgtgaactctttttttatcgatgttcgagtgttaacaacatcatgcctacgtttgtagtcatattatttttaacttttttttgtctcttttattctttgggcatatgctattgattccctaatatttccttgtttttgcagcacctcaacaggtcgtgctatttatgttttatattgtcatgcttcgaagcttatgtctgttgtggtagtcaatgcttacggtgacaaggaattattatcatctgccctagagagacagtttagagatagatgccaagaactgtcacctgagccattttcttgggatggtatccttttccaggtaagctctaaaatatgcgataacagtcctgcatttttctagcttgtctaatgctaatcatcaggtcgagtatgttgatcatccagaagctgccacgaaatttttacaaaaagcgctctgtgtttacaggtaaactcatttccctgaataaaatagtgcagcacgttttacgaaacccataatttttctaatgctgatcagttgggcatgctttttcctattgtaattttttcctgcatgatctagttcttcttcattagaaaaattcagcaagttaattgtcaaaaaaaacaaaaagagtgtgacaatgacggattttggacttcttcaagacactcatgtcggtcaggtttgaatttttcccattgttgccttttcctgcagagaagaaaattgtagaccaactgtggcagtcattgaatgccctgactttaacaccatgaaggaaggtgtaaaggccctggaagatttcccatgtgtgaggattcccttcaacgacgatgacaattgttatcaggttccttgacttatcaaccaatcggcttcattcttatgttgtgatgaactttaatttgatcaagtaatgctaaatatgtacgtgttgtgatgcatatagcctgtctcctggcaacgtccagcagcaaaagtagcagtgctccgttgtgcttcagcaattcagtggttggaccggaggattgcccagtcaagatacgcccatgtaaagtggaaatgtacttcttcatattagtgtctttatgcagttattgatatttcctaaacaactgactaggtgcctctggggaattttggacgtgattggttaacgttcacagtagatatcttcctgtccagggcactccgtgaccagcaacaggttctttcttccactttctgtccagataaagagttccactaatcttgatctgtgcctctacagcttcaaaattatatgacaaaaggctattctctctgtatcactgatcttttttccatatcattgaatttggtattgtattacaggttctttgggtctcagataatggtgaaccagaccttggagatataaacaatgaagagacatttctagctgatgag

SEQ ID NO: 176308 - DNA, 405 bp, Arabidopsis thaliana landsberg
atggggatcaaggaggttccggttgatctgcttgttcccggcaaaacgtatctatttttttcgcatactattaagaagcagccttacaacaagaaactgcttgaggctgtgctcgcgaaacatattcgactgatcgactacgaagcactcaaagaccgacaaggaaacaggcttgtagcttttggaagatacgcggggattgttggcgcttataacggtttatggacatatggaaaacgtagcggcaagttttctctcaggcgggcttttgaatgtttcgatgttaatgacctgaagctcgagcttagaaaagttgttttgccgccagtcaagataattcttaccggtgcaagaagggttggtcgcggtgcaatggaaacgctcgacacagccggaatcagaaag

SEQ ID NO: 176309 - DNA, 363 bp, Arabidopsis thaliana landsberg
atgacacaaagcgacggtgttcccgttctgttccgttccgttaagtttcggacttatattacagaactgaacaatcgttgtcttcaagtacgagatttgtctgatttttccaaagcgccgattcgaagatttgaatccattttagtgatgccgttttggaagatgagcgcaagagatgtcactggattcaaattcctcttctcgcttgtcttcatctacgctttaatgtcagctattgtttactccgtcctccacatgaaattcatctctccgcttccggcaaacgctcctctcgaacgattctctgaagctagagccgtcgaacacatccgtgtcttggctgaagagatcgatggtcgtcag

SEQ ID NO: 176310 - DNA, 407 bp, Arabidopsis thaliana landsberg
aacatattagatctggaaaacaatgtcagatcggagatgaagaagaagttagatcggagaagaaaacgttaccttggaggaaaaagagatcgagtcgcggctgctgctggagaagaagagtcgcgacggctgctggagaagaagagtcgcgacggctgatggagaagacgagacgcgacggagaagaagaagaagttacatcggacggtggaagttggaatggaaagaagaagttatatcggagaagaagacgttaccttggagaagaaacagatcgactcgcggctgaagctggagaagaagagttgcggcggctgctggagaataagagacgcggcagagaagaagaagagaggcggcgacgtaatcagatcgaagaagaagagaggcggcggcgaagaaattag

SEQ ID NO: 176311 - DNA, 645 bp, Arabidopsis thaliana landsberg
  unsure (1)..(645): unsure at all n locations
atctttggagcagcgaacatacatgagcttgacgctgcttcaaggctattcttctgctgaagaagaagaagcagaggagagagcttttggggattacgacaactccgacgaagatggggataatgatgttcggagatatgaatcgtcttctgtgtttgatttctctgcatctgcctcctccgctaaaancnccccccttccttcannnnnnnnnnnnnnnnnnnnngtcttccttctctttgattttgattttatacacctcaattcatcgaattgtcgttttccttgaggagattcgctgtgagattgaatggtttctttattatagatgaaaataagttacttggatctgtagatttgatgtgatcggaatttagggttaggaatcctgagactaggttaggtttggggtttgaataataaagagatcttctgatagtgaaaacttttcagtgttcgttggcttggttacttcttactcgaaaagcttatagtgaatgattctttgcttctattgaattttgcagatttcagggccaccggagtttctaaacaaccgcacagaagcagataatgaagcttcagctagagatgcagaacatgcaaatcgtattagtcgcaaaaagaagaaagttaaaccaaaag

SEQ ID NO: 176312 - DNA, 215 bp, Arabidopsis thaliana landsberg
gaacgagtgagttggtcactaggattcagcataatagcaggaagtgtggtgatagctatagtgatatttctgataggaattccaaaatatcgaaaacaagttccggtgggaagtcccttcacgagggttgctcaggtcatggtggctgctctgaaaaaatggcgattgagctccacgcgccaccactacggcctctgctacgaggaggaggatga

SEQ ID NO: 176313 - DNA, 204 bp, Arabidopsis thaliana landsberg
agagacggcgaggaattgatgaagcagacgctgcagacgccggcgacggtggagagacgtaggagagtggaggttgagacacgtggatgtggtggtgcggaatttgatgtgaagagagtgaagggacgaaactcgacgagtcgcatgaagacaatgaaacagaagaagaaaaagaagaaagtgtacagattaagcaaaaaataa

SEQ ID NO: 176314 - DNA, 433 bp, Arabidopsis thaliana landsberg
agctgatcctgcttatgagagaggagctacaaagtttgtacaagatgtggctgccgctttgggagacgtagatatgattatatgtctttgcattgattatcgcaatatagatcgtcactcaaccaatgtagttgtagatcatcttgtaataaggggaatggatgaggcatataagatgcagggtgactggtataatcatggagaattgaattcaagggttgagagtgataccaaactaagtcagtgtaaagatgaagtatttgggttctatcaaggtgctaaatttctagatgaagagtttgcttctaaggcctacttgagtgagattgcagagtgtgatgacaagaaagaagatgagttccttgcaaagcttgcagatgctgaaacgccgttatatccaagttgtgtaaaccaagcaagttgcggctattaa

SEQ ID NO: 176315 - DNA, 127 bp, Arabidopsis thaliana landsberg
agtttgcggaaaagacggagttttggtcaaagaaggaccggggaacaaagaaataacagaaccagtatcggccatgggatcggtctcaccaatgactgatctaggactcctcaaacaaccctcataa

SEQ ID NO: 176316 - DNA, 178 bp, Arabidopsis thaliana landsberg
atggttataaaaagaataggaaaagtctgggctcgtaagatatctgttggaggttgggaaccagtggatacaggagctgccgttgaaatgatcaaaaatcggctcgcagatgtgaaagcgttttcatataagaatggatggtccaaagaatggcctttagctgctgatgacaagcgcg

SEQ ID NO: 176317 - DNA, 1118 bp, Arabidopsis thaliana landsberg
cgagcaaacacaagaagatggcttttttggtttcaaacctacaaagttgtttgtgttcggagactcgtatgcagacactggaaacacacctttcctgatcgttccctcgtggaggtttcccaatggaatcactttcccgggaatacctaccgggcggtttagtgatggtcgtgtttccactgattatctcggtacgtttgaactataatgttttgtttggtaatctgtcacaatatctgagtctgtaagatttataatattgtaaacagattgcaaagctcagtgaaaaactcttagattagatatgtcttagctgtacatttgcattgcatctcttatataatgaaacgcaagtcaataaattttgttcattataatttgttttaaatgttgaccatataagtatttagtttaacgttttcactctctcaaaatgcaagatatctctagtttaacgtaaatcggttgccaacagtaattataccctatatatagaaaacatatattatgcaataaatcttatagtttgacttatattgtaacatgtagcgaagtatattggagttagaacgccgatcacatacaaatgggggaaatacggacgaccgagactagctgtgaaaagaggaatgaatttcgcatatggtggagccggcgcgtttgagacaatgttcaaattagttcctaccgctagtgtgcagattgattcctttgaacaactcctcatgagaaacgtttattcaccggccgatctcaactcttccgtcgctttctttagcatcatcggcaatgactaccttacttacgacagacgtaatggttctgaagaggtacaatataccttttcttttcccactagggttgatcaaaattgattactggttgaccatttttgatccatatattatataagttaacattttcgatttcttttgaaaatataaaatctggcagggtcgttcagcactcacaaggaaagtagtgaaacagattttgttggatgtgaagcgaattaaggatttaggagtaagaaaggtgtttgtggctttatcaccaccgcagaaatgtttgccgaagcttgtcactcctaaaggctgcgacaccaacgacacctcgac

SEQ ID NO: 176318 - DNA, 679 bp, Arabidopsis thaliana landsberg
aaagacccgacaaactcgaatgcccatgttacatgcagagaggagactgcaactttgataatatgtgtaaatttcatcatctgagtgagagagaaacccatgtccttgagacttccttaagctccaaaggcctcccttcacggacggtgagccatttcttaaactagcagtagcaatctagcagacgttagttttctttgcttcaaacctcattcttttgatcactaaccaacacggcaacaccaaaagcttgttcgacttcaaactgaactctgtttttctaatctcattactatcatctgtgtttatcgcttgctcaatttttgctccaatctttcgacagggagaacccgtgtgtaccttgtattttcacactggaaactgcagctccggtcccacttgtatctttgatcatccgatgttggtatcaacacacaagaacacatcttccatggcttccgagacaccgcacttgaatccgctaggattgtcctcttcacttagggctttatcaagtgatattgtggaagcatcaactaagaaacctagaatatacaagaacacatcttccgtggtgtctgagacacctcattcgaatccgctaagattttcttctccaattggagattcatcaagtgaacttgtggaaacatcagataaagaaacccatagtccataa

SEQ ID NO: 176319 - DNA, 785 bp, Arabidopsis thaliana landsberg
atggttggaggaagtagtgcacagaagctaactacaaatgatgcacttgcatatcttaaagctgtcaaggataaatttcaagataaacgtgacaaatacgatgagtttcttgaggttatgaaagattttaaagctcagaggtattgtttttgctcactgttattttattttttgctctttagttcaatttgaaatctgatcttattttgtcattgtagagttgatactactggtgttatcttaagggtgaaagaactttttaaagggaacagagaattgattttggggtttaatactttcttaccaaagggtttcgagataactctccgacccgaggatgaccaacccgctgcaccaaagaagcctgttgagtttgaggaagctattagttttgttaacaagattaaggtagaagattatatatggtgcatttcccctttttttcttctcttgctacttggcttcttaactactatcattttatctgcagacaaggtttcaaggcgatgatcgtgtatacaaatcgtttttagacattttgaacatgtatagaaaggaaaacaagtctattactgaggtctaccatgaggtgtgtgttttgtagccatttgtggtacactgttttttcattgttttggttgtccatttttgtcttagttttcaatatgttgaacatgcaggtggctatcctttttcgggaccatcacgatttgcttggagagttcactcactttctccctgatacttcagcaactgcatctactaatgattctgtaaaagttcca

SEQ ID NO: 176320 - DNA, 414 bp, Arabidopsis thaliana landsberg
atgaagcagggacgacttggattagatcaagtcacaaccgaaccggtacgctgttgaatccctacgatctaaatccaacggtcacagttttatgagagtaggtccagatctgagccaatcgatcacgattcaaccgtccggatcttactgaacgaaggggtaagcaatctctaatcagtgtcgttgcgcaagaaatcaatgggtcaccatgttcgtccctcacccagccgagggaagtggcggcgcgctccccggcgatctcccaagccccgagctgctcgattcactaatccgctaggtgttaaatgatcttgataacatcatagtccgagagcgcagcagcttaccgaagatcgacggttgcgaggtccccggccacacgcgcgacgttgcggcagcgcagatcctgctccg

SEQ ID NO: 176321 - DNA, 151 bp, Arabidopsis thaliana landsberg
acctcaatggggaacagacgtcaacgattggagtgatggatctcatgacaccagatgtaccattataaagcgctacctccgtgatcagggggcgttttgtgccaatgatgtacgagcctttggcggtgtcactaacatgtacactacttag

SEQ ID NO: 176322 - DNA, 91 bp, Arabidopsis thaliana landsberg
atgaactggtacggaaatcaaaaaggagaaggatttgagtaccatttgctgatgataggactggctttggccaccctgatcaacgaaagcg

SEQ ID NO: 176323 - DNA, 220 bp, Arabidopsis thaliana landsberg
atggattatcagcaaaagccgccgcagtcttctgacccttcgccgtcaccgcctgaccgtccaccgggaatcagatcaccggagaccccctcgaacaatcagaataatgacatagaggacattatggcttgcgtcacagccttggaagctgctctgttaccatgtttgccggcgagagagcttcaggccatcgatcgctctcctcacccttctcatcaaa

SEQ ID NO: 176324 - DNA, 300 bp, Arabidopsis thaliana landsberg
atggcgaaaaggaacgggcagtggatatcggtgcgcgcgaataacagggatatcaaagggctgatacaatcctggcagcggaccaaggcagccaaccttgcagaatttacgcgaaccatggagttgctggccaatacatccaacaatactgtgtatgcggatgataaaggaaatattgcctactggcacggcaatttcatgccgaagagagataaccatatcgactggtcaaaacctgttgacggaagcaccagcgccacggaatggaaaggattgcacagcctcgatgaattgatacag

SEQ ID NO: 176325 - DNA, 159 bp, Arabidopsis thaliana landsberg
ccatacaatcaaccaaccaaccccactggtctaagtacaacaatagagattggggatcgtacgacttccttggttcacgatggccgaatcaagctcttagcttattggtccatccgttctccaaacgtacgcccttctggctacatggtggacgattga

SEQ ID NO: 176326 - DNA, 144 bp, Arabidopsis thaliana landsberg
aggattgctaccttaactacatccatcgagttaaacattgctggtcgttgtagtgcatctcaagtacaaattgatcactgggagctagagcacctctcttgcgagataagagcggtcaacatggcccgcaacaacaatttctaa

SEQ ID NO: 176327 - DNA, 2292 bp, Arabidopsis thaliana landsberg
atgaatcggaacagcctatacgaagctgatgacgatgatgacgatgacgaagaagatgacatcggtgaagacctcgaagatttaagacgcgcatgtatggtctctgacgttaattccgatcaattcgcgtcaaaaaccggttcaattgaaccggaaggagtcggtggcggagagataccgtcggattcagaaaacgaagatgactttgagatgcttcgtacaattaagagccaattagcatcttccaaggatgcgggtagaagcagtggtcctcccatgggtttgtccttgctctcggattcggagagtgaagatgatttcgagatgattcggagtattaagagccaattgtcattgtccatggatgtgtcccttcctccaattggtttatctgacgatgaagaagatgatgcctttgaaacacttcgtgctattcgtaggcgattctctgcttataagaatttcggtgagcacaattttgaaatcttatacttgttttcttttctatttgcgttaaagctactgatttgttagataatgtttctgtgttacctttgcaatgttcgttctatggttatctgaagactctgcctcaactgatagttttttgctgatggtaagattaatttgagttccttcagtttcactattggaagctagttgttataaggtgtgaaaaatgcagactttttcatcttgttatttggtttttaacagtctatttatgcaatatgtattgtccctgatggaataagttagaagctctctgtgcttatgtttgattcttgatatgatgaattcatgatgctaggatgatattggtttgcttgtatggtctctgacgttaattcccattagttcttcttatttggtttgcttgcttgtctttttatccagtgttttaagtggaaaatatgcttatgtggtcattttcttactatttttctgcagattcggaaggaaaattcatgaatgattctcacgggaagaaaaagcaggtacataactcggacaatgaaccttcaagcgaaatattgagtagatctaatacttgtgaaagctttccagatcacgggaaatcagttgtcactgtgccagactcagaggatgtacaagatggtcatatgccagctgcgagttcaagtttccctgaagctgcacgagcgtttgttgatgcaatcaggagaaacagagcatatcagaaatttcttagaggaaaattggcagaaattgaagcaacgatcgagcagaacgagaaacacaagaaaaatgttagaatagtcaaagattttcaagcttcttgcaagagaattactaaactggcactctgtcagaggaaagatcctcgtgtcgaattaatctcaacacggaaatctgggccttgtgatagctccgagggaattgggccttgtgatagcttaaaggtaatcatttgacccagttttcctgcctctgctgtttttttgtagtcgataaaaaaagtactgcttcagctgttttctgttgaccgtgatggaaaatgtttcttatcctaaatcccttgtgtttttttttgtagggtaatgataaaaagatatctcctttgacgttgggtccagcggaaaacccttgtgttgaaaattataggatggcactagagaaatatccaatttcagtgaaacgcagaaaatggtctactgaggagaacaaaaacctcgcaaaaggtttaaaacaagaagttcaaaagatactgctttctgaagcaattgaacggtccaggtactacttactcatcttcttttaaagtgcaatcattaaatctgctgcttaagatcttttcagatgcagacttagtttaggtttttctcattttaattttttcgaaagagttgaatgacagatatttcttaacagtgacttggaaggagctacatatgatatagacactatcaatgaatcgatcggaaatcttgagatcacaccagaaatgattaggcagtttcttccgaaaattaactgggattcgttggatatcaaggaccgttctgctgcagaatgtgaagctcggtaagttcctcctttatttgaactctggttactaagataaatcagcttttaatcatctatgggtgtacatataccatcactctcttattttgatatattagtggattttcttatcctgtgcctcattgtaggtggatgagctcggaagatccattgattaaccacggtccgtggactgcagcagaggacaaaaacctactccgaactatcgaacaaacgagtcttacagactgggttgatatcgcg

SEQ ID NO: 176328 - DNA, 309 bp, Arabidopsis thaliana landsberg
atggcgaagagcgagaataccaaaagaacgacggtaccgaaacaaaatcaaatccgcggaccaaaatttaatatcattatctattctgactataccaaaaccatcccaattggctttggtaagtttatctcaaaccggcctagccacactagttccaaactccacactaaaccgaatgattgacctgagttggtgaatcatcgatttccaaaatcttgaatactatttttaatttcaatttcaatctaaatcatataatatatcctccagccttatcgtgctatttccttaaaagaaaaccaaacgtga

SEQ ID NO: 176329 - DNA, 680 bp, Arabidopsis thaliana landsberg
atgaaaaaggtaataatatagtttctatactatatattatctcttcatatcttcaatcttgtggacctcgaaaatgttggattgatagtacgtgctacctatagccatatcttatctcgacatctcttttaaatttcaagtttctaaccacagtaaaggttaaaaaaaattcaagtaattgtattaaagtaagagtttataacttcattatgtatatagagttaaaaaagaacaacttaattatttctatcatcttatggttcacagataggttatactgcagatacaatgtcctccattatgtcagacttggatctttctctcgcacaagtaagtccaactttcatcacaatttttatgggaaacaacattaatataatttttcagtcaattcttccaattttacaagtggatggatacacgcaaacgtatacgtattttgttgaaactactagttacatcgctttttttttatatcaaatgaaaaattatttaggggtaacaaaatagaaaaagttgactactgtacgagctcatattgttacagtgatgactagttaattttaatttcttgagaactatgtttacagttttcgctgtttggttcgttgtcgacgtttggaggaatgatcggtgcaatattcagcgccaaagctgccagtgccttcggtcataaaatg

SEQ ID NO: 176330 - DNA, 958 bp, Arabidopsis thaliana landsberg
attatacacctcgatgtgatagcagctagcattctgttagatgaggacttcgaagcagttgttggtgatttcgggttagctaagcttctagaccatagagactctcatgtcacaactgcagtccgtggaactgttggccacattgcacctgagtacttatccacgggtcagtcctcagagaagactgatgtctttggctttggcatacttctccttgagctcattactggtcagaaagctcttgattttggcagatccgcacaccagaaaggtgtaatgcttgactgggtaagtctcttttctctgtttcttgtttcactttctagaatcttgaagctattgttcataattctggtttggttcggttcagtcttgtttgatagaaaacttaaaccaaaacaaaatataaattagccgtgattttggctaaattttggttctgtttttgtgcttgataaaagactcagtttggttttgtgttatctttgatttgaattcggtatagtgtgaagactaaactgttattttggattcggtttgattctgtttgggtgcttggtctggaatcggtttggtttggtttattggtctgagaaatgagtcttaaaaatggcaggtaaagaagttgcatcaagaagggaaactaaagcagttaatagacaaagatctaaatgataagttcgatagagtagaactcgaagagatcgttcaagttgcgctactctgcactcaattcaatccatctcatcgaccgaaaatgtcagaagttatgaaaatgcttgaaggtgacggtttggctgagagatgggaagcgacgcagaacggtactggtgagcatcagccaccgccattgccaccggggatggtcagttcttcgccgcgtgtgaggtattactcagattatatccaggaatcatctcttgtagtagaagccattgagctctcgggtcctcgatga

SEQ ID NO: 176331 - DNA, 533 bp, Arabidopsis thaliana landsberg
atggtttggataaagtttcaagaggctttttatggggaagtacaccagaaaagagaaaacaacatttggttgcttgggatagggtttgtcgtccacggacagagggtggtctggaaaggatttgaacacatcgcttgtgacaaaggtaggatggagattgttacatgatcatacgtgtttgtgagcaaagtattagcaagagctctactgctccgccttcagctcctgaatctgaaacaagatcgaagaagaactcagatgcagctgaagagtcaaggagtcaagacgatgtcgttgcagtaaacaaagagaaagggatattgggccactcacctaacaagcccaatgtcaacttaaatgagaagcccatcaagtctgagaagcccaacaagtcttcttcatcttctcaacggctaagtccacttgtgcaagagaacaaagccagaataatgacagagaagaggagcgcttgttgtacggctccaatcatcacagagaacagatttgattgcttgatgacctgcgtagcataa

SEQ ID NO: 176332 - DNA, 111 bp, Arabidopsis thaliana landsberg
aacgatccgttgtatgcagacaaaaacggctcgttccccacggctacgtacctagtgaatgaattctcggtcaaatatacacccaaaacagcgacttttaccggtttgtag

SEQ ID NO: 176333 - DNA, 180 bp, Arabidopsis thaliana landsberg
gaacaagagaagggcaattaccaatatcaaagggaacttgcggaaaccactcacacatatgaatctaaaattgcagagctgcaaaagaaactggaaggtgaaaatgctcggtctaacgctgcagaagatcaacttagacaaatgaaaaggcttataagcgatcgccaagttatatcacag

SEQ ID NO: 176334 - DNA, 392 bp, Arabidopsis thaliana landsberg
gtttttgacaaaatgtccaacatgtaggcacaaaggcactgaaagacacccccattggctggaagctaagggcgacattgccacttgcttaacaaatctgtgtattcgatccagcgaatggcccctttccctgaagtttgcttttcctcctagctatgtaagtgcccttttcattctgttttgaaatattctctgggaaaagtcatgagatctcatgtgatgcgtttgatcaaataggttatcgtgaggcgcgatgatccgactaaagcagaacgaaaactttacaaacatctcaagtcactcatcaatgaagaatttgctgctttctttcagaatgaaagtttaagggagaactatgctcagattctcaatctcataaatcgcctcaacag

SEQ ID NO: 176335 - DNA, 1094 bp, Arabidopsis thaliana landsberg
atggcggaaaaggtaaagttacgtagttttataataaataacttgagaaaaaggagcttagtgatcataaacatttttaattaaaatctcaaatctctaaacatttgtagtttatgtgttaacgacgtctatgcgtcatcatccaaatttaagcccccatattgatgacaaaaaatatttaaattataattatacaaaacatataaaactattgattacgttttttttggtaaggaaaactattgattactcttaaactagatgttgtcctttaagataatagcccaccaaaaacaaaatcgagataataataatctaattatttttaaaaatttagacactgctttgtattgtaatttttgaatatctaattcataacataattaaggtagcttaaaagaaaagaaaagaaaagaaaaaattgtgccctttatttgagaaaggtataattgtgtgaagttaaacgatgacgtttctttggtaccttaaatattaatttgtgtttgataatttattgtctatagattgaatgctttgttacataaatgggtttgaatcaatggataatggattaaagaaatggatgtttacattaaacaaccacacaagtataccgaaccgaaattgtttgatggctttgttatagaccgaaccaggtttccaattcggaaccaataattattaacctgaaccaaatcgaaatttgccgtctccgaattcaaccgaaccgaagttttttttccggtttaggagcttggttttattgttgatgcttcaatttccctttggcctttgatacaaaatggtagagagattcttcccgacgaagcggagctccggcgacgagaatcaccgtcggggaaatctctcgcttctctccggtccaatttcctcgtatctttcttcctcagacgcttttctcttaaatttgattctctctttactctgtctcactcattgttcctctctacagaggcaaaacctctctgctcttccaattagctctcaatgtagcgagtgcttctacaaccactcgtgtcgtcttcatctgtcaccggaaaaaaatcgaatccaatcctccgtttctctctcag

SEQ ID NO: 176336 - DNA, 39 bp, Arabidopsis thaliana landsberg
atggagacgctgagcccctacatcagacttgtaccgtcg

SEQ ID NO: 176337 - DNA, 67 bp, Arabidopsis thaliana landsberg
  unsure (1)..(67): unsure at all n locations
atggccggcgttgatcgcgtcggtcatcgatttgtacntggcgccgctgatggcgttcttcttgtcg

SEQ ID NO: 176338 - DNA, 1466 bp, Arabidopsis thaliana landsberg
gcttctattcattctattaaaagtagataccctaacatcacaagcctgcgtgatttttttgatgccaagtttaaagagaactctccaagttttaagcttgctcaggtaatgtactcttcaggtacattttatggttttatggctcaagtccacaagcaagttggctgttttctttcagaaactttctgttaaacatgatgttgttctaatgagagctgtggaatatatgttaaattttctctcccaaaaattcgttggagaacccaatttcgttcattcatactggagccttttctgagaatgaggaatgtagggcttgatatgtcttatactatttctaatctaatttcctcttattcagcagggttttcataaattatacaaatatggattatcatatgaaaaataggttgcatcaaagtcttctccatgcatcaattagaagttgtgtctataattgcaaattgtgtgagatgtgacaccatgtataatttttcaaattgtcttctttttcagaggaattttgttgagagcatggctggatattctttggtctgttaccttctgcaggtaggttgtattttataactgcgtctctcaagattgtgtattaatatatataggcatatatgtgctttgaaacaagaacgaaaggaatctacgagtttgacactctgatggtgttcataagttccttgatggcttgctttagttgtatggctagtaatatccattgcttgattgtcttctcgttcagataaaagaccgtcataatggaaaccttctgatggatgaagagggtcacattatacacattgattttggttttatgctttcgaattctcctggtggcgtaaactttgagagtgccccatttaagttaacccgtgaacttcttgaggtagacaccagttcatatactcatatcttggatcgtcgtctcttctaagttttcgttggtcatgtttccttgctaagcagttgaaaatttacaaaaaaaaatgtttgtcacatccaggtcatggactctgatgctgatggggttccaagtgagttctttgactatttcaaggtatctgcatggcttaccctctcacctttcacttttaaatgactattattgttttcacttttaaatgactattattgtttcatatatatgtggaatggccgttaattgtcaactcttcttaattaggtgctatgcattcaaggattccttacatgtagaaagcacgcggaacggattattctcttagttgaaatgttacaggttcataatttctagcttctttttactatacccgaataagttataacattgcagcaagcctaattatttgccttctgaattatatatattctggtgttgtttctattaggattcgggtttcccttgcttcaaaggtggtccacgaaccattcaaaacctaagaaaaagattccatctaagtttaactgaagag

SEQ ID NO: 176339 - DNA, 261 bp, Arabidopsis thaliana landsberg
gctgtacaagccattctggacggcatgcactggctggggctggactacgacgaaggccctttctatcaaatgcagcgcatggaccgctacaccgcaatgattgaaaaattgctggccgagggacatgcctacccttgctattgtagtcaggacgatttgcatcaaatgcgcgaacagcagcgtaaaaatggacagcgcatgcgttatgacggcacttggcgacccgagcccggaaaagcacttcccactccgccagagggg

SEQ ID NO: 176340 - DNA, 63 bp, Arabidopsis thaliana landsberg
atgcctaccattgaggagctcgacagcacggtccgggccttttacgaaggtcgcggcgagcag

SEQ ID NO: 176341 - DNA, 384 bp, Arabidopsis thaliana landsberg
ggccggcgctcccgccaaggtcgtcgcgaacggcggcaagaccgtggagaccgtgcccggcgccaccatcccggtaaacgtctacgcgaccgaccgcgaggacaacccggccgcgggaacggtcacggcgtccgtcgccccggcgtcgctcggcacctggagcgacggccagttcacggcgaagcgggccggccacggcgtgctcgtcgcccgcgacggcaacgtccggacgacggagccggtcgacgtggtcagctcgctgaagtcgctcaccgtctcccccgaccagcctgacctcgacaacggccagacgcagcagctcgcgctgtccggcacggacagctcggggaacgccgtccaagtcccggcgcaggccgcgacctg

SEQ ID NO: 176342 - DNA, 220 bp, Arabidopsis thaliana landsberg
atgaacaccaaagagcctaactactcttgtttggtaagaagaacatgttcttgagttatgtcctacgtttccacagtgtgagcatcttctgcccattgcaatgaatgagaaaaagaaggagggacagcgagatagagaaagagagatgatgttgatgaatgatgatgatgaagagagattttggggtttatgtaaaatggtggagagcacagagaaataa

SEQ ID NO: 176343 - DNA, 523 bp, Arabidopsis thaliana landsberg
taccaccggcatcgactacacgctgcgctacaagatcccgcacttcaacctgggcgacatggatccgggcaacttcaaggccagcctcagcagcagttacacctccacctacaagaacagtgcgacaccgggcgagcccggcggcaagacgatcgactatgccggcacctacagccagcaattcggcaacatttcgcgctggcgcggcacggtcacgctgaactggagcaagggcaactggaacgcccaatggcaatcgcgctacatcaacaagctgaccgcactcaacgccgatgcggccatttccggggtgaacatcccgatggcatcggtaacctaccactcgctgcaactgggctacgccgtgccatcgatccacacgcggttcgacgtcggcgtggataacctgagcaacaaactgccgccgctgatctaccaaaacggcgcgaactacaacgtggataccgccacctacgacgtactcgggcgctattactgggcccgcgcgacggtcaagttctga

SEQ ID NO: 176344 - DNA, 789 bp, Arabidopsis thaliana landsberg
ttcgtcgagagatatgaagattgctacgacatcaagtgctttcgatttgttgcccaaggatcagaaatacaaaaccaaacgtgttagttacaacgatttctcagacctctccttcttacccgtagtaaaccctaagatcaagagacaaaagaagactctggaagaagaagtggactcaacttctaaggtaatatcggtcttcttaaaccctagtttccaaccgtttgttttttaatttagggtgaactatttgcttacgttttttccttttattaaatctttcaggcgaaatctagcaggacgagtcttaccaaatcagttacaacaacaacaaagttgacaaaaccggaggaaacaatcacggcttcttcgaaagagtgtcttcaagaaacaaagacgaataagaagcctgatttaagagacttgatcgccaaggcacaagaaaaaatccaaaacaaaagggagattaatcatcgaagagaatacatcacaagacagaggatagctgcacgcttagctctaaaccagatggtagcaaccgttagctttgacgatcatctcaactatcatagagaaatggaacagcgtggctacacatttattcaagatcaagttgataacttgaacatgttcagtttatggtcaagaagcgattacaatggtatcactaactctgtcttggaaacgagcaatacgacaatgcggtctgatgaagattcatcgagaaagaagcagcagatcatcaaaaaaaagagcaacacattccctacagatgtcaaagaacattga

SEQ ID NO: 176345 - DNA, 543 bp, Arabidopsis thaliana landsberg
gcttagaagttcagtgcaaatcacggttcttgatgacaatgatgatggtgttaatgatgatcaagattatggggaagaagttaaatctagtgaaaatttcatagttcttgatgatgatgatattagtgatgttcaagattataatgaggaagatacatctagtgaagatattacagctcttgatgatgctgataatgatgatattaatgatgttcaagattatgttgaggaagatacatctagtgaagatatcatagttattgatgatgatgatgatgatgatgatcaagattatggtgacgatgatcatgctgatgctgagaaagaaagatggagaggagtcaatacagagaaaaaaaagaaaggtataatagaaacttttgtcttgtgaagttaactgagactgagagcatcactgtctttttattttcttgcgtataaattttgataggttcttctggagagcatgacagacaatatctggataatcacatgaaccctttctttacagtgaaccagcatcggcaaataaaatataatatg

SEQ ID NO: 176346 - DNA, 404 bp, Arabidopsis thaliana landsberg
accggccagcagagcctctcccagccgcgtccgaccctcggagtagaccgtgaatgcctcgatgaagctccccgagcgaggaatcgaactttgcctcgccggagaagccagttcacggtcgccggacttcacccgaccgccggtgaacgtagatcgagctcaacggtgagttttcttcaattccttgcacgagtcgactcatcaacaccccgtgaagctcccagtgcccttggattgacctatgtcgccgtggttaggccggagcactcgccgccgacgagttcacccgcctgcgcacgtggaccgccgattccggccaccaccgccgtctagtcgtacctcgttgtgaccgcaagaacctcccggagccaaccccgcccatcgccggacctccctcaccgccg

SEQ ID NO: 176347 - DNA, 1059 bp, Arabidopsis thaliana landsberg
ggattatggctccgtcttctgaaactgggttcagatgaagatcctctttcttcattcgaatacggcacaatattgggtatgttccattttaatgggaatgtaaataaatgtagactaaaatttccgctgcaagaaattggtaaaccaaggaatgaaccaaattgttatgcttaatcagccgtatactaaccaaatggtttccattgtgattatgtttccgtctctgctgtaaaatccagagagctgatgttttctcaattgaaaattgaaccccaaattttgctcatgtagctctgattgaatctgatgctgaggggattggtgggagtggctttatcgagtgtatacgagagcatctgtattcggtaagcgtagcaactgtacggcatatatatactgagccagttttattgagctcaaccttactgtatagtggatttatttcctgcagggctggcatggtcaattgtccgaggagcagttcattgcggtcaaagaattggtaggtagatgatcgattaactagttttatctgtatactggccttcatattcccagtttctcaattgcgtgcacgagagctgtgcatatttagatttggtcagattagtcctggctgttgttgaaaggtttttagctttgggtaaccccattaatgatttttttttgggtttttgaatttggagtttaagaaatcttttaaacacttaacaatgatattcttcaacaatgattattcattgttatcagctcaaaatggctgtgggccgtgctgcttcaagaagcgatttgtcgacagtgcgggatgcacttgaagtttctgcagaaatgttcaagaaggatgccaataatgtctctgactatgttcagcgtcatctcatctccatacccatctgggaggagttgaggtatgcaatttaacatgctgccggctctatgaatttaatgaatttttcggtgctgctcagaaaatagattattcgacttattgtgaatttttttgacagattttgggaaggttacttcgagtatctcatggagcagcctgcaaatgagtga

SEQ ID NO: 176348 - DNA, 175 bp, Arabidopsis thaliana landsberg
gtctaagcttgatctgccacgtcatcaaactcgagaagagcgtcgaaggagggaaagtgacacgcgcgtgggtcgcgaggaaggttctcacaccgtctcggaacggcggcaaagtcgtcgactcgccgttgatctccgccgtcgggaaagtagagaaatcgtaaagatcagctga

SEQ ID NO: 176349 - DNA, 914 bp, Arabidopsis thaliana landsberg
gctttcaccggcttttctggtggagccagatacaacgactcctacttgttgctgcttaacgttattctcacatctctccctgtcatcgcccttggagtttttgagcaagacgtgtcttcagaagtctgcttacaggtttacacctctcttgctcagttatatctcttcaatctaaacccctaaaacccttcttctaatataactttctctctctctagttcccagcactgtaccagcaaggccccaagaacctgttctttgactggtacagaatcatcgcgtggatggcaaatggagtctatgcatccgtagtcatattttccctcaacattggcatctttcatgtccaatctttctgttctggtggccaaacagcacacatggacgcaatgggaactgcaatgttcacgtgcatcatctgggcagtaaatgttcaaatagctttaaccatgagtcacttcacatggatccaacacgtaatgatttggggaagcataggagcttggtacgtcttcctcgctctttacggtatgttaccagtaaaactctctggtaacatctttcacatgctcgtcgagattcttgcccctgcacccatcttctggcttacttcacttctggtcattgccgccacaacgctaccttacttgttccacatttcataccaaagatcagtgaaccctcttgaccatcacattatacaagagatcaaacatttcaggatcgatgtagaggatgagcgaatgtggaaacgagagaagtcaaaggcgagagagaagacaaagattgggttcacggctcgagttgatgctaagatcaggcagctaagaggcaggcttcaaaggaagcattcggtgttaagtgttatgagtggaacatcgtctaatgatacgcattcttcaaactcacaatag

SEQ ID NO: 176350 - DNA, 622 bp, Arabidopsis thaliana landsberg
gaaagacactttcataacgcatagagcgttttgtgatgcattagcagaagaaagtgcaagactccactcaacttcttcctccaatctcacaaaccctaaccctaatttccaaggccatcattttatgttcaataaatcttcctccttgctcttcacgtcatcacctcttttcatcgaaccatcactttccaccgccgctctttcaacgcctccaacggcagctctttccgcgacggctcttctccaaaaggccacctctctcagctccactactttcggcggcggaggacagactcgatccattggtcatcaccgacatttgacgaacgtcaacgagtttcttggtgttgaccgagtcatgatgacgtcagcttcttcgtctgagtacgaccagctagttgttgatgggtttacgtccacgtggcagaaagctgaccgtttgaccagagactttcttggactcacgggtcatgggggacacgttagcgtcagacctggggatatgctagagtacgcgggtggagtggcgtttcctatgtcggcgtacgataccgaatctcatgatcactcgtttcagaaggcttacgatcatctgggattctcaggggcccatcgtatgtaa

SEQ ID NO: 176351 - DNA, 125 bp, Arabidopsis thaliana landsberg
atgatttggaagcctctccgaagatgttcatcgaaaacgaagaagatctattggacattggattttatagttgaattttacttgaattatattggaacattcgataacctactcgagactaaaac

SEQ ID NO: 176352 - DNA, 43 bp, Arabidopsis thaliana landsberg
atgtatttcacccctggatatgcttttcatgtgcaagctcacg

SEQ ID NO: 176353 - DNA, 301 bp, Arabidopsis thaliana landsberg
atgcttcattttcgtgaacattatgatgccgcggtagtggccgtccacaggaacggggaaaaactgcgtggaaaaataggagaaattctgctgaaggcgggtgatcttttactggtggcggcaggcagcaggtttgaaggcatcattcatcagaatcatggcctctaccattcgatccatagatacctttggagggccattgaaggaagctttcccgccgatgtcggtctccataaccctcccagatgatatccccgtcagcagaggagacatgaaagttaaggccaaaaatcagccggag

SEQ ID NO: 176354 - DNA, 347 bp, Arabidopsis thaliana landsberg
atggggtttttgagacccaataaaaatcctgacgtggcaaattttgattgggtaaacaagttgacaaaaaaaaaaaaaatagaaaacgcgtttaatttttcttcttcttctctctcttttcttcgagtttgccgacggagagaccaaagtcaattcacttcgtcgacgttaatctattgattggttcatgaaatcagcaacaaaaatatcaccttaacgactgtttcaaccaccgggatgattatcgaagatccaaatcggagacaaatcaaaatcgattctttgaaccaaatcgaaatcgaggatccaaatcggagatgaacttggtgacaatcggagacgaaacg

SEQ ID NO: 176355 - DNA, 499 bp, Arabidopsis thaliana landsberg
gaaactaccggataacatatggaaagctccgaatctacagatcttctcagcgagtttcagcaatttgatcggtgaaatcccaaattacgttggatgcaaaagcttctacaggattgaactacaaggaaactcactcaacggaacgattccatgggacatcggacattgcgagaagcttctctgtttgaatctcagccaaaatcatctcaacggaatcattccatgggagatttcaactcttccgtcaatcgccgacgtagatctttctcataatctcttaaccggaacaatcccttccgatttcggaagctctaagacgatcacaaccttcaacgtttcgtacaatcagctaatcggtccgattccaagtggttctttcgctcatctgaatccgtcgttcttctcctcaaacgaaggactctgtggagatctcgtcggaaaaccttgcaattctgataggtttaacgccggaaatgccagatatagacggtcatcataa

SEQ ID NO: 176356 - DNA, 276 bp, Arabidopsis thaliana landsberg
tgtgttcgaagattaatcgaagagaaagatgtaagccaaggcttcaatgctctcaagtatttattgaccattgttgctgtgtgcttgagaacagcttttagcatcaacagaggaaatgattggaaaatagcggcttgggttttctcggggttggcaacattttacggcacatattgggacattgtttatgactgggggttgcttcatagaccatctaaatcttggttgagagagaagcttcttgttcctcacaaatcagtctactacgttgcaatg

SEQ ID NO: 176357 - DNA, 250 bp, Arabidopsis thaliana landsberg
attgaaatcacaaggtgaggaaggggaacgggatatcttaaatcaacagattcaagcgttacaagccaaggtgagtaatatattctgtcatttcgagacctcagaagtttgtttacgatttttattagtatgtgtaacttgaatctatgtacagttgctagaagctcttgactggaaactcatgcacgagtcagattcctccatggttaaagaagatggtaacatcagcaatatgttctgctcaaaccag

SEQ ID NO: 176358 - DNA, 100 bp, Arabidopsis thaliana landsberg
aggtgaaataaacataggcaaagatgtaggatcttttgatgttgctttccaaacaacaactacacgaacaggaaatgaaaaattagacgatgatgaataa

SEQ ID NO: 176359 - DNA, 115 bp, Arabidopsis thaliana landsberg
atgctattggtgtggttgcaagtgtttcttctatcaagaggtttccttatgtctgcaataagggtaagaccgactatgaggccaaatatgtttctttcgagcttatagataattg

SEQ ID NO: 176360 - DNA, 327 bp, Arabidopsis thaliana landsberg
  unsure (1)..(327): unsure at all n locations
atgggaactccaaagtacgnnnnnnnnnnnnnnnnnnnnnnnnnnnnagtgatcggcccgaccatcgcgctgaaagtaaaaaaaggagacaagatccaggcgcatgtgtatacgcgttaccagacaaatacagtctacaacaatgacaacactttgacgtcgatagccactgcgttgtctgggaacattgctgcagtgcccggactcgatgctccggcgccttctggttcagtactgcaaaatgctttaacaggaatctacccgacaggaagcaactctacaaaacccaaggcttacatcaactgcatcgtctttgataatgccatg

SEQ ID NO: 176361 - DNA, 267 bp, Arabidopsis thaliana landsberg
tggtcgtatgcccaagaggaggcaatagcaaaatccgaatgtgaagcattaggggaaccagagaaaagagaaacacttgaaatcatcattggtggaggtggtttacctgctccttttccctctccccctacatattgcccacctccttcaccaaaaccactgagccggttggagaaagcaaaacgtgttcttctcaaattcaaaaccacaatcgacgaccccaattgttacacggaaaactggagccaggacacaaacgccgtgtaa

SEQ ID NO: 176362 - DNA, 2324 bp, Arabidopsis thaliana landsberg
atggacaaggctattgaaaaaaatctgattcgattaggtttatcctttcggcatttgtggggtatagattatgaactcgatcaaatgctagtagcacatctaaagctaaaaagaccagagagttttattgtaacctccggtttgcagggagacaaaggatcattgacattagcattccctggtttgaatgcaacacttgaggtaatatttgacgacctatattgatgtcacaaccgcacatatttcaacaatatccttctttatctgagatttcataaaacattccagctctggaaatcatcttcggagtttactgcgttgaggtcagtgattatggtgtcacttgctcagtgcatgataagtctgtcacattccactgccacatatagcaggtacatcatgtgatccttataaccatctctcttcttgcaaaggtatatcttcatgttttattcccacatgtaaaaactatttcgtttttttttttcttacagcaacttggcagcgttctacacgcgaaatctggcagagaaatatccagatctgaagccaccattacttcaggtgaggtcgttggctatgtgcaccagatgttatgtgggttgagatgactttgtattttatcgaaatagtcacaaaaccgctaaaagtttctccttattttattgtagcttttggtaactttctggcaagataatagcgaacaagtccgtatggcagctcggtcattattccaccacactgcttctttggcaatacctcttccattatgcagtgatcacgcatctgaacatgcagaactggtgagatccctgtctggaatcagtctaaacgaacctaaagttcttagcacaggggaagaatatcccacaaacagtctggactctgagcatatccatcaagctcaacggctttctcaggctgaggagtcagaaatactctcatggcttgaatcttttgaaatgcaagactggatttcttgtgttgggggaacaagtcaggacgcaatggctgctcacatcattgttgcggctgccttatcaatctggtacccaagtctagtaaaacctggtctagccatgctagtcgtccacaaattgttgaacctggttatggccatgagtgagaaatacagctcgactgctgcggagcttctctcagaaggaatggagactacatggaaaacatggatcggacctgacattcctcggatagtttcagacatatttttccaaatagagtgtgtcagttcctcagtcggagcatatcaagttgtaccatcgtctataaaagagactctggtcgaagttcttcttccaagtttagccatggcggatgtccttggatttcttagcataatagagagccaaatatggtctacagcttctgattctcctgttcatgtagtatctctcagaactctcatcagaataatccgggctgctcctagaaatctggtgctgcatcttgagaaggtttgtagcatctacttttacattcagcgaggctagttgagatttaaataagcagaacatttttaccgatatatgtctgtatactcttatagagatttgagaaacatttgggaaaatcttgcaggcagttaactttgttcttcaaacgatggacccaagcaacaccgtcatgcgtaaaacttgcctgcaaacctcaatggctacgctaagagaagttgtgcgcgtatttccaatggtaatcttaaacgattcgtcaacaaggttagcaatcggcgatgttatcacagagatcgacaatgcatgtattcgcatatacgacatgcgaaggtacaaaaatttacatgctttgtatttctgtcccacctttatctcagtttcttagttgtttgtgtgattcccgttgcagtatgacaaaaataagggttttggatgcgagtggacctccgggtctcccaaattttctcagaggagcttcagaatctgccgtgacaacagctatatcagctctcagcttttcacctgatggagaggtaaaatttatgcataaacacattgtagcttctgcaccaaacattaaagtggacaagttcccgatgaatactcttgatgagatcctaagaataaaatctctttgtatggtagggattggttgcgttttcagaaaacggtttgatgatcagatggtggtcactaggatcggtttggtgggagaaactaagccaaagtctcacacgtattcaatgcaccaaactaatatttatccatccatgggatggattttcatcaagctcttcacgaacaagtgtgatctcaagtatctctaacgacgaacaagaacttcctcttcag

SEQ ID NO: 176363 - DNA, 316 bp, Arabidopsis thaliana landsberg
atggtcgtacgctgtacatcttcgcgccatcaacatcatccggtctggcaccagagacgttagtctgagcaacagcacaatacaccacaacggttacaagtcacgtcgcgacgctctgtgtgaccggcatggcactaatcacataacagcatagcagtgcctgcgtagcggtgtatgcggcccaacgattggtacggaccattctgcagcacatcctgtgagccgctacaggcagctgctgcggatcgcgcgccccgagcacgacgcgtctgacgctgtgatcagcgctttgaacggcagccgagatttcttgtga

SEQ ID NO: 176364 - DNA, 160 bp, Arabidopsis thaliana landsberg
aatgttgtcgtacgaattaaataaagaagatgtttcatgctttgtggtgcaacatgaattattcgggatcatcgttggtagtacgtttccatattcgatcggagatccttctcgtcgtattggaagcagaggtttagaatctattctggacgatcaatag

SEQ ID NO: 176365 - DNA, 36 bp, Arabidopsis thaliana landsberg
atggggagaaaattgattgtacgaacggaacgaata

SEQ ID NO: 176366 - DNA, 234 bp, Arabidopsis thaliana landsberg
ttcgttgaagagaggtcattggtatacccaagtgtttacgcaaggcgtagtctaagctatctattctgcgatgagccagaaaaggccctcctcgatgggatgcatgcacagggagtgtttcctgattggccaaccgccttctacttgcagtctgtggcattagccaaactcgacatgaacactgattctgctgatactttgaaagaagcagctcttcttgaagtaaagaaatag

SEQ ID NO: 176367 - DNA, 188 bp, Arabidopsis thaliana landsberg
ccgcttacgcccttcctggcgatgatgttgtctcccactttgacgagattgtatctcgagaatatcccaagtttggtggagcttccttcctcatttcagaatctcattcaactgaagaacttgaccataatagactgcatgaatctggagactctgcccaccggaatcaacctccaatctctcgatag

SEQ ID NO: 176368 - DNA, 147 bp, Arabidopsis thaliana landsberg
attgttggaggaaaggatttgaatttggatgttacacggaaagatgattcaattgggttcaaattagaggcaaatgaagatgaaattgattggatgaatctagaatctgatattcgtctatggactagagcattacgtcctgttcag

SEQ ID NO: 176369 - DNA, 159 bp, Arabidopsis thaliana landsberg
gaggtcagagtcaatgacttgaaatacttgattcggaaagttattctcaacaaagttgatgatgccctagccgtccttgaacgttggatctattgggcttctgctcgtcaaaatctccaacaacactattccaaaactataaacatccccagacgttga

SEQ ID NO: 176370 - DNA, 721 bp, Arabidopsis thaliana landsberg
atgaaaaaaatcaaggaagaagaagacgacgttgacgtggctgatgtggtggttgaaagttggttgaagcgtcgtaaagagaactgtctaatcatgtttgttgagctctaccagcaggatattcaagctctgacgatcaccgcaagtccaaagattgcgggtgcggaggatattcccgcaataggtggacaagaactcctgagtttggtttctttggtggagatgattgaaaacatggataagaagatggtagaccagctgaatgaaattataacaatgatttcagatttggataaaagagttgaatcgttggaagcattcaaggatgagcagaaagcagagcagggaaaggtacgtattaataattgcgtaatactgagtaacactgataactagagtataattgcgtaatactgatataacttcgttcacccgcagcatcaagatgagatggaccaagaggagaaaaggtgaaccgaaagagaaggatcaagaggaggatattgttcaagagaaagatggtgatcaagaggaggatgttgttcaagagaaagatggtgatcaagaggaggatggtgtcccgaaagagaaggaacaagagaaagagaaggacccgaaagagaaagagaaagagaaggacccgaaagagaaggatggaggtccttcaaaacccgtggaagcaaacgtcacgagaaggatcactcggagaaccaagatttag

SEQ ID NO: 176371 - DNA, 156 bp, Arabidopsis thaliana landsberg
tttttgtatttgaaattaaagccaaaacgaaaacctcgagaggacgtagccaaactaggagagtttctttgtctgtttgaggtcaaaccagaaacacatagagcgtttcgtgtcgcttcgaaaaagatttttgggcttgtgggtccacatagctaa

SEQ ID NO: 176372 - DNA, 151 bp, Arabidopsis thaliana landsberg
caaacaaccacctgattatgtgctcaaggaagcaaaaaatacgaataagttctttaaatgtgttgggagtgtccacaatttagggaatggtggaacttatggtggcctcaaaagtgcttatatggctttgactggagaagagtttgaagct

SEQ ID NO: 176373 - DNA, 746 bp, Arabidopsis thaliana landsberg
  unsure (1)..(746): unsure at all n locations
atgagacgttatgctgaattcacggcttcgtttattcacctgaatgttttatatggagatgggcaggttcgttataagtattctctctgtccctaacgatatgtgttatttggagcttctcacccaaagctcttgacatttgtctatgaaactttgcagcttgatataaatttggagcgtttaagaatggcagtagacagcttgattcttaagcttgcaaagttgttcccaaggccaaagcaacagatggtgtttctcattaacnnnnnnnnnnnnnnnnnnnnnnnnnnnnnnnnnnnnnnaagaacccttggctctctcatgtttaagtgcacccatgtagaccactaagaagtcagcctatgcgaattatctacaaatcttaactcatatctattgtttattgggtttctttccttaccagaaatatattaatgttttgatcaatcttcatctattctaggaagctgaaccagagggtgggaaaattcaaatgcattttgaggaattactaaagagcaacacttccttatttgcggtaagggacaatgtttcagtttgattgcctttataatttgctgatttctgtttgatcaagtatacaagctacaaagagcataaaaagatagtaagatttggtgtattatgtttccattattgttttgtttaatttcttgtaatttcgcaggaagaattgctggtggagcatttcagtgatatgatcaaaattgttaaaagccgagcca

SEQ ID NO: 176374 - DNA, 202 bp, Arabidopsis thaliana landsberg
tggacgacggcgagacaaccaaggaggagccgataagaacactcgaaccagggaggagagacgagctattggccgaggccaaaactcgagagaacttagagagagggagaacaagaagaaggacaaggcagcttcttctttttctttgacattggaaaaaatcatgtcaaccggcgagatgccggccgccggaggcaattag

SEQ ID NO: 176375 - DNA, 428 bp, Arabidopsis thaliana landsberg
gaaatgtgacccgagcagagttcgcaacaagtctcacgatccgcgaaccacgacgcatcgcaagcagttttcgaaagtccgcactcaaggcagtcgccgggctcatgaagaccacccaactcctggtagcggcgccaatggctcgtcatgccggctacttcgggatccggctggccagatcccgcacgacgtcctgaagctcggcgaccgcggacttcagggattcgatctcctcagcctgagcccggaggaccgcctgatgggcaaccgccgagaacttgcggtcgaccttcgcctcgatcccgtcgaggtcgtcacgcaggttggtgctgtgcgtgttggctacctgctcgtgggtcgcttgcactggtgccacgatctgctcacggagccaggggagggctacacgccatacgatcctcgcgaga

SEQ ID NO: 176376 - DNA, 349 bp, Arabidopsis thaliana landsberg
atgatcttcatgaccgtgagtggtgaggaaaaaggattgctgggttctgaatactattcagaacatcctacagtagatctttccaaagcatctgccgacctgaatacagatatgatcggcagaggtgatacttcaagaaaacaagatacattgaattatatctatgtaatcggccatgacaagctcagttccgacctggcgcccattaatgaagctgccaacaggaagtacaccaatattgcactggattacaaatatgatgatcccaatgacaaggaaatgatctattaccgtagcgaccattataactttgcgaagaaaggagtgcctatcctattcttctacgatg

SEQ ID NO: 176377 - DNA, 419 bp, Arabidopsis thaliana landsberg
atggcaaagggaaccattttggctttggatcacttgtggagacactaaacaaaagaagaaggaaagagagttatgcgagctcttctacatcaacggttgtgcagcttcaagagcagctacagctcaagatatctgaacaagaggagcaaaatgcaaaacgtgatgtggagcactgccaatctcaatctcggatagccaacttggagaagctcgtcctcttcatgaaagaaaaagatcctgagttggctgcttatttgtcaactgattctactgaacctgaaccaggcacacattcaaccaccacaactccatccacacttccaaccaccacagacaccgcactagccatcacagttgtaggcaccacacccttagtctccacttcacctactatttctaacacttcttctaaccattaa

SEQ ID NO: 176378 - DNA, 118 bp, Arabidopsis thaliana landsberg
gttgtttaaagaaaaccctcatccagacgacaaacaaagaaagagattaagtgctgaacttggtcttaagcctcgacaagtcaagttttggttccaaaataggcgtacccaaatgaag

SEQ ID NO: 176379 - DNA, 290 bp, Arabidopsis thaliana landsberg
ttccttttgattgattcaaagattttgcggaacgaatgcacatacaaaaagctaatagatgtattcccaaagctatcagtagttgagtatcgcttggtggtccttccgcttgtgaagaagttcttacaggtttgtcaacttcaaagaccagtcactgactcactggtgttggattaaatcttattgccagtttaacttaatttgttttctggcaggataaactgaaaaagatgatggaaacaaatagcaattcagttgctgcaggagattctgtcaacatgcagggctaa

SEQ ID NO: 176380 - DNA, 468 bp, Arabidopsis thaliana landsberg
  unsure (1)..(468): unsure at all n locations
atggccggcgcctgccggcgccagcggctgcgcgccgaccaggcgcagctgcgcgacctggcctccgaggtcgagtgggccaaggtctccaacgtcggccccgacgactacncgcgcatcgccaccgcccggggtcgtgaggtcaccggcctggacgcggagaccgtcggccgggtcttcggcgcctacgaggacgtcaagcgcgccgagggccgcatggacatggaggacgtcctgctgctgacggcggggctgctcgccgaggacgagcgggtcgcggcccaggtccgccggcagtacaagtggttcgtcgtcgacgagttccaggacgtctcgccgctccagtccgcgctgctcgacctctggctcggcggccgcgacgaggtctgcgtcgtgggcgaccccccccagaccctctactccttcgccggcgccaaaacacgactacatgcgcgacttcccccgcaa

SEQ ID NO: 176381 - DNA, 463 bp, Arabidopsis thaliana landsberg
ctcaaaacttgatgcttctagcttgactcagaaactaagcaatcatttgagttccggagtcgaatctttgcagaagcccaagttgaattctctgggaaggcctaaacttggaaatattatggctgatctgcgtgcagtgaaaactcaaaggtacaaaaggaacatacagcagttcctggtatgggatctcgcgataatatcttaattcaaattcgctaatctcttccactataggaccattggaggaaataaagaccaaccgagttctgcagtgaaaccagaatttagctcttccataagcaaggagagaaatactgaagcaccagtaaaaaagagctctgagattcatcatttggctcctagggacaaaacacaaaccctgcactgcccatcttctttaaagcggaaagctcttgatgaggtttattcttcaactcacagtttcgatattattatttcatga

SEQ ID NO: 176382 - DNA, 383 bp, Arabidopsis thaliana landsberg
atgccggcggtagacacgaagatcctcaaggacaagggttatgcctacgtaaacgcctttgtcgtcaacacgctcttccagtcgacagttcggacggagcgtcggcagaagatgttcgccgagttggagaagatcaagtcggggtattgagggccgaaaagacccctccctaatccctccccacaagggggagggacttacgttgcggcactctcagcggaaaatttgaaggaaaagcaggctactagtctttctccccccttgtgggggagatgcccggcagggcagagagggtcttacaccgcgacaccggcggatcctccgccagcagcacgaaggcatccggatcgaacgccacgccggatctccgcgccgatcggcag

SEQ ID NO: 176383 - DNA, 694 bp, Arabidopsis thaliana landsberg
atatgacggggaggctacattcttcgatgaaggtgtcagatcttcgaagagacagcagcttgaagaaaagcttctccaagtaatatataataagatcttttaatcatgttgttaaaattatatgcagacgtgtcaatgaagataaatgaatggagattgatactatgccttccttactataatattaccttacagcttgtgaatccagcgtttcaagatgtattgggacatataagatggggaatacttgaaaagtttaaggcttcttttgataaggctttaggcattggtgaagggttttcttcagcttcccaagattggttcaaggcttgcatgacccaattcgatgaagagtgtgcaggtgccatcattgaacaagccaattgggacacatcaaaagtacgggacaagctagtacgtgacattgaggctcacatttcctctgtgcggacttccaagttatctgaacttaccagtctatacgaggtaacagaaagaataaagaaagcttgcgaaattgagcttagttactgatttttagcctctaatttgcagtcaaaagttcatgaagctttatcagaaccggtggaagctttgttggatggagccaacgatgaaacgtggagcacagtaaagaagcttcatcggcgtgaaactgaatctgcagtatctggactcagtagtgcattagctg

SEQ ID NO: 176384 - DNA, 887 bp, Arabidopsis thaliana landsberg
atgaatgctcgagatgcatctgttgctcagtccctgtcggaactgtgtaaacgccttcaatcaaaccacaacctaaatgttaaaggtcagtggttttggtatagctttggtggtctggagttatgatatagattagattgctgatgaaactgttatatgtgtttggttttagatgatttgccatttgaatttaaagcgttggagctggttttggaactatcttgcttgtctttagatgcacaggtatgccacattctcttcatcattcttctatatgatttattgcatgactttaagctaattgttaagctcaaaagttttggtgaacgtgatttttaggtgaatgagcttgagatggaggtgtatcccgttcttgatgatctagccacaaacatcagcacccttaatctagaacacgtgcgcaggctaaaaggtcgtcttcttaccttaacacagaaagttcagaaggtgaacacaaaagactcttcaaatttgaaaaagccctactaccataatttgattttggaggtcaaaacttgcaggtttgtgatgaaatagagcatttaatggatgatgatgatgacatggctgagatgtatttgactgagaaaaaagaaagagctgaagctcatgcgtcagaggagctagaagataacattggtgaggactttgaatcttctggaatagtttcgaagtctgcgccggtttcacctgtgggctcaacaagtggaaactttgggaagcttcaaagagcctttagcagcattgttggctcacataaaagcttgttaagctcctctagcatcggagagaacattgatcaactagagatgttactagaagcttactttgtcgttgttgataacactctgagcaaattatcatcg

SEQ ID NO: 176385 - DNA, 149 bp, Arabidopsis thaliana landsberg
gtaccctgatgatatctatgaccgccaatggacttcgttctttgatacagagtggacacaaattaacaccactagcgatgtgggaaattccaatgactataagccaccaaaagtcgctctcactactgcggccattccaactaatgcca

SEQ ID NO: 176386 - DNA, 2480 bp, Arabidopsis thaliana landsberg
atgggccgtatccctcaccgagccccattatcacatatcgtcgctttcttcaaagatgttggagaagttgttcatgttcgacttgctataaaacgagatggtgggcgtactggctctggttttgttgagtttgcttctccctatgaaacaaaaaaagtgagaccagttttttttttctttgaaaacttgtgtatagttagttatatgtttaaacgtatccaaggttcttttctgacgtttttttcactctaggcactggaaaagaaggatggagaatgtttgctcgatcgcaagatttatcttaaactgcctaagctaagctcttcattgactcttcctacgtaagtaaacatgatttttccacgttttgtaactgattgctagactttttgatacaatatcacagaagactaaggcttttcattttttgattaattaggtattgcatagatcaccaggtttggtaagggaacaagacttttttttgaagtttttttgtatacatgtagagatcagtagcgttttccatttttctaggtaccaagacttccttccacgacaagaagatgagacacctcccgccgattttgctgaggtaccaccctactgccctcattatcttcaaaacgctcgaaatgtttacttattttctggggctgaatcttgctagctactttttccttgtttcctgctaacacacttgttcctgtataatgcacaggaagttctctttgttgccaatctctccccccaaactaagatattagatatgtaagtagcactcccacttttcttctctgagcaaagaaaaagtaactctcccatcactcatattttaccctccacttttgcagcttcggtttctgtcaagatgttggagaagttgttagtgttcgacttattgcaaaccatgagggcaagcctgtgggctgtgcctttgttgagtttctttctgcacacgaagcaaagaaggtgagactggttttgtagtcatgatggacgattttagtattttactagtcattttgaaaattagtgtttacaaacttatgatggaaaacatactactagttttttgaaagctgattaaatctttttaatactgtaggtgctggaaaacaagaatggtgattatttgcatggtcataagatcattttgatgagaggacatggtgaaactcccaatttcgctgaggtacctcttcttgttgtcttcacaatatgtcaggctcagcagaaacctttaataataataacagaattcttatgttgggggtgaatctttagatgaggctaattgtgtttttttttcttttccttttcttctttgcgtcgtgctaactcacttggctgttaaactcaggctgttgccacaagtaaaaaaaagacgctctttgttgcccatcttactccccagactataatatcagatatgtaagtaacaccttaagatttcctctttcgttcttggagcaagtttctcatgactaatattttatcctccacttttttacagcatcaatttcttcaaagatgttggacaagttgttcatgttcgactaattgttaaccacactggcaagcatgtgggcaagggatttgttgagtttgcttctgctaaggaagcagagaatgtgagagttgtttttctagtaattgatgaaaagtaatgtatacaagtcgcagtcatttgattagttaaaccgtttatttatactctaggcgctggaaaagaagaagggtgatatttgcaggatggcgagatttttcttaaggcggctaacatagctccattccctccacccaagtaaattaattttccatgttatggagatttgttgctgtcaacttattgccaccacagaagactaacactaatattatatttcttaactaggtggtgcgtagatcacaaggtttggtaaggaattttcaactatttgcatcttgagggtttgttatcaagagcacattgggtgaagtttttggtatacatgtagagatcacaagggttgtttaatgttccaggtacgaagactaccttggacaagaaagagatgaggcagcagtggaaggacttgctgaaactccctattttgttgaggtacgtgttgttatcatcttcaaaatatgtcaggctcagaggggaaatgctcaagtgtttgataacaaaactgttacctccttagagccatgctaacacacttggctgctaaatacaggaagcaagaaaaaagacgctttttgttaccaatctccctcctagaactagtatacaaaggatgtaagtagcacctttagtttactctttcgttcttggagcaagtttttcatgactgatgttttatcctcttcatgtttacaggttgtatttcttccaagactttgaagttgttcgtgttcgacttattgttgaccaatcgggtaagcatatgggctgtggctattttgagtttgcttctgctaatgaagcagagaag

SEQ ID NO: 176387 - DNA, 416 bp, Arabidopsis thaliana landsberg
gttttgaagattatatatcatttctctgtgggatcagcggctcggctcaggtggtattcaactacaccggattcctctgtcccgctaacaacacaacagtcagtggttttgacctcaatttgccatcaattgcagtatcaacacttagtggcatgcaaattttccgaagatcgatgagaaacatagccggaaatgagacgcacaatgttggttggagtcctccttatggtgtttcaatgaaagtatcacctactcaattttctatagctatgggagaaactcaagtacttagcgtaaccctcacggtgacaaagaacagttccagttctagttttggcagaatcggattgtttggaaatacaggacacattgttaatattcctgtaactgtcataacgaaaatcgcttcgagctga

SEQ ID NO: 176388 - DNA, 1919 bp, Arabidopsis thaliana landsberg
  unsure (1)..(1919): unsure at all n locations
atggcggaaaatacggccagccatagaagaaaacctcggagcttgaacgatcgtcactacagtatcctccaggatctttctgcgcctcctagacagcctccctcttcttctcgtacgattgttctcttctatcgtttctctatggtttcggattcgtatctgtctttgattttgagttttatttattatatttggggacttcagatggagaagatgaagagacgaagaagtccatgattaagcttgctggacgacgtcgtctttgcaaggccttgccaaaggaagacgaagctgatggatatgacgatcctgatttggttgatttctattccncaggtaattttgagatttcacccgattttagggttttcgcaaacccatgtctcttagtttacagaaagaaattggtgtttccgttgatgatgtatttcaattttgtcctagtagcttactttgaaattagggtttcttcgaaatctgagtttctagtctggtgtttgattttcgttctttatagctgttattatactgcgttttgtcagataactttacttgaatacgtttgtttttgcatgatgctctaatcagttaaaggagagacatcactagacagcgctggaattgggaacaaattcacatcttgggatgaatcaaaggaagctaacactgagctggctggcgagcctaacttttcgataatcacagacttttgttcgccctcacctcagttgaagcaaaaagaggaaatgcaaggtgatggaggaaggaacgagatcatgggtattttggatgatttgacctctaagcttgggacaatgtcgattcagaagaagaaggatagccaaagcaatgattttgatgcatgtggagtgaagagccaggttgataaatttgattttgaggatgccaaatcctcattttccttgctatcggatctatctaagtcctcaccagatgtggttaccacatataatgctggcgttaatagtatcaaggacaagcaaggcaaatctggttttgccatccgggaagagcaaactagtaaggaattttcaagggaatgggaagaaagaatttcgaatgttggaaagcaaaactcatattctggtcggcactttgacgataactctgaagataataggcagggatacaatcttgaccgtgggaagagccaatgcaaggaagtcgaccaaagtatgaagacgaccaggcacatagaggtaagtgagaagataagaacagtcggaaggtctaatgctgccaagctaagagacttagacgaggatgatgatgaagatgactgtctcattttgtccgggaaaaaggcggctgaaatgaaaattaataagccagctcggtcttataacgccaaaagacatggttatgatgagagatcgttggaagatgaagggtctatcactttaactggcctcaatttgtcttacacattgcctggaaagattgcaacaatgttatatccacatcagagggaagggttgaattggctttggtcattgcatacccaagggaaaggtggaatacttggagatgatatgggtttaggtaaaactatgcaggtacggaaatctgcaacctgcacttttcttttcgttatcaataatgtatctttgattttggttgattcgcattgcagatttgtagttttcttgctggtttattccactccaaattgatcaagcgtgctctggtagtggccccaaaaaccttgctgcctcactggatgaaagaattagctaccgtgggactttcacaaatgactagggagtaagagcgactttctttaatttgtatatactgaactagtgttttagtgatactgattgtctttctttcctttttacagatactacggtacttctacgaaagcccgggaatatgatctccaccacattctgcag

SEQ ID NO: 176389 - DNA, 42 bp, Arabidopsis thaliana landsberg
atggtcaaacggcgtcatcacaagggacacgagaagactaag

SEQ ID NO: 176390 - DNA, 298 bp, Arabidopsis thaliana landsberg
agtcgagctaacacacttggctgttatattcaggcagttgctgtaagaaaaaagacgctctttgtttcccgtctctctccggaagctcaaatatcagatatgtaagtagcaccgataattttctctttcattttactggagcaaatttttcatgactaatatttatcctttgttttacagcatcaatttcttcaaagacgttggacaagttgtacatgttcgacttatcgtagactacacgggcgagcatgtgggcgatggctttgttgagtttgcttctgctaacgaagcagagaag

SEQ ID NO: 176391 - DNA, 135 bp, Arabidopsis thaliana landsberg
cagctcaggccactcgatgacatcactcgaccccctggtcgagtatatccttcaccaatcatcgccatcactcgatcaagcactcgaccacatattcagagtcgactcaaatccgcactcaaccagacaagctga

SEQ ID NO: 176392 - DNA, 253 bp, Arabidopsis thaliana landsberg
ctggttactattgagcaaggacaagctgagacttacaaaggagaatctgcagctgtcagcaaaactggatctcttggaggaagaaattaaggaagaagctgttggtgaaaaggttctattgcctgagaaacagataatagaaagaaagatgaattgtcttcttgagagtcttagtcaagaaaaggagaaatctcttttgctagaaagagaactgagtgagaatcacaagaagatcagaatgctgaacaacggg

SEQ ID NO: 176393 - DNA, 137 bp, Arabidopsis thaliana landsberg
ggcttcgcgaagaaccgagaaaccaccaatcaaatcgctccaattctgcgtgggatcggtacaaatccgtcgcaaatttagggttcacggtgctcgattgggtttcagtaactctcgagggagttcaagcgatgtag

SEQ ID NO: 176394 - DNA, 2012 bp, Arabidopsis thaliana landsberg
  unsure (1)..(2012): unsure at all n locations
atgtttccacgtggcgctgatgcttacattgatgatatcggacggttgattgatctcagcgacggctctatccgtacagccatcgataccggttgcggggtacgttcaaaattctcttcactctaattaaaccgaaccacccggttcgattttattatgcatattcgtaatctttattttattatatttcaaatttaaataaagaaaaaaatagaagattttccgtcatcgatttgttcaatcgaataatctgttgggacgtcaaatattaactaaaaagatatattcatgcatatccatatctaatctaaattccatttgattagtttactctcatataagtgaacaataattaaaatttggaattagtgcatcacaattttgtagattcaatgttaaaaatgaaagcatattgtttcaacatttttggtttctgagtgtgacccactaaagtcacctaatcgtctaatgtcactgttgacctactcatactctaccgttaaacctgtaaagttgaaaaaataaactagtagttgagtcaaaatgaagaatatattttcttgtctcttagtttgacttcatttgtcaaaacaagaaaaccatatgtctttttgagttttattggtgtgatcaatcaaatgtgtctttggtttttcaggtggctagcttcggtgcatatcttttatcaagaaacattacaacgatgtcatttgcaccaagagacacacacgaagctcaagtccagttcgcactcgagcgtggtgtgccggcgatgatcggaatcatggctacaatccgcctaccgtacccttctagagcctttgatttagcacattgctctcgttgccttattccgtggggccaaaacggttcgactctaaaccctaaataagtaggagattactcccttttgagttttgagttctaacactttgtgttgtgttgcagatggggcttacttgatggaggtggatagggttttaagaccaggagggtactggatactttctggaccgccgattaattggcagaaacggtggaaagggtgggaacggaccatggatgatttgaatgcagagcagactcagatcgagcaggtcgcgagaagcttgtgttggaagaaagttgttcaaagagatgatcttgctatttggcaaaaaccctttaaccacattgactgtaagaaaaccagagaggttttgaaaaatccggagttttgtcgtcatgatcaagatcccgacatggcctggtaatcaatcagtttctatatctaagatttagaaatgttagaatttggctataaattttggaatgattcaggtatacgaagatggattcttgtttgacaccattacctgaagttgatgacgctgaggatctaaagacggtggccggagggaaggtagaaaagtggccggctagattaaacgcgattcctccgagagtaaacaaaggcgctctcgaggaaatcacnnnnnnnnnnnnnnnnnnnnnnnnnnaactgtggaaacagagagtttcttattacaagaagttagattaccagttgggtgaaaccgggagatacagaaacttagtcgacatgaacgcttacctcggtggattcgcggcggctctagcggatgatccggtctgggtcatgaacgttgtcccggtcgaggctaagctcaatacgctcggtgtcatctacgagcgtggtctaatcggaacgtatcaaaactggtaagtttaaaccaaacttaaactaaaccggaatttttcttgtgaaaggatatgatttactcggttttccttcttttttgttaggtgtgaagccatgtcgacgtatccaagaacgtatgattttatccatgctgactcggttttcacattgtaccaaggtcaatgtgaaccggaggagatattgttggagatggaccgaattcttagaccgggtggtggtgtgattataagagatgacgtggacgttttgatcaaggttaaggaattaaccaaaggattagaatgggaag

SEQ ID NO: 176395 - DNA, 54 bp, Arabidopsis thaliana landsberg
ataaaaccaaagttttacggtgataacaagactcacttcacgacttattggtcg

SEQ ID NO: 176396 - DNA, 345 bp, Arabidopsis thaliana landsberg
atggcgggaaacgcggaagttatgatcattccgatcaggaacaccagcaccagcggcatcggcgggctgacgtaaggcagcaacaaggcgaaaggcgcggcgccgagaatggaaccccagatgattctcttgcggccaatgcgatcaccaatcgggcctccggtaatggttcccagcgccgccccggacaggaaaatgaacaggcagtactgggcatgctggatgccaaggccgaaacgatccatcagatagaaggtgaaatatctgctcaggctgctgaggtagaagaatttggaaaacatcagcaccagcagcacgataaggctggtctgcacctgactgccg

SEQ ID NO: 176397 - DNA, 198 bp, Arabidopsis thaliana landsberg
atgccactgttgtcggagagaaagacgactcactccaggaccaccttcgaaaaaccttcacctacgattaaaccagattcaccggagaaactagatctagatcaagaaaatcgccttcaagagagagaaaagttcgagaaacgatgcaacgattgcgcccgattcttcaatattgctttgcatgaattagaatctagg

SEQ ID NO: 176398 - DNA, 804 bp, Arabidopsis thaliana landsberg
tttgagttcacgagagagtatgctcgatttaggagaagatttcctaatgtcggtccgtatttggatcgatgggctcctgtggaaaattgggctaggtgctattttgaaggggataggtataacatagacacgagcaatgcgtgtgaatcattgaacagtacgtttgagcgtgcaaggaaatacttccttttacctttgcttgatgcgataattgagaaaatttcagaatggtttaacaaacataggaaggagtctgttaaatattctgaaacaaggggtcttgtgccggttgtggagaacgaaatacactccttatgcccaattgcgaaaacgatgccggtgaccgagcttaacagcttcgaacgtcaatacagcgtcattggcgaaggtggtatttcttattatgttgacttgctaaggaaaacttgttcttgccgacgttttgatgttgacaagtacccgtgtgtacatgcgattgccgctgcccgaaactttgtggggaccgaatggatattagatggtctcgaaatggaagacctaacttcgcattattaccatatgaatacgtggatattggcataccacagaaccatttatccagtcccgcattcatcagtttggattattcctgatgagataagacaattgatagtcttaccgccggataccacaactaaaccggggagaaatcaagaaacccggtttccatcaacaggggaacgtcgtcgaaagaagactaacaacaagtttcagcatgggattaatatcaacgcgtggttgcagcccgaggagtccgcttcataa

SEQ ID NO: 176399 - DNA, 628 bp, Arabidopsis thaliana landsberg
atgctcaggctacgtttatttttgtttctgctcctaaccgtttgggtgttgggttgttccggtttggttcgcgtggtggttccagcccaaaaccgaagcaaagccactactcatcccgacgacggtctgtcttttcaactcttgacaaaagtttagtcaccaattatcgactggatttgtagtttgtaatagctagcttcttctttgtaataaaccccactaacgaaaaaaacaaataaaatgcatctcgtcaatagaatcagtttcttagttcagttaagatatagtttcaattaattaatactagttgtttagttaagcgtaatagattaaggggtgctaataataatttgaccgttgtgaattatgttggataaaaacagcgcgagctttgaactccatcttcgcggcttggaagatccgtgcaccgaaagaatggaacatcagcggcgaactttgctccggcgccgctatcgacgccagtgtactcgactcaaaccctgcctacaatcctctcatcaaatgcgactgtagtttcgtcaactccacaatctgccgcataaacaacatgttacacctctttcccactttttatgcactccatgtgttcgacgaattctcccactga

SEQ ID NO: 176400 - DNA, 132 bp, Arabidopsis thaliana landsberg
gttgatcggcagcacaaagttcgccagaatctgaggcgagaacggctgaacacgttgctaatctccaaacaacgatcaaaacctagtgaaatcattgaggattccgttcgattgttccgatacctaagctaa

SEQ ID NO: 176401 - DNA, 640 bp, Arabidopsis thaliana landsberg
tgggaaaacgaaaaagactgaggtgaagaaacaaagagagccacgagtctcgtttatgactaaaagtgaagttgatcatcttgaagatggttatagatggagaaaatacggccaaaaggctgtaaaaaatagcccttatccaaggtaactaaactttccctttttattttttgaaattgctaggcttgtgaaaatttgtgtttagaaaaatgcgaccattatagtgtaactgataatagccaatggaaacgaaaataggagttactatagatgtacaacacaaaagtgcaacgtgaagaaacgagtggagagatcgttccaagatccaacggttgtgattacaacttacgagggtcaacacaaccacccgattccgactaatcttcgaggaagttctgccgcggctgctatgttctccgcagacctcatgactccaagaagctttgcacatgatatgtttaggacggcagcttatactaacggcggttctgtggcggcggctttggattatggatatggacaaagtggttatggtagtgtgaattcaaaccctagttctcaccaagtgtatcatcaagggggtgagtatgagctcttgagggagatttgtccttcaatgatcgttaagcaagagccttga

SEQ ID NO: 176402 - DNA, 434 bp, Arabidopsis thaliana landsberg
ctctccaaacctggaaactttagtcatcaaggtaaatacatgtatatatcaaatttctgttgatcaaaacacacacttgttattctttttgctttacatgaatttcttcctttcgatttcagggacttgtgcacaaagttactagtagatgcggtgacgcctgcctttgcatccgtaagaagacgaggggagaatgttgtttattgacatgtcaagtgaaggtgttaaagattatagggtatcgcggaacttgtcgtgagcagaagcagatgagtcatttcttggcaaatttgaaatgtctggagactgtcaaggtgcgcgttgaagtggatcaccgagaagacaacgatgctagtaatacgtacctgagaatcaccaatgctcttatgaagcttcctagggtttcatcaaactgtcggatccatttcctctga

SEQ ID NO: 176403 - DNA, 1571 bp, Arabidopsis thaliana landsberg
atggcggcggcttcgaatgggagtgagtatttcgaattcgatgtagaaacaggtagagaatcgttcgcgcggccgtctaacgccgagacagtggagcaagatgaagaagatctacggtgggcggcgatcggaagattaccgtcgcagagacaagggactcataatgcgattctgcgtcggtcgcaaacgcaaacgcagacttctggttacgctgatggaaacgtggttcaaacgattgatgtgaagaaattggatcgtgcggatcgtgagatgttggttcgtcaagctcttgctactagtgatcaagataatttcaagcttctctctgctattaaagaacgtcttgatcggtttgttacgactcttcgaattctctctgtttctaattttagggagaaaaagtaaattttatatatatatatatggatcgtttgaatttgatacaaattttgttcgtagagttggtatggaggttccgaaaatcgaagtgcggttcgagaatttgaatattgaagctgatgttcaagctggtacaagagctttgcctactttggttaatgtctctcgtgatttctttgaggtttgtcttctttgttttatcttgtgagtattctaacacaatctttttttgatgattgtatctaatctctgtttgttgcagcgttgcttaagcagcttgaggataatcaagcctaggaaacacaagcttaatattttgaaagatattagtgggattatcaaaccaggaaggtgaattaaaagactgtttttagattatcgctatgtcatatgtatgatcacaagtactaatgttttttgctacttttgaaggatgactttgttgttaggaccaccgggttccggaaaatcgacgttgcttcttgctcttgcagggaagcttgataagagtttaaaggttagttgatccgtgaagttattaactatgttcatctatatcacatgtaacttatgtttgttatctcatttcgttttaaaagtcacgtactcacatgcatgtgtcctttttgttttttgcatctatgacagaaaacgggtaacattacctataatggagagaatcttaacaagtttcatgttaaaagaacttcagcatatataagtcaaacagataatcacattgctgaactcactgttcgtgaaactcttgatttcgctgcgagatgtcaaggcgcaagcgaaggatttgcaggttttttcttatttgatgttactactcactatgtaaacttcttcatcaagtcatagattctcaaatattttctgttttgatgttgtgtaattctaggttacatgaaagatctaacccgattagagaaagagaggggtatacgtccttcttctgagattgacgcttttatgaaggttagtatcatatagctcaataatctctcatgtttcttgatcacacaacaaagttttgacacatgctctttgttattaggctgcttctgtcaaaggcgaaaagcatagtgtttcgacagattatgtgcttaaagtacttggtcttgatgtatgtgctgatacaatggttggtaatgatatgatgagag

SEQ ID NO: 176404 - DNA, 165 bp, Arabidopsis thaliana landsberg
atgggccccaaggatgagaaatggtcccgccaaaaaggaccagctaggcccttgcccaggggcgggctgcgacacaacggaggctccaaccaaaacccggaacatgaaaataagctcacacatcaggaggacagcgaagcaggcacccgaggaacgttcgcagag

SEQ ID NO: 176405 - DNA, 854 bp, Arabidopsis thaliana landsberg
atggcgggtgatgatttagttgaaacgaagaagggaagctcgaagaactctaaggacagcaacgagagcaagctcaagcaaagtaatgctctatgtatcatttgctgcacaattgatttcaattgagattaagctcaattgactctcttttttgaattcgtgaatttgcagaatctccagctgagtttttcgcggagaacaagaacattgctggatttgataatgtgagtccccaatttgttggtttcaattcaaacgatgcatctttgtaatttcaattctgtatcacacgaattttgaattgtggatctcgtcagccagggaagtcgctttatactacagttagagagcttgttgaaaatgctcttgattctgcagagtctatttcagagctccttgaggttgaagtaactatgtacgttccttatttcgtgctgattcgagatgttagttctggtaggagaaactgtgtaggggtttagttcactgactgtcttgtttatatttttgaagcgaagagattgtaaaatctaagttcaactccatgattggtcttatcgatcgggaacgtgttgacacacagctgtatgatgattatgagacagaaaaggcccgtggggtgcgtgaattctgtgtttattactctcttattcgttctgatcaaatccttgtgcttttaagaagctactttttagtgttcaagaagtttcactgttctgtaatccttgtgattctaatatttgttgttgtttcctgttatgtagaaaaggttagcaaaggaagctcgagccagtgagatacaagctaattatttggcatcggccaagaaaaacaaagagcctggagtatcgaag

SEQ ID NO: 176406 - DNA, 411 bp, Arabidopsis thaliana landsberg
atagagagcaacatagagaagctcacggcggagattcaaaacggcgttcgtttggtggcggctttggatagggctggtgacgtggcacctcactccgagaaacgagcaccaatttgtataattacgaagcagcttcttccgaaatctccggagaacggtcggatcgagaccgtcgggatgacgtggcggaggttgcagccgcatttgagagttagccaagtgaagaacgagattctctcgctgattacgaacgttatcgatttgaaaaccaaagagaagaccaagccagtccatcaagtccatgcgaggtgtgaaatcagcaaacggaggtttcggaagatctccgactattctaagcgccgccgccgccgctctaacctccggataacgcagcgacggatgttccgttaa

SEQ ID NO: 176407 - DNA, 214 bp, Arabidopsis thaliana landsberg
atgggcgcattagatgagggatgtttgaatctggagctcgacattggaatgaaaaatggctgcattgagcttgctttcgagcaccaacctgagactttagcaatccaagacgctgtcaaacttctcttgcaaggtcttcatgaagatgtcaatcgggaaggcatcaaaaagactcctttccgtgtcgccaaggcccttcgtgaagggaccagag

SEQ ID NO: 176408 - DNA, 223 bp, Arabidopsis thaliana landsberg
ggtggcggcagccggtgcggcaaccgccttgcaaggagagaagcccaaccgccagctgtacgatgacgaaaaggctcgtttcaaggcactggctggtggtgatccactggaagaagccaagctgacggctgcggcttgctaccttgtccactgtgcagtgcaataccccaaagacagcgccgagttctcgtacttcagcaagggggaggcgttgggcatttaa

SEQ ID NO: 176409 - DNA, 1140 bp, Arabidopsis thaliana landsberg
atgatcttgatcgtgcctgagggccgtcacgctgttagattaggaaacgatgcagagatcagccaagaacttacggtggagaaaggctctatctactccgtcacgttcagtgcagcccgcacatgtgcacaactcgagtcgctgaatgtttcggtagcttcttctgatgaacctatcgcatcgcaaaccattgacttgcaaacggtgtacagcgttcaaggatgggatccatatgcatgggcgtttgaaggggttgtggatcgcgtccggttggtttttaagaaccctggcatggaggatgatcctacttgtggacctatcattgacgacattgccgttaagaagctctttactcctgataaacccaaaggtaacgttatatttaggttttcgataccaaagttttataaatcatccaatagaagagatttagagtaaagttaaaagtaaaattttgtactttttacaggcaatgcagtgattaatggagattttgaagaaggtccatggatgtttaggaacactaccttaggtgttctgcttccaacaaacctcgatgaagaaatatcgtctcttcctggatggaccgtcgaatcgaaccgagcagtacggtttattgactcagaccatttctcggtccccgaggggaagcgagctttggaacttttatcgggcaaagaaggcataatttctcaaatggttgagacaaaggcgaacattccgtacaagatgtctttctctttgggacacgcaggggacaagtgtaaggaacctttggctgtaatggcttttgctggagatcaagcacagaactttcattatatggcgcaagcaaactcgagtttcgaaagatcggagttgaacttcactgcgaaagctgaacgtacgaggatcgccttctacagcatttattacaatacgaggacggacgatatgacttcattgtgtggacctgtgattgatgacgttaaggtttggttctccgggtctagtagaattggatttagttttccgctttttattcttctttctttggttttcatctagattgttccggttcagaaattgtattggtagaccgggaattaagacgggattccacgttgtatgatgtatcgttgtatgatggatcggttcaag

SEQ ID NO: 176410 - DNA, 1119 bp, Arabidopsis thaliana landsberg
atttgaagctgctggacttaactggaaacttgatttctaactgggaggtatgagtcgttcctgttttatctatcaccaactaatgtgttagagtttatgattgatcttttgttcttttggctttcaggaaattggtgctctttgtgaacagttaccagcacttacaacccttaatttgtcttgcaattctttgtcaagtgatatcaagtctctgccagagttaaaaaatatccgtgttttggttctgaataatagtggtctgagctggactcaggtgatatgtgactcttttactattttttttttttgcttatgaactagttgagcattattgcagtttttgacttttatggttcttaccgtcctggagcaggttgaaattcttaggcgctcgttacctggaattgaggagttgcatctgatggggaacatgatatctaccataacagtaatgttttattttgtagcttcaatggttactctgttgctccaagtaggatatagtctgaaaacgcttggaaatcggtttggtctctttgaagacgatacttgaattacgctcattctaacacttcttttgctttaaaaacttgggtatttagcttgcaaattgtgaactccctttttccccctggttggttcttgcagtccacgtcctcatcagatgatcaagcatttaactctctgcggctactgaacttggatgataattgtatttccgattggagtgaagtattaaagctatctcaacttccatggtcagtaatacttttttttttcctttctactcatagttgatggacctgtaaatatacattgcaccgttaattctttctaaaaattgataatctaaacgttgtttctcagcttggagcagctttacctgaataagaataagctttcacgcatctttcagtctgtaaatggcactgaatcatcagagaaaggcagcgacccatttcctagtctgagttgtcttcttctaggtaatctcctcaagtgtagtgtcctcctctcttgaaatttggccatttattctgtccattgtatttctcaggagccaacaacattggcgatttggcctcagtagacgcactgaatgggtttcctcagttactg

SEQ ID NO: 176411 - DNA, 117 bp, Arabidopsis thaliana landsberg
aactttaattttttggaagattcttcttcaaatgtggaacttcctgtatcacaagttcttgaaatcgatcctactttttcatcatatgatatacatgcaattaatttgcttggatga

SEQ ID NO: 176412 - DNA, 115 bp, Arabidopsis thaliana landsberg
agaaaatgaggaagaaagtgagaaagataacgtggaagatgaagatgaagactataacgaagaagcgaacggtgaaagtaatgatgacaacggccaaaagaaatttgataactaa

SEQ ID NO: 176413 - DNA, 1746 bp, Arabidopsis thaliana landsberg
  unsure (1)..(1746): unsure at all n locations
atgttggctgatatactttctgtcctggcactgaccatgtctgctgaaggtgaaagggtatgctttcttgctactgttgtaggagtttcttgcctattgctatttgcttcacattcatttaactagattcccttttgttttcctcttatgatatgccttaccagatntgtgttttgtggttcttggtagaatttgacttaagctatttgttgctgatcctttgttatgcaatactctttcaggaaagcttaaactataggttgaatggatcagagagtgacatcggatcgtggggtcacgagtatgtcaggaatttggctggagagattgcaaaagagtatacaatacgtcaggttagtaaacaatttggtctttggcaatgttctttagctcgaggagtttcactcatattctggcaacgtcatggatattatggtttgttaatgaatattatgacaatgggctcgttactgaatatggttataatgctcattctttttgttatatcagggtgaagagtcctctattgaagacttaatggatcttgtgcagcaaattgtttcttttcacatgaaggagagatccttgtcattcttacttttcttgtaataacacggggtccattgtatattaatataagtttcattgattggcgtgaaatttgcgcctctcgtttttttcacatttttgaaggattcccttttgttctttgcagcataatgccgaaaccgattttgttgtccttttaatggatgttgaggatcttgatctcttacttgagcatgttgacaatacaaatttcaggaggacgtgcaactatctcacgagtgcagcaaagtaatttcaatatgtttagcttattcattcgactggcgtttcacccttaattatgttattttcatatgagacaagctctcatgagctttgcttggttatcttgcacattatcagtcccgttgatattgtatgtttttttccaggtatcttccaggaccagatgacatgttggttctagatattgcttacatgatctacattaagtttgcagaatatccaaacgcgctgcaaattgcattatttcttgataacatgcaggtatggttctaatcttcatataaaacttaatatcctctttctgcaacatgggagcagctgggaaaagctcttctttaacttatgtatttttcttatgatatatatttttcctttgtgcagtatgtgaagcaagtatttacctcatgtaccgatctggtaaaaaagaaacagttctgctacatgattgcacgtcatgtaagttcttaataatttaaattagcataaaggtgcagtacctgattttttattttcttatatttatttttctcttgctatttctccctgcagggtataacctttgaacttgacgatgagatggttgcagatgatgatgaccgggaagccctacaggatattgttaacaacactaagttaagtgaaggatatctgacccttgcaagggatattgaggtcatggaggccaaaacgcctgaagacatctacaaggtaaatcagttttaatgtgttaggcttgctactcatttatttagttacaaattatgtttccctcagtctttgacctgccctttttgaattttataggctcacttactcgacggcagggctagctctggtgcaagcgtggattctgctagacagaatttggctgctacctttgtcaatgcattcgtaaatgctggttctggtcag

SEQ ID NO: 176414 - DNA, 117 bp, Arabidopsis thaliana landsberg
gtcaagggagacttcgtgtgtctgaactgcaatgaattgcgtcatccattcagcagtttggaagctgtccgaaagcatatatactttttagtagactatactaaacggttttggtga

SEQ ID NO: 176415 - DNA, 96 bp, Arabidopsis thaliana landsberg
atggccgcgggtttaagcaaaaaagtaaaacccttattgagagaattaggaagaaagtggatcggacgcgtgggacgacaagagaattccggacag

SEQ ID NO: 176416 - DNA, 103 bp, Arabidopsis thaliana landsberg
atgaaaaatctcgaaaatgaaggggaaatacaagcaccgaagataaaaaggacaacgtggcgaagacaaaggaggacccgaaaattgagcaaaccaagaaggg

SEQ ID NO: 176417 - DNA, 169 bp, Arabidopsis thaliana landsberg
acttaccactagtcgcagtcgcagcagcagcctctctcaggctaggaaatctctgtgtatccgccgtcgcagcagtagcttccgccgcttgttcttcatcggcacgctctgcttcatcagcccaagctccaattccaattccaccccaagctttcgacatcaattttga

SEQ ID NO: 176418 - DNA, 101 bp, Arabidopsis thaliana landsberg
atgcttcaccgcccccgtggagccatcgtcaatattagctccggcgctgccgttgttgtcccttctcatcccctctacgccatctacgctgccaccaaagc

SEQ ID NO: 176419 - DNA, 453 bp, Arabidopsis thaliana landsberg
atgccgtgctgcgtgcaatctcgacctacgaaagagccctcaatgcagtatagaaaagtcgatgcgaagacgcgacgccagcacaaggcttttctcgaatcgccccagtttgccagcgagttggaacgcatcccactgaaatggcgtggccgtgttgttagtcaggcgcttgagctcatgtcggtatggcactggcgccggatcttcgagccagtcgccgtcgatttcgtgcggggcttcgccgcgcactacgtgccagccggaattgatctttcgcaggatgatgccgaaatctgcgccactgccgagaaggccgccgagaacgtcaagaagatgctttggaaggcgatttccgacacgcacgcccgcgacatcatcgagcaggaatgcggcgattacggcattgacgtgccagaggtcgacgacgatgacctgcgcgccatcatcgcgcga

SEQ ID NO: 176420 - DNA, 453 bp, Arabidopsis thaliana landsberg
atgacaaaattcactattgctctacgagaaatcgggacatacaaggaagtacttcgttctcaggtactgaaaaccattgcctacgtattcctagaactaatttccttcaaatttatctgacttatgttctcgctgtatctgtatgttgatatcatgatattcaagtgatgcatagctaaactatgatgtcttgtcaacacttttcaggtagaacacatgctgagtgatcggttgcttcaatttgtgaatggtgatgtccacgaagttaaggtatttttagttcccataccaagtattatagcaaaatcactctgataatcttttcaaattcttgcatgttattcttatgttcagcattttatctgaattgcttcgacttatatcccacctttattttctctcacgcaggaagctcgtaaacggtttgacaaagctaccattacatatgatcag

SEQ ID NO: 176421 - DNA, 492 bp, Arabidopsis thaliana landsberg
atggtcgaaaaagtatccatcaagcatgaaatcaaccacaatcctaaacctgaagacgcaggaagaatcaaagtctatgtgagtatcctaatgtcggaagatcctataagagattgtcgaccaatactaacattctcattgcctgccaaagaatttcgggatagcttcacgaggtatagatgggaacaactgaattgattagaggacgatgaacgtatcgatgtctctcaggttgatttagtgaggagggaactcagtagacttgtcacccacctcatgttatacttgcataactatcaagcttgtgctctgtcaatttatattacctttaagttcattagtcgtcctcgtgttaggattcttgaacagtgtgtactatcggaaatgacgacgacgtcgagaatattcgaagacgaaaaggatatgtggctcccagtcgatgagagcgtaatgcgcatcgaagagcctaactggaacatctttcacttgtag

SEQ ID NO: 176422 - DNA, 227 bp, Arabidopsis thaliana landsberg
aacaaaaaatcaaggactctggtccaagaagaatgatgggatattcagaagaaatgcatttggcacaagagtttgttagtcacgtagaagaagagaagttgatgatggagccgtcaatggcgccaacgcctgaagataaccatgttatgccttcactatcttccttgcggataaaacaacaagaaggattagtcgctaaacgcgcacatcccatgagattgcgatga

SEQ ID NO: 176423 - DNA, 969 bp, Arabidopsis thaliana landsberg
atgacacgctttttcattcgaaagaaaattgatgaaagctctacacgtgaattatttgtgttcaagtgtttgtcatgtttcaccattactccacatgttaaagtctaattggacaagttataatggacacaaactatcattgactaattgggttttgagtgttgctatttgaaagcaatgtctacatattgttcttggggcttggagacctataggattattagtttatatataatgaaatcgtgttggatgctttgatagtttatctccataaaaacttgtccagcaagatgtgaccatgtggaaataatttattctcatgtgcgaagtaaagtgctcttagcttagaggttcaacgagacatcaatttatcaaactagaatcaaatggtaccaaacaagctgatcatatggatatgaaattcaatactggaatttgctaatctggtgctccatggaatagaacagagtaacgaggacctcgcttctccgtaaccccgtaatatcgaggttactccgaacaatttttgttctcacggaatctcttccatgtacgctgccatttcttcttctttttcgggagagagttcaaattctcaggtggaatttcaaaatccaaattaagtaagtcgagtaacgtcccacgttacgttatcaccgcctctctcgtcgccttcttgcaacagatctgaaacaaaggagagtaaggaaagaggaactttcgatctgcaaccgatctcatcgtcttcacaagcacaatttcgctaatatgaatcagatatttacacaatctaacaaaactctaaattctattcgtagaattgaagaatcatcgcaaaagctggatcgattggttgtaagattgagggaacaaatccttttcttctttcacctctagatgttattgtctgctacactcaagcttccgccgttagtcacaagcgctgccgctccgaaaccaatcgaataa

SEQ ID NO: 176424 - DNA, 836 bp, Arabidopsis thaliana landsberg
atggaagagattcgccagagaagagtgttgatggtcccagcaccgttccaaggccatttaccttcgatgatgaatctagcgtcctacctttcttcccaaggcttttcaatcacaatcgttagaaacgaattcaatttcaaagatatctcccataatttccctggtataaaattcttcaccatcaaggacggcttgtcagaatctgacgtgaagtctctgggtctccttgaatttgtcctggagcttaactctgtctgtgaacccctattgaaagagtttctatccaaccatgatgatgttgttgactttatcatttatgatgaattcgtttacttccctcgatgtgttgcggaagatctgaatctgccaaagatggtctttagcccttcttccgccgctacctcgatcagccgttgtgtgcttatggagaaccaagcaaatgggttacttcctccacaaggtaccatgcttactttttttttactttggttttttcaactagcaaattttgatgtatttaatttattgtttaacttttataaactactatgctagtttattaatttacaataaggttttggttaaatatacaagttaaagaaatattattcttgtaaaaaaatgttttggatcaattttgtagcattggcaatagactctgtttttttcaacatttaaaacgttttactgtatgttggtgatttgggtctatttctatgacagacgcaagatctcaactagaagaaacggtgccagagtttcatccctttcgtttcaaagatctgccttttacagcttatggatctatggagagattaatgatactttacgagaat

SEQ ID NO: 176425 - DNA, 1048 bp, Arabidopsis thaliana landsberg
atgaattactctgggacgaaagtcaaaagtgcggaaaacaaaaggaaaatcgatgcgtgtaaactccagagtccgactagtaatgttgcagaacatagtaaggaaggtttaaataatgctaagagcaatgacgtagaaaaagatgtatgtgtggctatcaataatgaagttatatcaccagtgaaaggatttggtaaaaggctttctggtacagatgttgaaagattaacaagtaagaatgctactaaagaatcactgatgtcagtacagcgaaaaggtagagtgaaggtatcgaaggcatttcaagatcccctgtcgaaaggaaaatcaaagaaaagtgagaagacccttcaaagtaacagcaatgttgtagagcctatgaatcatttcaggtctgaagctgaagaagctgaagaaaacttgtcatgggaaaaaataaagaggaaaatcgactttgatgtggaggtaaccacttccccttatgccaccacttacatggttatcctctgatattcctgtttgagtgttaatgctcttgttgttatgtaattcaaaggtaacaccggaaaaaaaagtgaagcagcagaagaccaatgcggcgtctactgattcattgggacagaaacggtcaagatcaggttaatagagagtagaaaatcttcacttccaaagggctctgttgaaagcattagttaaaaaaagaatttttgttaatgttttgcaggaagggtgcttgtgtcatcactagagttttggcgtaaccaaattccctgttatgatatggtttgtgatttgatttccttaacactagaccaaccatgggaacagagtctttaacattgtctgggtttgcaggatcggaaccttatccaagtaaaggatggtagtgagactaactccgctccatctaaaggttagttctttaaagctgttttttgatgaaaacggctttcactatataatacaatatttgttgtttttttctttcttcttcttgataggaaaaggatcggattctcgaaagcgaagaaacttgaaaatcaaataa

SEQ ID NO: 176426 - DNA, 496 bp, Arabidopsis thaliana landsberg
agtgctcaggaggaagctatagatattactacactgacaacttatgttagctatgcccgcaagaacattcatcctaaactgtcagatgaagctgcagaggagttgacccgaggatatgttgagctgagaaaagcagggaagtttgctggcagtagcaaaaaggtgtgccctcgaaacttcaatatcttttctatgtcgtaaccaaggctcataaaaaggctatgactagtctaacgctatgaaacgctctgaatttggcacaggtcataacagcaactcctaggcagattgaaagtttgatcagacttagtgaggccttggctcggatgcgcttctccgaatgggttagttaaacgctcatattatacattttcctttcatcgttctaaatcaactgaaatggtttttgtgataaaggttgaaaagcatgacgtggacgaggcatttcgacttctcagagttgcactgcagcacccagcaacggatcacgccacag

SEQ ID NO: 176427 - DNA, 406 bp, Arabidopsis thaliana landsberg
ctaggacttgctgagaagaatatgttgagctatgattttgatcttgtgggatctgatcaaagtgatccaaacacaaatagtaccaacctgttctctgacgacacagatgatagaagtcttaggtccaccaacccacagagaggaaatttaagtcaccaggaaaatgaggtgagaaagtatttgacagtttaaagccctctgaaaatggagaagaactgattttttagcttgcgctcatgcttttgctggtagtggtctgttgctactgctcctgttcatgctcgtgatggtggtcttggtgctgatggaacagccacttcttctcttgctgttactgctatagagcctccattggatcatcttgctgggtctcaccatgagccaatgaaaagaaatagtaatccag

SEQ ID NO: 176428 - DNA, 279 bp, Arabidopsis thaliana landsberg
agaaaagcaaggctaagggcgtctggtaccaacaaccctaatcctcaggttgataccacagaacaagaagatgccggtaacatggagcttgaatttgagcaagggttaatagacacatactcagatctttttgcggagatgaacccaggtgactatttcaactttgaatgtgaatttgcaaaggggttggattcggatgataattgcaatctccaaaatttagatactgatttcatcgctgatggactagatttagaagaaggggaaatcgtcgaatga

SEQ ID NO: 176429 - DNA, 127 bp, Arabidopsis thaliana landsberg
aacaattagccgccgtccctttggaaaatgacggagcctcgtcatcgacggtgcagaatctctgttctctgagtcggacccgtattcgatcgattttgtgtcgaccggacggcagcaggattagccg

SEQ ID NO: 176430 - DNA, 84 bp, Arabidopsis thaliana landsberg
agagagcgaatccggcaggagcgtgaagccgcagctgcatccttaaactcaacacaaaaagctactcaagcatctgttggatga

SEQ ID NO: 176431 - DNA, 180 bp, Arabidopsis thaliana landsberg
ccgcacaacaattcggtagttcggaatacccggaccagaacccgaaattccggtaaccgaattttcgggtattataaaacccgttgtaatttcgagtatcgattctcaaaacccgaaattttaataaatactcgaattaaccgacccgaatttttcggtaacccgaacgcccacccctag

SEQ ID NO: 176432 - DNA, 176 bp, Arabidopsis thaliana landsberg
atgctgacgtggcaggaggctattctgaaggcaatcgagggtttcgatatcgtggttctcaatcatgcagctacgacagatccaccgccgttttctcacattatgtcgcaaacggtgatggcagaaaacactccgtctaacaatgatccttcacctggcgtgttgcaaaaaccatc

SEQ ID NO: 176433 - DNA, 487 bp, Arabidopsis thaliana landsberg
tgaaaaacctccttcacaaggaacacacaatgtcttcgaagatgatcgtgtgatgagctccgatggtcagtcgtttgaggtggaagaagcggtagcaatccaatcgcagaccatagcgcatatggttgaagacgattgcgttgctgatggaatccctcttgcaaacgtggaaagcaagattcttgtgaaagtgatcgagtactgcaagaaacaccacgtcgacgaggctaatcctatctctgaagaggatctcaacaagtgggacgagaagttcatggatctcgaacaatccaccatctttgaactcatccttgctgcgaattacctcaacataaaaagcttgcttgatctcacatgccaaactgttgcggacatgatcaaaggcaagactccagaggagattcgttcaactttcaacattgagaatgattttacacctgaggaagaagaagctgttcgtaaggagaatcaatgggcttttgaatga

SEQ ID NO: 176434 - DNA, 1203 bp, Arabidopsis thaliana landsberg
atggctcgagatgctgtggctgttttagtaaaaccaattgaagaagaaggaactaaactaggagttgcgagtttgagagctggtgtgaagtgcactgggactttgcttattggtttctgtgatttgaatgattgggaatctcttcaaattggttttgctttacttcttaaattcgccattgataaacgtcccaaggtagtttcccatttctttgattttaatgaagaagtattatattatagtaacaaggaatcgtggtttttgtgtttttgcttctgttaggttagaagatgtgctcaagagtgtctagagaagttatttggttctctccgatcatctactgttatcaaggaagctagtaatacagtatatgctttacttaaagaatataagcctgtcttatctgacttaagctcgacgaagattgaggaaggttctaaggttgactcgacgttgaaatccgagaatgcagaggctgctcatgtgctaaatgtcctcagtgctgcaattccatttctatctgccaaagttagttcgagagttttttcagaactttgcgggcttatggcttctcagttttcgccgctgacgaggcaaattctcaaagggattgatactatcttcaagaattcggaagataaaattgttgttcctgagatagaaggacttgtaactactttgactagttatttatctttacacgacaagaatcctgctgacactatcgtgcatgtgaccaccctgttaaaggatgctttggagaaagcctactcagtcgaaccgacattatgtctaagtaaacttccactagtttgttcgtcattggcaggtttgttagttccctccctagctttcagcatgtagttcttttcgtcttcattgtgggattcgatttttcaatatatctgtcatgatgaattccaactttccattcatatgctttaggccttctgacttccacggacgacattgcatccaaagcgtcaactatattaaaagacttgatcagtagccacatcgataaaaagaaacttctgaccgagggaagcttgtctaatcaagacgaggataacgtaaccagtggagacaatataaatgcagcaagatgtgtatgctctgtctttgagagtgtcctaaactcatgtgatggaattccaaatgagcacattttaactgtcataaatcttttgatcgagaaacttg

SEQ ID NO: 176435 - DNA, 155 bp, Arabidopsis thaliana landsberg
atgcagagtacagctagaggtgttagctacgagaagaagaagcgaaagcgtcctcttccttcgtcgtcgacttcttcttcctccgccgtagctagccaccagcaatttcaaatgctaccgggtactagttctactactcaattaaagtttgagaa

SEQ ID NO: 176436 - DNA, 213 bp, Arabidopsis thaliana landsberg
attcgactcgacaaaggagtccacattggtggatcttcataccaaatttggcgtcaaaggaacaatgtgttacacaacgaccaaaggattcatccttctactctctttaagatgatttatcgagaaatccgcaacacaatcaccggaagacgctctaggaagctttggagacctctaaatgcttctttggatccgatagtatctttttcatga

SEQ ID NO: 176437 - DNA, 370 bp, Arabidopsis thaliana landsberg
atggtggacgatccttcatcggatgctattatctcatggagccaaagtggcaagagtttcatcatttggaatccacaagaattttgcaaagaacatcttcgtagactcttcaataccctccatatatattttttcttctataaacttaaaatatttgtaagtttcttatatgttagttttgtaagatgtaatcatattcttttagctagtttttgttttgcttattaactttgaatcttcttttttctatagggtttcaaaaaaattaatccaaagaaatgggaatttgcaaatgataattttgtccggggtcaacgtcaccttgtggaaatcattataagcaatgataaaaagaagaatgatcaactac

SEQ ID NO: 176438 - DNA, 862 bp, Arabidopsis thaliana landsberg
atgcagtttcagagtagtggttacagttatggatcagagtcattgtttggtggggcgtttgatgggtctctgttttccacatgtaaattccctgaaagtagtggggaaaataatgggtttggaggggcattagatggtgatggatcttgtcatggtgctttcatatctgctagtagtgttgatgaggtattgagccatgagactgcgaggaatggtgaagttgttggaagtagtgatcgctgcaataatggagaagaggatgcgtctgttcatccagcgattggttcttgtctatatcacttacgagggaaggatcttctttcagttagtatggtttgcaagtctttgcatactactgtttgtgatgacacgttactttggaagcatatccacatttgtcgaccgttgaatgagaagatcacggaagaggctctactgcatttaactgagagggctcagggtactatgcagtgtttgaggatcgtagattgctgtagaattactgatgattgtcttaagcgggtggtggcgcgcaaccgacaagtagtcaaggtgagcttctttccttaatttactttaaagcttatttggattactaataagtaatattgtaagtttttatagaagtgcctggtaattgaattgatttgtgggatcctattaaaaccgaatgttgttttgtggttggcagattggtgtgcctggatgcacaaggatcactatcgatggtattttgagcgtcttgagggatctgaagtcttcgggaaagcttcaagtcaagcatttacaacttcgtggcctctttggagtgactaaagatcactacgatgaactgattgacttgttgaacattgacaataaa

SEQ ID NO: 176439 - DNA, 129 bp, Arabidopsis thaliana landsberg
atctccacttttggcgaatctcatggccctgcaatcggggtcattcttgatggttgtccggccggactgcccatcgacgaagtcttcatacaatccgagctcagccgcaggaaacccggccaatcatag

SEQ ID NO: 176440 - DNA, 204 bp, Arabidopsis thaliana landsberg
aataagaccaaggacgtaagtgaagacagtagtaactgtaatgagactaaccctatcgtagctggagagttggcagaagaagagagaccaagtgcaacagaagatggggatactgcaatacgagaatcagagagctgcaccagtttccaaagcaaaggtcgtcaatatcgtgccaagcttagtttagatgaaacagatgtctga

SEQ ID NO: 176441 - DNA, 90 bp, Arabidopsis thaliana landsberg
atgcgggccgggcgcggcctccgggtggtactgcacggccaacacggggcggtccagcagccggattccttccacgaccccgtcgttgag

SEQ ID NO: 176442 - DNA, 317 bp, Arabidopsis thaliana landsberg
aacaagaggagaagtcatcaggcggacgtcacttggagaacctcgacgatgacactcccagctcggcagctcggacgataacgtcagcgcacgggaaaactcaaataaaggaagaatactactctgcgtcatcgcccacgcctgaatacctagcgttgcaaaaagaccaaggagaagcttcacttagccgatttcatcgcctggacgatacgactaaagccaaccaacacggcgaagaactactcaacaccatcatcgatcatttaaagcagcgcaacgcgattattaaccgccgcccaagagcacatacaagataa

SEQ ID NO: 176443 - DNA, 1948 bp, Arabidopsis thaliana landsberg
atgggttcaggcagtcctcaactaccactcatctgtctctcggaccaaaccctaaaaccaggaagctcaaaatgggttaaagtgaggagtgatgtccgtaaagctttagaagactacggttgtttcgaagccaaaattgatcaagtgtcaatggagcttcaggggtcggttttgaaggccatggaagagctttttgcgttaccgacagaggccaaacaaagaaatgtgtgcccgaaacctttcgctggatatttttctcataatggtctctccgagagttttgggatcaaggatgctaatattttggagaaagctcacgaatttactcaacaactatggcctgagggtaacaagagtatcaggtatatgtgaaaactctacttttgaagtttaccaaaaaaaatactctacttttggaaagacattgctcctaaaatcttattagttgtatataatttactaaaacacatagttcttgaattcttgttaatgagcatgttaccttggacaagtgaccctttttctacattttgtttttctatcacacgtcatgcgttttgattgtttccttacgagttttaattttattttttggttaaaaacagtaagatgatccaactgtatgctgagaaattagcagaactggatatgatggtgagaagattaatactggagagctatgggatagaatacttcattgatgaacatttgaactcaacgtattaccgtatgcgattgatgaagtatatagcacggcctgataatgatataactgctgctgttggtgctaatgtggataatggtgctaacgataatgccgatggtgatgctaatgtcaacgatgatggtgctagtattggtgttaaagttaatgtcgatgttggtgatgatgttaatgacaatgatagtgttaatattggtgttggtgttgatattaacgttgagaccaatgttaatggtgatcttgatgctgaagctaatggtgatgctactgcttgggtcgttggtgctgttagtgggaatgctagcgttggtgccaaagaaggtattaatcttaatgtttaattatactattagataaaaaaaaatattaaaaaaaaaaaaaaagttatactatgagtgatgataatattggtgttaatgttcattctaattatgttaatgatattgttactaatactaatattatttttactgtaattgatgcatggtgttgaagctaatgttgatgcggagttgggcttacctagtcatactgataaaagccttagtggaataatttatcagcatcaaattgatggtttggaggtgaagaccaaagaggggaagtggatcagagttaaaccagctcctaataccgtcattgttattgcgggagatgctctatgtgtaagttctaatttttctttacgtaatttggcaagtgaaaatattaacattctttctttgtcaaggttcaattctagctagtattatatagctgagggtctttggctgtttgtatatgacatatgttgatctataacttatagtatttagataaggattgtcagataactttaattttagaatacaacatagtcaagatttaatgacctaaatattttactctacatgtttttggtaaaaaaacaaaagaagaagagtaattttcatattcctagtgatgttgttgttgtggcaggcacttatgaatggtagaatcccttcaccgtatcaccgagtaagggtaacagagagaaagaagacgagatacgcagcagcattgttttcgtatccaaaagaaggttatatcatagattcaccaaaagaacttgtggacgagaagcatccacgtgccttcaaaccctttgattttgtcgacctttttaacttctatcacacagaagctggtcgtagagctccatctactctccaagctttttgtggcgtctctgctgggaaataa

SEQ ID NO: 176444 - DNA, 1420 bp, Arabidopsis thaliana landsberg
atgtctaagaaggttaaggcccagaagcttccgttgattgagcaattcgagattgaaggtagcggtgttagtgctagtgacgattgttgtcgttcggatgattataagttgcggattcagcgtcctgagattgttcgcgtctactatcgtcgccgtaagaggccgctacgggagtgtttactagatcaggcggtggctgtgaagactgaaagtgtggagcttgatgaaattgattgttttgaggagaagaagagaaggaagattggtaattgtgagttggtgaaatcgggtatggagtcgattggtttaagaaggtgtaaggaaaacaatgcgtttagtgggaataagcaaaatgggtcatcccggaggaaggggtcttctagcaagaatcaggacaaggcgactctggcttctcgttcagctaagaaatgggtcaggttagggtctacctatcatctctttaactgttgaaattcatggactttgaaactgttgcgctgttgttttgcactgatgattttcttagttcagactttgaagaccttttattgttagtgggcagactccttatgatggagttttgatgtggcaggttgagttatgatggtgtggatcctacaagtttcatagggctgcaatgcaaggcgagtgttttaactagacaattgtccactttaagctattgcattttccactttttttgtgaatgggacatcttaacaattggttgtcgtttaatccctaggttttctggccgctggacgctctttggtatgaaggttctattgttggatatagtgcagagagaaagcgttacactgtaagtaattctctactctacttgagttatgagttgggtagttctttgagctatgatatatgtaaaagcttgttcctctaaccatgattaaattcttccttaggtcaaatatagggatggatgtgatgaggatatagtttttgatcgtgaaatgatcaaatttttggtttctcgtgaagagatggagctattacatctgaagttttgtactagtaatgtgactgtcgatggccgtgattacgatgagatggttgtattggcagctactttggacgaatgccaagattttgagcctggagacattgtatgggcgaaactagctggtttgtcttaaactgatttccaccttttattcatatattaaaaaaatacctccttatgctatcagcaagttgatgctgttggaagcatgtagacaaagaaaactacctactgacttccatagaactgcatttgctttcctattcggacaggtcatgctatgtggccagcagttattgtagacgaatccattatcggagagcggaaaggtctaaacaacaaggtatctggaggaggatcactcttggtccaattttttggaactcatgattttgctag

SEQ ID NO: 176445 - DNA, 106 bp, Arabidopsis thaliana landsberg
ggttcttcttcatcggatcatcggccgtatctgaaaccggagatggccggcgttgattccggcaagcttatcggctctgagattcatggattccatactttacaag

SEQ ID NO: 176446 - DNA, 267 bp, Arabidopsis thaliana landsberg
gagctggagaatgtcaatcaagaattggctaatgctaaagatgccaagagtaaggctttgtgtcgtgcagatgatgctagtaagatggctgcaattcatgcagagaaagttgaaatcttgtcgtcagagttaatacggttgaaggctttgcttgattcaactcgagagaaggaaatcatctccaagaatgagattgctttaaagctaggggcggagatagtggatctaaaaagagaccttgagaatgagagaagtttggaagcaaag

SEQ ID NO: 176447 - DNA, 95 bp, Arabidopsis thaliana landsberg
tgaacaagatggaagaaccgctgaataagtcaacagagatatctaagtctccccatcgtgtgaagagatttgacacaaaggatccaaatggttga

SEQ ID NO: 176448 - DNA, 147 bp, Arabidopsis thaliana landsberg
atgaagccgaaggagaagccgatggagcgaaggcgggatcaggatctgcggaaacgtcgtcgttttctggttcaggaagtgttgaagaagaagggatggtttgagtggaggagacggcgggtgaagggaggagaggagcgatctccg

SEQ ID NO: 176449 - DNA, 1541 bp, Arabidopsis thaliana landsberg
atgaattactttcctattcaactgattgtaagattttttgaggttagaggtggtactcttgagcgaataccttctgcagatttgcgtcgtccacgtgatcctgaccctggcgtggtgatacaggttagagattgaatgattcttggtttgctgggttttgcttcccttatcttccattgctgattaaatgtatgaaaccagatcccagttactaatgatgttgaggagctaccagtcaggacacctgagaaagcaagatgcataacatcaaatgaagcatctagaagtgacgtttctcattcatatggtagcaaggatttgaattcagtcgatggttctccaaaagatgaagctcttgtggggtgtcaagaagaaaacgctggaagtttcagtggcgagaaatctcttccaacagagaattgctgcagtagggaagcaacacctagtgataaggaaatgcttgagaaggagaaagaagagagtgtttgcaattctgatgagacggatccatcctcagtggagagggaatcatctcttggagatcgcattcgtttgagccctacctcttcttcttctgttggtataaatgaggaatctgatgattatgaaacagagtcattgaaagacagtgctactgatgaccaacgtgaagtcagtaccccaccacaagaagctagacttgcagaacatgaagcaattagtatcaaaagaggggaagatagtggtacaatgcattctagacacagaagatctcacgaagactccagcaaaaggcactgtgggagagctggttatgctcgctatgttaaggatgcatcgcctacaccagatcctggtcgtgggaagaaagttggttctctacagggcttgtatcgtgattcaaacaaaaactggcagaatggaccacctattacattagagagggatgaaactgaaggtaaaggcgttcattactatagagaaaaatctcatggtagattgaattcatctgtggatcatgataggcatagagagcacaggtttggttggcggaacaacaaagaatcatcactcggtcgaggttttgatcattctaatagttacaagtgtgggacgcatcttaaagagtatacctcacgttcatccttcgatcttaatcagagaaattctagatcaagttttaaagaagaggatgatcgatatggttggcatcatcgtgaaagaaaatatgttcatgaaagaagtcctatccgagcatatgaaaactacaaagaaagaaatgggtgtgattggctaagagaaccttattatgaggactgtataccgattactgacatggattataggtaccggtcagagaactcttctgcacatgcaatacacaacctcaagcacagtccagagaatgatctttattgcagaagaaggggtggatacgattataatttgcatcgtgatagatatgaagatggagttcacagggtagaaagtagaattccatttgagctggcgtacagggagatgcgttcttttgctgaagtggaaatgagagaatatcaagg

SEQ ID NO: 176450 - DNA, 199 bp, Arabidopsis thaliana landsberg
atgattcgaaacgtgaatctttgtatgcgcttgaatagcacgctcaatttagagcgcgtgggtatgtttatgtgacgaagcaagattccttccttggccgccagacaaattgcaaaccgaaattgatcacggcgacgcgtttgcacaaattaaatttcagacaaagacgtctgcgtgcacatccagaaacattgactaa

SEQ ID NO: 176451 - DNA, 194 bp, Arabidopsis thaliana landsberg
acccaacgcgggcttatccgcacgctaacatcgatccagtccggcctccaaatcgcacgcagctaagaagaggatggaattcaaaccgaagagagaaaaattacttcttagtcgacatggccgaggcaaaccgatgggacaagccagcccgcgtcgcgcagctactagaggcgactaagagcgccgtcacctag

SEQ ID NO: 176452 - DNA, 114 bp, Arabidopsis thaliana landsberg
attataactttaagtgcttctgcaaacgagttggataacattcggagacaagctgatgaatatgctgctttgattatggaagaactcgatccttatcattatggatacatcatg

SEQ ID NO: 176453 - DNA, 152 bp, Arabidopsis thaliana landsberg
atggaccccagcacagacggcgttgaaatggtgcaagaaaacgaatacctcgttagctgctggaaccggatcatctattatacttacagtgatggccgcaaacagaccctgatcgatacgcgtccgcaaaagatcaacagcgccgatatcgg

SEQ ID NO: 176454 - DNA, 399 bp, Arabidopsis thaliana landsberg
gatgtcaccgtgaagctcctcatcgagcagctccgcaccgagcatttccagatcaaacgcctgctcttctcggtcgctgcggcggtgcacgccggacggccgcgggagctgacgaacgcggcgcggaagttgtcggtggtgttgctcgggcatctctcgttcgagcgcacggtgctgcctgaactctcccggctggactcggttcgcggccacacggaccgggcccagcgcgtggctgccttcgcgcgcgacctcgagtcgattgagcacggcgtccgcgaggtgctcgttccgctcgaggcgcgcgacgaagcgctccccacgctgcagcattggatgaacgtgcgcgatctggtcgacacgcttttggacgaggatgatactcgctcctggatctga

SEQ ID NO: 176455 - DNA, 72 bp, Arabidopsis thaliana landsberg
atgggctgtatgctgtatgcacgaacccaaagacctgtagaatcaaattctaagttcataaacgcatttatt

SEQ ID NO: 176456 - DNA, 139 bp, Arabidopsis thaliana landsberg
ccactgctgtcttgaaaatgccttgtcctggttgagcgagcccctgccctgttcctcgctctggtttggagcatcgctcaccactgctaactgctcagggaagccggtcatcctcctggagctggagcaggggcgcggg

SEQ ID NO: 176457 - DNA, 98 bp, Arabidopsis thaliana landsberg
atgccgtgcgcccgcgcccgttcgccccggcccggccaggcgaggcgagcgaacgccgcgtgtggctctccacactctctcctctcatccatgacttg

SEQ ID NO: 176458 - DNA, 186 bp, Arabidopsis thaliana landsberg
gcagatcggcaatgctgacaccattattgaagatcacgtcctgtcgactatgccgatgactggagtggctagcaaatcgatagctgttacacatcgatcggagtatcgcgagcggccatcaaccagaattcgagatcctattgctgcgactgggcctctcactgcgttattgcgtttgcaacggtg

SEQ ID NO: 176459 - DNA, 1320 bp, Arabidopsis thaliana landsberg
atggcttcaacaagagccacactcacatcacaagccaaatcgcctaaaacccaattactcgctggaactcttgctgagactatagctgcaagttctcggtgggcaccaaatgcaagcagcgttgacattgaggagttaaagagagaatcagcttccatcaaaagagctgcattgattagagatctcgagctaaggcttctttatgtgagtatcaccctttttttctattggtatctgattgcacaattttctgtgccttaaatttgatgatgtctcttttgtttcagggaaagcaaaagttgagaagagctgagagagatttagctaaagtgcagaaggatcttgacccatcggaactcccaactgattcagaaataatcacagaagaagagagacttctttaccgcaaaattggtttgagtatggatccgtttcttctcttaggtaagcacaaagactgttctcactcatgtgtcacgcttaaagccaaaacgatgtgtaataagaatttgttttcctgttcttaaaacgttatacaggaagacgagaggtgtatgatggtaccatagagaacatgcatttacactggaaacatcgggagcttgtaaaagtgatagttagaggcaaatctcttccacaagtcaaacatatcgccatctctttggaggctgagagtggaggagtattggtatccgttgataaaaccatgaaaggctatgcgattatactctatcgcggaaagaattatcagatgccatttcggcttaggccttcaaacttattgacgagaaaaaaggcttttgctcgatccattgagcttcaaagaagagaagtaatgatgataataattttacatgtaacttgtgttgataattttctgttctgatcaatattggtctctttgtctctgacaggcactgaagtatcatgttgcagacctagaggaacggattgagctgttgaagaccggacaggtttgataaaacttgaatgctattataacatatcaatctactttaaaatcccttatgagtaaacaaactatcattgacaattgatccaggacgacgatatggaaccccgcaacaaaagtgatgaagaggaagagaacttgtatttgagagtcgatgaatctgatttttcttctgacgaggtaaaatgaaatcctcctgaatgttcttcatcagcatttgaaaatttactcgaaccatggcatatctgagatatttttttttgaatcaggatgaatctctggaatgggagtcagaaaagaatgaaactttcttatcatcagagggaaaagaagaagaagaagcatga

SEQ ID NO: 176460 - DNA, 75 bp, Arabidopsis thaliana landsberg
atggatgctgatacaaaagaaagggttacacatccagaaaaaagggattcagagaagaaggtttgggaaaggatg

SEQ ID NO: 176461 - DNA, 210 bp, Arabidopsis thaliana landsberg
atgctgcttctggccgtgctggtgtgcgccggtgcgggcgcgacggtggcgttgctgctggccagtccacgggcccaggcgctggcgcagatccacgcgttgcacgcccatgtcgaccggcagcatgcccagctgctgcaggtgcgtgaaaaagcccagcgttcggtcaatgcgttggccgtgaaactgggtcaactgcaggcccagtcg

SEQ ID NO: 176462 - DNA, 105 bp, Arabidopsis thaliana landsberg
atggcaaatacgttgtttgctaatgactgttggattacaatccaaaaaaaagtgcagaacaggcgactttctttggggaaacgcttgcgaaaactcggttacaag

SEQ ID NO: 176463 - DNA, 1103 bp, Arabidopsis thaliana landsberg
atggcagcgacgttaaagatcgtcgtcttccggcgaaatcctactgctgaagaatgtcacacgtaaaatccaactctcgctttaaacccttttagcaagagcctcgaaatttccgatttagaaactttttttctttcttgatggcgacgactaacgctcacacggcgactcaacagacaccaccaccaccacctcctcctcctccagctcctgctcctccggcgatggatgggttaacaacagacgagctaacagcgaaagcattaaacaagagatacgaaggtttaatgacggtgagaacaaaagcagtgaaaggtaaaggcgcgtggtattggactcatcttgaaccaatcctcgtacgcaacaccgacactggtctccctaaagccgtgaagcttcgttgttctttatgcgacgccgttttctccgcctctaatccttcacgcactgcctctgagcatctcaaacgcggcacgtgtcctaatttcaactctgttactcccatttccaccatcactccttctcctacctcttcctcttcctctcctcaaactcatcaccggaaacgtaactcctccggcgctgtcaccaccgcgattccttctcggcttaaccctcctcccatcggaggctcttatcacgtcacgccgataaccgttgttgatccttctagattctgcggcggagagttgcattattcaactcctccgccgccgcagcatttgatgctctccggtggaaaagatgacttgggtcctttagctatgcttgaagacagtgtgaagaagcttaagagtcctaaaccgtcgcagactcagtctcttaccagatcgcagatagagtcagctttagattctctctctgattgggtcttcgagtcctgcggctctgtttctctctcgggtcttgagcatccaaagtttcgagcttttttaacacaagttggtttaccaatcatctccaagagagatttcgccaccacgagattggacttgaagcacgaggaatccagagcagatgctgaatcgagaatcagagacgcaatgttcttccaaatctcatcggactgttggaaaccaggagagtccggcgagagtcgttga

SEQ ID NO: 176464 - DNA, 65 bp, Arabidopsis thaliana landsberg
atggacatcaaggagcagcgcgagtacctggcgtggctaaacaacctcaagacgttcattgacgc

SEQ ID NO: 176465 - DNA, 968 bp, Arabidopsis thaliana landsberg
ggaaaatgtgattttgggcagcttggttgtggtggaatcgctgtagatttcttagcgccggtggattcttatcctcaagctgacgacaagatccgaagcactagcctaaaggttaagtcttttctgatcccacctacggtcttcctgttttggcagtggttttaggttttacagtggacaatgtgtttcaggtgcaaggaggtggaaatgctgcaaatgcgttaacttgtgctgctcgtttgggattgaattcgagactgattagtaaggtcattgctttctcttttctaaatcgaaaaatttgggcatgaacagattcaactttcgtgtagtgatgctaattgatttagtaatgaacattttctttaggtagcgaatgactctgcaaggaaaaggcatgttggaggagcttgaagctgatggtgtggatacttcttttattgtggtcatgctcaccttcttgatcattgtgacgagtcttatactctaaagtttgcaggtttgtcttcagtttcctaatcttgactgtaattgatgtctttttatctcatctcatggcaggtctctaaagagggtaattcaccatttacctatatcttagttgacaaccaaacgtgagttttttgtgtgccctgatgctgtttgtgaatttgaggacctgtttcattgacttctgttgacttttattgtatcaaatctatttgttaagtattcaagcaaaaagttactctatcaactagaatgaaatggtagtcctatggcatggaattgttttgtttgtctagatcatcagatctttattggttattcttttcaggaaaacgcgtacttgtattcacacgcctggagacccacctatgttaccaactgacctttctcaatcgagtatgctatcagcgctagaccgagccagcattgtatactttgatgtaagattacacgaaacagctttggttattgcaaaagag

SEQ ID NO: 176466 - DNA, 245 bp, Arabidopsis thaliana landsberg
cactcttattatctggactacaaggtaaaaacctagcttaaattccgaccattctgtgttctttttgttcgttcaaaaggctaaatcagtgtttgtttctttctttctccggttgctagaacgacagggctaagtatataaacacatttctgaaccacttggtgtcgtggaacgctgccatgagtcggatggcccgtgcagaagcgtttgtgaatcttggtgaacccaacatcccaatcgcttaa

SEQ ID NO: 176467 - DNA, 434 bp, Arabidopsis thaliana landsberg
atgttgaagaagctaaatagagaaggcatcaaatttgattcaagaaagaagaaattcttttccaacaaaagaaagcccatttctgagatggactgctacaactgtggtgagcttggtcatcttgctcatcaatgcaacaagcccaagaagaacaagttcaagggcaagaaagaagatgacagcgatgatgaaaagaaagaaaagaaattcttcaaaagaagggatgggaagcaaaagaggttccacaaaaagaagaatggaaaggcttatattgttggcgactggctcaccgacgtcgaatcatcaagtggatcttcttcaagtgaagaagaggatgatgaaaaagttgcggccatcgccggggacttctcttcaccaccaccatcgccatcatccacttctcacctgtgcttatggctaggggtgaacgaaag

SEQ ID NO: 176468 - DNA, 112 bp, Arabidopsis thaliana landsberg
atgagtacaggggtccggcgcttcttgaggaggtctggtcctactgatggtatcctggagtataccaccttttccggccacgcggcggccccggagctgcccatgcggaaag

SEQ ID NO: 176469 - DNA, 1009 bp, Arabidopsis thaliana landsberg
atgaccataaaaatattgcaggagcatacagaaaggtatgtacggtttatactcgacaaaatgaaggaggaaagattgtgggcgtgacaaggaggccccattatattaggacaggtgacaacaaagaaaagagaaacctatatatttatatatgatttgaaaaatgttataaaatgatgagttttggaatgaatatgaattgcagatagaaaacgaatatagcgcggttcaacgtgcatataaacaagacgggttaaactacattaaatgggcatctaatttggtggactcaatgaaactcgggatcccatgggttatgtgcaagcagaacgacgctcctgatcctatggtaaagttcatttttacatgattgtgttttatccgaatgaggaagaaagttttaaaatatttgaaaacactgtggaaacagatcaatgcttgtaatggaagacattgtggtgatactttccccggtccaaacagagaaaacaaaccatctttatggactgagaattggactactcagtgagtttggttttcttactcttgaattaaacatgtaaaaaccttaggttcattcatataagtgttgaatatcttgccaatttcttcaataggttccgcgtgtttggtgatccgccaactcaaagatcagtagaagatatcgcgtattcagttgctcgattcttctccaagaacggaacccatgtcaactactacatggtaaaaattatgatccattcgagttaaccatatatgcaaaaatgattgtcaaaattctcaaaatggttctttaatcttgtagtaccacggagggactaactttggaagaacctctgcacattatgtgaccactagatactacgatgatgcacctcttgatgaatatggtttagagaaagagcctaagtatggtcatcttaagcatcttcacaacgctcttaacctctgcaagaagccacttctttggggtcagcctaaaaccgagaaacctggaaaagatacagag

SEQ ID NO: 176470 - DNA, 432 bp, Arabidopsis thaliana landsberg
atgtcgagactggctaaatggaagctggagaaagccaaagtcaaggtcgtctttcgattgcagtttcacgctacccatgtaagtcaacactttccgattggtttgattgtgttcttatgctgttggtgtgcaactatttacttctgaggagttcaataagatgttgatgctgcgttttctgtttttaatgtacattgtgatctcatgtgtgctttgtttatattatttaaggttccacaagcgggttgggacaaactatttatatctttcattcccgctgactccgtaaaagctacagcaaagacaactaaagcacttgtcagaaatggaacttgcaagtggggggatcctatctatgaaactacaaggctgcttcaggatactaggaccaagcaatttgatgaaaaactttataagattgttgtcgctatg

SEQ ID NO: 176471 - DNA, 176 bp, Arabidopsis thaliana landsberg
cacgtgaggtggcggtggtgatgtcagaccgcttcgggaagccccatgcaacacgtacaccaaaggaggcacgacagtggggcattgacactgatcttttgctttccccaaattgtgaccttgaagttcgtgtgccttcatgggctgatttgggctatgttaccgacgccgaatga

SEQ ID NO: 176472 - DNA, 491 bp, Arabidopsis thaliana landsberg
atggaggatcctgatatcaagaggtgtaaattgagctgcgtcgcgacggttgatgatgtcatcgagcaagtcatgacctatataactgacccgaaagatcgcgattcggcttctttggtgtgtcggagatggttcaagattgattccgagacgagagagcatgtgactatggcgctttgctacactgcgacgcctgatcgtcttagccgtcgattcccgaacttgaggtcgctcaagcttaaaggcaagcctagagcagctatgtttaatctgatccctgagaactggggaggttatgttactccttgggttactgagatttctaacaaccttaggcagctcaaatcggtgcacttccgacggatgattgtcagtgacttagatctagatcgtttagctaaagctagagcagatgatcttgagactttgaagctagacaagtgttctggttttactactgatggacttttgagcatcgttacacactgcag

SEQ ID NO: 176473 - DNA, 400 bp, Arabidopsis thaliana landsberg
atgggtaaacgaaatggaaaaagtgttcgtcggagtagttcaccggatcttcctgtcattgcttcaccgaagattcatgagcagtcttctggttcatcagcgagagctccaggatcctcgattcctgctgcgattcatcaacaagctcaatacagctcatcgcgtcactttgaggtatcagattctcctgataatagtcacagtccttatcatcttgttagctccgatcatcctggtttagtcctagctccagaactgttagatggaaacaactatggaacctggattatagctatgactactagcattgaagctaagaataagcttggatttgtggatggatctattccaaaacctgatgatgatgatccttattgcaaaatctggcgtcgcctgaaca

SEQ ID NO: 176474 - DNA, 627 bp, Arabidopsis thaliana landsberg
atgcttttggatgctcagaagaatttgaaaatagcggattttggagtagcacgagtggaagctcttaatccaaaagacatgacaggagaagccggtactcttggatacatggctcctgaggtaaaactaaaaccctttttttgttctctctgttttcaaaactgaatcgaattaaacttagtgttgggtttaggtcattgatggtaagccatacaacagaaggtgcgatgtttacagctttgggatatgtttatgggaaatctactgctgcgatatgccttatcctgatcttagcttcgtcgatgtttcttccgcggttgtcttacatgtaagttttgacctaaaaaaaccctagctagttttccttgatacttacgtaatgtcgaattctgaaactttttttctatgattttaaaaaagaatctgagaccggagataccgagatgctgtccgactgcattggcgggcataatgaagacatgttgggatgggaatccgcagaaacggccggaaatgaaggaggtggtgaaaatgcttgaaggtgttgataccagtaaaggtggcggaatgataccggaagatcaaagtcggggctgtttctgctttgctcctgctcgtggaccttaa

SEQ ID NO: 176475 - DNA, 372 bp, Arabidopsis thaliana landsberg
atgtttccgaagtcgacacatgaaacatttgctcagaagctgtatcaatcgttcaaaaacaataagcggttcaccaaaccaaagctatctcggaccagctttgcaatatcgcattatgctggagaggtataacatctttcacatgcttatgataagtttagatatgttcctgttaacattctctcttttctgctgaaacaggtaacatatcaggctgacttgttccttgataagaataaagattacgtggtggcagaacatcaggatcttttgattgcttccagtgatacttttgtagctggtctatttcctcgcctaccagaagaaacatcaagtaaaaccaaattttcttccatcgggtcacgctttaag

SEQ ID NO: 176476 - DNA, 329 bp, Arabidopsis thaliana landsberg
aggtgagatgcgttcaaggattgaatctctggagaaataactcagtagaggtcaatgatgagatctttaagggctatcgtcaaggaaatcatgaagagatcatcaatgaggtcgctgcaggttattacacttctcttatcatatgtctctatttttttacttttgcaacttctgactctttctctggttttatattagcatacgatctcttggacactgataggaacaagttcaatgtgaccatctggtataactcttcttacaagggtaatttcaaagtacaagataggcgtgtaaagtatgtccgagtacctcgctcagtcaatatg

SEQ ID NO: 176477 - DNA, 105 bp, Arabidopsis thaliana landsberg
gaacgacttggatctttgtcggatggttgttcatctcagggggagaagagttacagaggtcctgagatgtttgacgtagttgttatgggtttggcctttgcgtaa

SEQ ID NO: 176478 - DNA, 360 bp, Arabidopsis thaliana landsberg
gggaactgcaagttggccttggtagcagtagaatacttcaccaagtggatcgaggcgagggttgtatccacaataacatcgaagactgcccagaaattcttctggcaaaacattgtttgccgcttcggagtcccatccgaactcacagttgacaacgacaagcagtttgacagccaagacttcaaggatttctgcttctccattggcaccaagcttccttcgcctcagtataccacccgcaatccaacggagttgtggaacgcgcaaatgggaaaatattcacagctgtcaaaaagatgctcctcgatgaaagaaaaggcagatggaccgacttattaccagaggcagtctgggcgctaa

SEQ ID NO: 176479 - DNA, 272 bp, Arabidopsis thaliana landsberg
acctgtatcaaaatgacgataaaaggaaaaaggtcgtggcactaaaaaatcaagaagctggtggaagttgtgtcgatggaaatgtggctcattggttttcgaaaactaagttcaatgggttagtggacgtaccaattgtgtatttggccttggaagaaaatatagttaagaatgatcttacattgagaagctcacttaaacatgtcatcattggcggtatcagcggaggcagtaacagtggtaaagggctagccaaggatttctacttagat

SEQ ID NO: 176480 - DNA, 694 bp, Arabidopsis thaliana landsberg
atgacggaaccaaatctcgacgaagatggttccaagtcgtctttccagaaaacggtgagtgagcttcttacttcatctcctcgtatttgattcaatcagtgttctaaatccgcctttttgttcatctgggtttttcgagtaaaggtggtgctgagagattggtggttgataaaatgcccaaaggaattcgaagggaaacaatttggtgttgctggattcgaagagtccgtcgagtaagagtgctttggacttttcaggtttcttttttttttatgaaacgatttagtttttgaattcttcgaattttgccttaataggacaagagcaatgcgtgtgtttacatcttcaccaatcaccaaagctttggatgttttcacactcttagcatctgatggaatctatatcactctcagaggttttcttaacaaagaacgcgttcttaaaaatggatttaaccctgaggtaatctaaagattgcttaacttgttggaacttgatctatctaagaactaaggaagaagaactgactttgatttgttctttctcttttgttctgtggtctggtcttgggaatagatttctcgtgaattcatcttcgggtttcctccttgttgggaacgagtttgtaacagttgctttgaaggagactcttttggcactgatgttaataccgtcccttcgactatcgagaaag

SEQ ID NO: 176481 - DNA, 2582 bp, Arabidopsis thaliana landsberg
  unsure (1)..(2582): unsure at all n locations
atgggagctgcggatgctgttagaagggttgcaacaagaggaggaggggcttatgaagatgccaaaagaacagaagccatggttttagccggggatggcatgatttggaccggctgcacaaatggattgcttatacaatgggacggaaatggaaaccggttgcaagatttccgtcaccatcaatgtgctgtactgtgtttctgcacgttcggggaaaggatatacattggttatgttagtggtcacatccagataattgatctcgaaggtaatctaatcgcgggatgggttgcacataataacgcagtgattaagatggcagcagccgatggctacattttcagcttagccactcatggtggtatacgtggatggcctgtgatttctcctgggcctcttgacgggataataaggtcggaactggctgaaaaagaacggacatatgctcagacagacagtgttaggattctgactggttcatggaatgttggccagggaaaagcttcccatgatgcgcttatgtcttggttaggctctgtagcatcagatgttggtattcttgtcgtaggcttgcaagaagtagagatgggtgctgggtttttggcaatgtcagctgctaaagaatcggtgagacaatagttgaaaacaagaactctgactctctattcttcatgaaaaggtttatttgaatgcgttatttatgtcattcttgacctctttttggtctgntattaggtaggaggaaacgaagggagtacgatagggcagtactggatagacacaatagggaaaaccttagacgaaaaagcagtgtttgaacgcatgggatcaaggcagttagctggtttgctcatttcactttggtgagttgtgaatccatgagataccttatccaataaaacaagtgctgctatatatgtaatttgatgttttcctgaatttttgttttttcaattcagggtgaggaagaatctgagaacccatgtaggcgatattgatgttgcagcagttccatgtggttttggacgcgcaataggaaacaaggtaaatatttctttgtcttcaggatgaaaaagaaagttaaaacctgagcttattccctttacctaagttttatgaccatccatttctaaatactctagttaccattgcatctagctttttgtttcattctctccaacaatgtagatcattctgggttctgatagcagcattccacctgatttatttttgtatatcaaaccagggaggtgtaggtttgagaattagggtctttgatcggattatgtgcttcatcaactgtcacttggctgctcatctagaagctgtaaaccgcagaaatgctgattttgatcacatatacaaaacaatgtcctttacccggtcatcaaatgctcataatgcaccagccggtatatttctatccccaatttttcacctaacttatctttcttgaagccatctgcctgtatacctcatgactttgaacttttgcagctggtgtgtctaccggttctcataccacaaagagcgcaaatgtaagcatccttttgccttcctctctagtttaacacaaagctaatgatcatggttacacctttggtttgagtttcttgcttaccttagacccatcacattttctgtagaatgcaaacgttaacacagaagagacaaaacaggacctagctgaggcggacatggttgtattttttggtgatttcaactaccgcctctttggtatatcatatgatgaagctagggactttgtctcacaaagaagcttcgattggcttagagaaaaagatcagctcagggcagagatgaaagctggaagagtattccaaggaatgcgtgaagccatcattacattccctccaacttataagtttgaaagacaccggcctggcttaggaggtacataaaccgcactttgtatgcaagtgtttggtttcatccaatcgcatattaaagttttgacctttgttttgtcaatgctttctgcctcagggtacgattcgggtgagaaaaagcggattcctgcatggtgtgacagagtaatattcagagacacgcgtacgagtccagaatctgagtgcagtttagactgtcctgttgttgcttcgattatgttgtaagattttccttacacactactgagatccaaacccttttatatcctccaaaagtctttaacaatttcgttttggggggttatggataggtatgatgcttgtatggatgtgacagagagtgatcacaaaccggtccgttgcaaattccatgtcaagattgagcatgttgatagatcggtaaggagacaagagtttgggagaatcatcaagaccaacgagaaagtcagagcgttgctcaacgacctacgttatgtaccagagacaattgtcagcagcaacagcatcgttctccagaaccaagacaccttcgtgcttcgcatcaccaacaaatgcgtcaaggaaaacgctgtgttcaggatcttgtgcgaagggcagagtacagtgagagaagacgaagacacacttgagttacatccgttaggatcattcggtttcccacggtggcaaaag

SEQ ID NO: 176482 - DNA, 178 bp, Arabidopsis thaliana landsberg
gtttatgatttcgatttcaattactttacgtaaagtgtttgctaattttagctcctacaagttgtgcaatggggagagattaccgaagctcataaggaacccaaagacacagaatatcccgttaatggcggttgttggacccaaattaagacgtcgagaccggaactgttaccgttag

SEQ ID NO: 176483 - DNA, 522 bp, Arabidopsis thaliana landsberg
atgaaaaacaagggcctggagatactggtcaatgccgtgccggtgaagaaaggacgattcgcctggacgagaacggggacgttttccaccaacaagaacacgatgggacggctcaacagcaacaaatattccctgggcgcggattatttctacgtgggttcggctcagccgccgatcaacggcgagccgactaacatcgtacaggtagggcagcctatcggccagatctggggatggaaagcagtggacatatccagcgacgggaaatggatctaccgggggaaggacggcgaaccggtgccctctgacaaggcaactcccgaagacaggcaggtgctcggcaacggtattcccaggtattttgcggggtggaacacacgtttcgttacggcggcttcgactggggatcaccatgcggggccagtttgataccagatcattaacttcaccaggatgcacctggaagacttcgcggccaattcaggccgcaacgtgctgaaatccgctttcgacaaggtgttc

SEQ ID NO: 176484 - DNA, 89 bp, Arabidopsis thaliana landsberg
agtatattgaccacgacgacccaattcatgagtgtcaggtttgtaaagcttatatgtggtatgatgaacgtattaacaagcagtcaaaa

SEQ ID NO: 176485 - DNA, 127 bp, Arabidopsis thaliana landsberg
gcgagaatcatatgaagggactttccaaaagcaaagagagtaccttaatgaatgggagaaaaagcttcaaggaaaggaagaatccataactgagcagaagaaaaacctgaatcaaagagaggaaaag

SEQ ID NO: 176486 - DNA, 493 bp, Arabidopsis thaliana landsberg
atgacaggtaggggtccatgcaaactcatattcatgtgcatatcatcataaaatatccaaaaatctatcttatctatataacttcattgaacaaaacatatatatattcatgcagacgtatggcatgatacagttaatggtctgaattgctcaacgtaaaccatacgtgcactagacagtttcatgggaagactaagattttgggactgcaaaattcttctcggaattgtgtagcggctttcaacgtatctttaggttatattcggtgaaccctttatttaccggcacagaatattacggttgatattcaattgatcaaacaatgtgaattagacgtctaattattgatggtcgccatatgaatatcttcttcttccttttccaaaccaacaccaacatcttttaatcgatagaagtgtcaattcgagctcgactctcacatctaatgcgtcattataagattgaaaatcagagacttgaagttttcgtttag

SEQ ID NO: 176487 - DNA, 189 bp, Arabidopsis thaliana landsberg
acatgtgttcattgtaatgttacaaggcacagaggacgctttaaaacttaatggtagtgacatgggaggatgcattcttgaagttcatgacgctagagagagagacgagttctatgtcaattatgaagcgagtgggcgttataaccagaaaccttgtcagcgtcttttggctagacgtaaatacacaag

SEQ ID NO: 176488 - DNA, 459 bp, Arabidopsis thaliana landsberg
  unsure (1)..(459): unsure at all n locations
accttcctcaaggacgacaacctgaccattaatggcagggccgtcttcctgagccactacgatcccgctcacaccgacaccgacatctccgtcctgttcgccgacttcgacatccttcacnnnnnnnnnnnnnnnnnnnnnngcgcgtacccgttcatcgactactccaccggcggccacatcgacggcatcattcgcgccacgaccaggaatcttgccaccggcaccggctccaccatcctgatccccggccacggtcctgtcggcaacaaggaccagctctccgagtttcaggacatgatcgtcgccgtccgcgcaaaggtcgccacactcaaaaagcagggcagaaccgtcgacgagaccgtctcggcaaaaccgaccgcgcagtacgacgcaaagtggggcaccggcttcgtcacaccagagatgtttacgcgcctggtctatcaaggcgtttaa

SEQ ID NO: 176489 - DNA, 207 bp, Arabidopsis thaliana landsberg
acgacttcaaacggcaaatccaccaacaccaaattcatcgccaaatccattaaagccaaattcttcaaccaagtgcatcgctatttcagtgacatatttcatacgacttcaaacgtcaaatccatcaatgccgaattcattgtcaaatctaccaacaccattaaaccagatacaaaaccgcttttttcgacagactttatacgatga

SEQ ID NO: 176490 - DNA, 268 bp, Arabidopsis thaliana landsberg
cgcctcgaccacgccgttgaggacatcctcatcaccgcggctcacgtcacgctctacgacttcgacaccgacatcaaccagtgggtgcgttcccctgcgcgcctgtctgattcaccctgaccctgtgattcctgtgtgaacaatttggctggttggaccttatttgtgtgctcgtgttgcatgttttatgcagagccggaaggacgtggaggggtcgctctttgtcgtcaagaggttcgtctcgtctgtttctgatgagtttgcataa

SEQ ID NO: 176491 - DNA, 216 bp, Arabidopsis thaliana landsberg
gactatgaaaacttcataagctacatctgcaaggcttacaaaggtaataaagtacctggcgcatgtaccaaatatgcaaccggcaacttcattcgtagtgtcaaattgaaacgctcccctctggtgtcctggaaaggcgtgaataagatgtgggatgtgttggaacgtatcaaaacctctttatcgtcatacatcgacatcaccggcctgctatga

SEQ ID NO: 176492 - DNA, 231 bp, Arabidopsis thaliana landsberg
atggcggagaaagcgaagaagaagaaaaatggaggaggaggaaatcagagaatagcgttttacaagcttttcacgtttgcagatcggtacgacatcgttttaatggtcatcgggaccctctccgccatggccaacggcttaactcagccgtttatgtcaatactcatggggcagctcattaacgtttttggtttctctgatcatgatcacgtgtttaaagaagtctccaag

SEQ ID NO: 176493 - DNA, 265 bp, Arabidopsis thaliana landsberg
atgtatagaaggaaagaacatattgttagacaagccagattagaggactacattacagatgagattgagctagaagaagttgctgggtatgcttatttagtcattgaagatggaggaaagtcagaaccaggaagttttcaggaagctttagaagatgctgatcaagataaatggatcaaagcgtcagatgaggagatggaatctctcatgaagaataaaacctggatattggtggaaaggaacaaacaacagaaacctattggtt

SEQ ID NO: 176494 - DNA, 329 bp, Arabidopsis thaliana landsberg
atgaacaaccttcgcgtaattatgtcagtgttattggccgttcttgtcttcacagcgactggtaattagtttctttacctttaacgcaatgatcggccgctctaaacaattaacagtgttttaattgaattgttctctttcttcttctcgcagtttcagagtctgcagaggaaatggggaagggtgaggtcacaatctcacttagatgcaaaacgaaaacagaatgcttaaagaacattgcctgtgaagcttgtgtcgattgtcgatgcgataaaggaatttgtaaatgccatggtttcacagcagaaaccaacaatccaaccgtttaa

SEQ ID NO: 176495 - DNA, 159 bp, Arabidopsis thaliana landsberg
atgattgtgaccagtcaacacggaaatacaagtcctagactgccagttccaaatgcggatagtctgatcgtcactagcactcacaatccatgggttttcgtggtgaaattggacagtgcggatataatcaagatgcccgagaagagtgaaaagacacct

SEQ ID NO: 176496 - DNA, 527 bp, Arabidopsis thaliana landsberg
gagcgagtgcgatttcataacacaggcccctcatcaatccctggtgccattgtcatgagcattgaagatggtcacaaaggcatcccaagtgtatctcagatcgatccaatgtaagcaagaaaaaaaaaaaaactcgacaaatctttcaaagcttcatatatgtagacattgttcagtaatggtgctgttacccctacagctactcactcattgtggtaatcttcaatgcacgcccgtctgagttctcatatcccagtcccgctctaaaagacaggaagctcgaattacacccggttcaggtaaattacgcatcacagagaatagaacaatatcacaagctttcacctttcagtttgttgtgtattagaaaagttgtaagatctctaagcgataagttaactctgagtgactaacaggtgatgtcagccgatgaaatagtcaagaaatcagtttacgactcgttttctgggggcttcactgtaccggcaagaacaacgacggtgtttgttgaatcgcggaatggttga

SEQ ID NO: 176497 - DNA, 407 bp, Arabidopsis thaliana landsberg
atggacatagatgccgagacatccgacaagccggatattaaagtagacccgcagcctactaattggagagatcccatcaaactctacattgctgatggcgaaattccggcagatcggtgggaagctcgtcgcctaaaggcaaaggcgcgaccaaggcgttcctcacatgcgtaaacaaagaggaagccgccataatcatgaaggaaacgcacgacggggacggagggaatcattctggtggacgagctctagcgctcaaaatcaagaaggatggtcactactataacgtccctgaatcatcatatggtcagacaagccataggcgacccagttacgctataatgaagatgatcgaccacaacttattagagattccagatgaatttggttccttaaccaaattataa

SEQ ID NO: 176498 - DNA, 113 bp, Arabidopsis thaliana landsberg
atcttttggagccaattatttccctagcaagctcttggcagaaggtggaatttgagcgctggcccactttgcttgatgaggttcaggatcagtataaactaaacgctaggaag

SEQ ID NO: 176499 - DNA, 623 bp, Arabidopsis thaliana landsberg
atgcaagctaacggcgttgattgcagcgaagctctcaacctcgtcgacgacgaaaacgatggtgtctctgtgagagcattctgcgatttgaaggaaggagatgttgttgccaatatctcaaaaactgcttgtctcactatcaaaaccagtggagctcgtgagatgatcgaatctgctgatttagatggaagtttaggtctctctgtggctctcatgtacgagagaagcttaggtgaagaatctccttgggctggttatcttcagattcttcctattcaagaagatttgcctcttgtttggtctcttgaagacttagattctctcttatctggaactgagcttcataaggtttcctttccaaattttgatttaccattgcattgtagttgaattcactactcatcagtttgaattttttgtaggcagttggtgaaggaagatcatgttcttatatatgaggattggaaagaaaacattttgccgcttacctcttcactgcctcagaatgttgattctgattcgtttggaatcaaagagtatcttgctgctaagagtttaattgcttcacggtctttcgaaatcgatgattaccatggatccgggatggttcctcttgcagacct

SEQ ID NO: 176500 - DNA, 605 bp, Arabidopsis thaliana landsberg
ttttcttctctccttctctcttctctgacgacgaacctccgccgacgctgaatctttcgcatcagccgccttgtccaagttcattggtaagtttcgggtttgatagaaaataaattagggttttgatttttccccaattccattgaattatggtttgcaaaggaattagacttgccgtttatgataatttgatatctagggtttggattttggattttcttaaagatctagggtttggatgttagggtttatattttggaatttatccccttttgattttcatgtgtttggctatgtagcaaataatgccacttagttattcgtcaccttcttcatcagaggaacgatccgatgatccttccaagtacgatggtgattttggtgttccccaaatctgtttttgtggtaaacagcttgagcttgtagagcgtcttattggcgatcaaaagaagacatttctcaaatgtccgatgagtggtcaagatgataattatcatgtagacaagggttgggatcttgcagttcacgagcagtgcttttgcatcgacaaacgatttggcgagccccggcaattgattcaaaacgcattcaaatttaaagaatga

SEQ ID NO: 176501 - DNA, 69 bp, Arabidopsis thaliana landsberg
atgcccgcgccgccgtccccggctgctgtgccctggccgtcgcgccctgccgcatccttggtcgcgcgg

SEQ ID NO: 176502 - DNA, 105 bp, Arabidopsis thaliana landsberg
attgatcaaggactcgataaaaagaaggaatatgattctgtagctgtaaagctttatggaaatcatcctgataaaaagaaggaagagataactagaattttatag

SEQ ID NO: 176503 - DNA, 616 bp, Arabidopsis thaliana landsberg
atggcgaaggaccagaataatctgtcgagcttggttcacgaactccgtgaacgggtggccgcatccgcctccactccggctaacaacctcggtcactcttccggagacgaagatggtctagagattcgatttcgtgctgtcatccctaatctattgaatacctacgttgttccttctctcggtaataactgtctcttgtttctgttcccttggatgattcttagcttggattttgccggaattgatttaggttaacctaggattgctttttccaatttcacaggcaacgggagggaagttacagctgttctgaagcttgttggtcacacagcaaggaacattccaggagtcttctatcacggaaccccttctgctatcctccctgtgattgctcgtattatccccttctttgctgaaccagaatttgtgtaagtgttgttgttttcactagcatttgggtcactcttcaagagttttgctctaatgcttaaaatcaattgcagtcctgggcatggagtattacttgaaactgttggctctctcttaatgttgctgcgttccaactcaaggaaggcataccggatcttcttccaaaacactttgcaggcaattcaag

SEQ ID NO: 176504 - DNA, 1086 bp, Arabidopsis thaliana landsberg
gaaatcgaacaacaaccagtaactcctcccgccgcacagcaacagcaacagcaaccgcaaacactatccggaagattcttcagatgcctcttcacttgtatcttctacacgcaactaaccctaatctcgatctttgtgatccttctcacgctacgaggtctcgtctgcaccaaatcaccaaacttccatcccaagaaatggtacactcctctgttatcctctgttgctgtctccggaatcctctctatagcctggaactgcttcttcgtctgcaacatacgagccacagtcaaagcaacgctctggttcacaccgttattcacaatctccgtggggctcttcctaattctcctcgacaaatccaatcccgtcgttctatggataggtgcacttcttgtcttctatagcatcgtcaccgcagtgtatggttcgcttcacgtcacgaacaggcatgaattcaccttccagacgatgtcaaccgccacagggatattacccgcaagaaccagagcaatagcagttgtatcagtgatcataagcgtcttttactctggtttcttggttgctggaatcggtggagctactgctacaggaacacgtcttgatattcttttcatctccatcatcgtgataaaccttgcctggacaatgcaggttatcaaaaacgtacaagaagtcgcgatttcgaaagccatatatgtatactttagccgtgatgatctcatgaatgcatgtgatgctcttggcgtcactctgaaaaagcagctcgggagtgtttgtattggttcaacacttgttccacttattgtactctttaggggaacgattcggtgttgtaatcgggacatttatgcaagtaccccaggctgcaactggattgccaatcatatcattttgggtggaaatagatatggatttgttcacgtgggagctcacaacaaagggttaaggcaagcgtctagtgatacctggaggaggtttagaacaatccctgaatttgagcagttgattgattttgacatcaccagctccatctgtttctttagcgccatgggaattggtgcaatcgctgcattaactgcagga

SEQ ID NO: 176505 - DNA, 2781 bp, Arabidopsis thaliana landsberg
atggcgtccacgcctcctcaaacttctaaaaaggtccgtaacaattccggtagcggccaaaccgtcaaatttgcaagacgaacatctagcggaagatatgtgagtttatctcgagataatatagaattatcaggcgagctctccggggattattctaactatacggtgcacatacctccgacgccggacaatcagcccatggccaccaaagccgaagagcaatacgtgtcaaattctttatttactggtggtttcaacagtgtaacacgtgcacatcttatggacaaagtgatcgattcagatgtcacacaccctcagatggctggcgctaaaggctcttcgtgtgccatgcctgcttgcgacggaaatgtcatgaaagacgagagaggaaaggacgtgatgccatgtgaatgccggtatatattaataaacactaattgatatcttttacttgttgcacaagaaaatgaggtttaattctaactaaccaacaaacgtggtgatgattgtctttgtaggtttaagatctgtagggattgcttcatggacgcccagaaagagacaggcctttgtccaggatgcaaggaacaatacaaaatcggggacctagatgacgatacgcctgactattctagtggtgctctccccttaccagctccagggaaagatcaacgtgggaacaacaacaacatgtctatgatgaagaggaaccaaaacggtgaatttgatcacaacagatggctattcgagacgcaaggcacatatgggtacggtaatgcgtattggcctcaagacgaaatgtatggcgatgatatggatgaagggatgagaggcggcatggtggaaacagctgacaagccatggcggccactgagccgacgaatccctattccagccgccatcattagtccttacagattactaatcgtcattcgttttgtcgtgctatgtttttttctaacttggaggatccgaaatcctaacgaagacgcaatatggttatggctcatgtctataatatgcgagctttggtttggattttcatggattctagaccagatccctaagttgtgtccaataaaccggtccactgacctggaagttcttcgtgacaaatttgacatgccttctccctccaacccaacagggaggtcggatctcccaggtattgacctttttgtgtcaacggcagatccagagaaagagccgccccttgtcaccgccaacacgattctgtccatattggccgttgattatccggtggagaaggtgtcatgctatctttctgatgatggaggagctcttctatcctttgaagctatggcagaagctgctagctttgcggatctctgggtacctttttgtcgcaaacataacattgagcctcgaaatccagactcgtatttcagtttgaagatagatccaacaaagaataagagcagaattgattttgtcaaggacagaagaaagattaagagggagtatgatgaattcaaggttcgcatcaacggcctccctgactcaatacggaggaggtcagatgcatttaatgcaagggaggaaatgaaagctctaaaacagatgagggagagcggaggtgatccaacagagcctgtgaaagtccccaaagccacgtggatggcagatggcacccactggccaggaacttgggcagcctctactcgagagcattccaaaggtgatcatgctgggattctccaggtgatgttgaaaccacctagcagcgatccattaattggaaatagcgacgataaagtcattgatttttcagatacggacactcgtttacccatgtttgtgtatgtgtcacgtgagaagcggcctggatatgatcacaacaagaaagctggagccatgaatgcacttgttcgtgcctctgctatcctctcaaatggaccttttatccttaatcttgattgtgatcattacatctataactgtaaggccgtacgagaagggatgtgttttatgatggacagaggtggtgaagacatttgctacattcagtttccgcaaagattcgaaggcatcgatccttctgatagatatgctaacaataacactgtattttttgacggtaatatgcgtgctctcgacggtgtccaggtactgtatatatacttatttttgatgcaatgcaaaccaactatagacagatatatatataaagatcctttaccaaaaaataaatgattctctgtttttcttttccagggaccagtttatgttggaacaggtactatgtttaggcgctttgctctctatggttttgatccacccaaccctgacaagcttcttgagaagaaggaatcagaaacagaggctctaaccaccagtgactttgacccggaccttgatgtcacacaactccccaagcgctttgggaactccacactcctagctgagtcaattccaattgcagagttccaaggtcgtccattggcagaccacccggctgtcaagtacggtcgtcctcccggagcccttagagtccctcgtgacccacttgatgctaccactgtcgcagagtctgtttctgtaatctcttgttggtatgaggataaaacggagtggggagatagagttggatggatttatgggtcggtgacagaggacgtggtcacaggataccgcatgcataatcgtgggtggcgctcggtttactgcatcactaagcgagattcttttcgaggctctgcacccattaatctcacggatcgtcttcaccaggtgttgcgagtgggccactgggtctgttga

SEQ ID NO: 176506 - DNA, 78 bp, Arabidopsis thaliana landsberg
tttttctacttgcactggcgcaaagtcgaggcagattccgtcaagaagaagcatgaaaccggtgaagaagctgtctaa

SEQ ID NO: 176507 - DNA, 371 bp, Arabidopsis thaliana landsberg
atggcggagattgagcctatgggtactcccgtttccacggagccgacggaggccgaggaagcgaagggtcaaatgaccaaggtgaggcataaccatacatgccttaggccgaacgaccttaaaaaagctcgaaaattaggttgatgtgttctttccttctataattctgttctaaagatttgagatatgtatgggagtgaaacatgtggagcatcatagcatatgcatgatcgctaagtgtaaaccacgacaatctcattattcgttaatttcaggatgtgaccatttttgtggaaaggatttggcttatcggcaaggatggctgtcaggacaagtgggtggtgtttaagctaaagtattggatcgaatga

SEQ ID NO: 176508 - DNA, 881 bp, Arabidopsis thaliana landsberg
gaaatcttggaaggcatgtgactaatcgacatccaggctatgataaggcagcagcagatgttgtcaccagctcatcagtaccacagacaccaccggctgttgttaaaccgtcacaatcccagtcgaaagtaccacaactcgattatgatcatcttaactggttagttctcaagtggcttgctttgtcatcacttcctccctctactgtagacgaaacatggttgggaaactccttcaaatttcttaagccatccatccagttatggccggctgaaaaatataaagccatacttgatgaggttttcacaagtatgcggggagatgtgaagacaaccttggagcatatccagtccaaagtttctgtcactttaagtttctggaattcatatgaaaacattttttatatgagcgtaacgggtcaatggatagatgaaaattggtcgtctcataggttgctgctcgacatatgtcggattccttatccctctgggggttctgagatttataactcccttttgaaagtccttaagacatatgccattgaagacaggattctatgttgtacacatgacaacagcgaaaacgctattcacgcttgtcatagcctgaaggagtactttgatggtcaaaaggtcttacctttctgctacattccctgtgccgctcaaactctgaatgatattattgatgaggggttagcaactataaagcccattatctctaaggttagagaattcacacaagagttaaacgcgtccacagagctatctgatgatttcattcagttgacaacagcttatcaagaaggcaactggaaactacccatcgatgcttcatctcgttggagtggcaattaccagatggtcaacatcttgtgcaag

SEQ ID NO: 176509 - DNA, 462 bp, Arabidopsis thaliana landsberg
  unsure (1)..(462): unsure at all n locations
atgacggctgcgccgagaccntgcgcggcgcgcgcgacgatcatgagcggcaaattcggcgccagtccgcaggcgagcgacgccgcggtgaacaggaggagcccgccgagcagaaggcggcggcggccgatcatgtcgccgagccgcccgacgctgacgatcagcgtggtgatggcgagcaaataggcgagaacgacccattggatcgcctggaacgaagcggcgaaggcctcggccaaggtcggcaaggcgacgttggcgatgctggtgccgagcgaggacagcaacatggagagcgacagggcggcgagcgcgaggcccgccgccctgtggttcgctcttgcgccgtctaccggctgggtgtgcggggtcgtcatggcatcaggctcgcaccatgctgccgacgacccgccgcgcgaccggcgcgacgacgaggacgatcgggaaggcgatgagacatga

SEQ ID NO: 176510 - DNA, 176 bp, Arabidopsis thaliana landsberg
tgagatcgccctggacgaagttgcggaaggtggcgttgaggtggagagcacgcgtctcgtgatttctaatgaaatggttttcaagagcgagccaagcctgacgtgccgtgccatggcgctcctgcagctcgatggagacggtaccaaggatccaagacaaaacaatgctatccatt

SEQ ID NO: 176511 - DNA, 1637 bp, Arabidopsis thaliana landsberg
caaacttggtgtgccgataaaaacatctgtatctgcaactatattggaggaggctcttaatggcagagtttcagttgatcctcttgtacttggacaagctgtgtctaaaaaggtgtgttgtttttagcggatgcctagtaatgatctcatctgtgtatgtaatgagtgtctgtctccatataagtctcatatgtgccatggttcttacaggttgaaaagcaatgtgcacacttttatgctgtcacaatatcagaagaggaagtaagtgctgggttggtctgcagagtagaatcatctagcaaaagcaaattcaaggttggttcgggcagagtttttcctgtcaaactggtatggaagtaccaaagtataatgaactaacgtgtgcgtctgcttgtgcagctactgtattttgatcaagaggccaacagcggattaagcctagccctgcaggtattgttgttatcaattgaagtgaaaacagtgtttttcagagggttttcatatatcatataaatataagtaactcaaatggttgttttcttcttgtacattgaattctacgtggatacaggaggacagcaaaagaacgggtaagataacatctgccggaatgtactttctcggtttccctgtctaccggttggatcacacaattaattcagtaggttcacttcactatgttctaaatttacttcacctcattctggtggatgagtttctttttccccaacaagacttcattttttttgctctagatggctcaagcaaaagatccagaaactgccttctttaaaaagcttgatggttttcagcaatgtgaggtaaccgagctaaaggccggcacgcatgtctttgctgtctatggtcagttttcctggtttataatctgattacaaattcatttatcttctcccttttatatctgtctggattcagtattcgattcaacttggtgatcatctgatgacattttcctttgttcaggtgataacttttttaaaaatgtgagctacacaatccaagtcctgtgtgctgccgcttttacgcaagaaaaagaagacctcaggtctgtagaagctcagatactcactaaaagagcagagctggcaaagtttgagacagagtacagggaagtacttgtgcagttcaccgatatgaccagtcgatacgctcaagaaatgcaatcggttagtcttattcatgaaagtttataaatttcaaaccaccattcacagaaaacgaagagaagatgtgtcatgactgagtaaattagaccagattctatgtgtaagtttctgaaatggttagcttagtctgattatcttatggtctttttgcagatcgatgagctcttaaagcagagaaatgaaattcactcagcatacacgacgattccattgatgaagcggagctcgagcaagaacaggatgagaaagagctcattcaagaaggcggcggctaaggcgcctgctccaactgaacaggaagaagaggaagaggaagaggaagaagaagaggaagaaagcagcagacagaagaacaagaaaccaagtacttgtgataagtccgagacactaaagaagaagagcaaatggttcaatttacatttgaaattggacaagaaaaaaccttgttag

SEQ ID NO: 176512 - DNA, 255 bp, Arabidopsis thaliana landsberg
agtagagacaaggagagaaccaaatcaatccgaaccacaccgaagaagataaacggtaggagatcgaaccggacagaagcgaaagcaaccaccatacctggtaataggctaaacgagaagaaggttaaaccaaatcggatcaagaggcgctacaagcaacagagacgaccaacccacaaaaacaacatgagctatctaagaaccaccttaaatcactacactaaaacgcacataaaccaaacaaaagaaccataa

SEQ ID NO: 176513 - DNA, 166 bp, Arabidopsis thaliana landsberg
atggatccaagccaagaaattgatgaacgtgtaacgatgttgaatatagaagaaaacgcttccttgctattagaaaacgtggttcgcccaagtcttctgcaggattcatcagctggtaaatattgttgcatctaccgaatttctcgcagccgcgaatctacattag

SEQ ID NO: 176514 - DNA, 107 bp, Arabidopsis thaliana landsberg
atctggagctgcagcggctcatgaagcgcgcgcacttcaagatccaagtgcgcggcagccgcgcgacctccctggccagctttgctgacgagcccaaagaagaatag

SEQ ID NO: 176515 - DNA, 321 bp, Arabidopsis thaliana landsberg
gcaacaagaaaaatccttaaaggctgccagcaactggttctgaaagtaggtcacttcaagctaataacccattttcggatcaatcggctcttcatgcgtataggtatggaacgtggccgggtttaccgcccgccttaagccaagagacgccgtgttgatattcacgactctcgtctggccacacgagagggcatgcgcgagcagcactccaaacagctttccattgttgcgcgcatcttcgatcacggtgcccggagaattctcggcctccttcgccggaactttacaagcttcaagcggcgccggcttttgcaactataa

SEQ ID NO: 176516 - DNA, 646 bp, Arabidopsis thaliana landsberg
atggggaatgtatgtgttcatatggtcaacaattgtgtggatacgaaatcgaattcatgggttcgtcccacagatctcatcatggatcatcccttgaagccacaactccaggacaagcctcctcagccaatgctaatgaacaaggatgatgataaaaccaagcttaatgacactcatggtgaccctaaattacttgaggggaaagagaaacctgcgcagaagcaaacgagtcagggacaaggaggaaggaagtgcagtgacgaagagtataagaagcgagcgattgcgtgtgctaacagtaaaagaaaggctcacaatgtgaggagactgatgagtgcagggctacaagcagagtcagtgttgaagaccaaaacagggcatttgaaggaatattataacttgggtagcaagttaggtcatggacagtttgggactacgtttgtgtgtgttgagaaaggaacaggggaggaatatgcatgcaagtcgattccgaagaggaagctagagaacgaagaagacgtggaggatgtgagaagagagattgagataatgaaacatctcttggggcaaccaaatgtgatctccatcaaaggagcttatgaggactcagtggctgttcacatggtgatggagctgtgtagaggag

SEQ ID NO: 176517 - DNA, 334 bp, Arabidopsis thaliana landsberg
atgtccctcacccaaagcggatcagcggatatcggttctgccgccgatttggcggaggccggcgtcttcacctgggatctcggtaccgacaccgtctatgccgatacgacattggcggccctcttcggcttcgatgccgaggtcgcccagtcgggacagcctatcattcacttcctcgaccgcatcgatgcggtcgacaagccgcgcatcgcgcaggcgatccacgaggcgatcgtcaccggcgcggcctatcagcaggactacgatatacttcgccccgacggcacgcgcgcaagtgttccggcgttcggccgctgctttcgtgacgccgccg

SEQ ID NO: 176518 - DNA, 717 bp, Arabidopsis thaliana landsberg
atggctgatcataaaggaaaggttccagtctctttatctgcatcctcttcatcgttgtctctgtctccaaaaacaacgccaatagaggcggaagtgtggttgattgctgaggcaagggctcaggagatactatgtgccatccaacctaactatcttgcagaaagaagtaggaataagatcatcagtaatctccagactcttctgtgggaacgtcttggaattgaggttagaactttcttgcttttgttggatgaactttccttcagtctccaaagtattaggaatgctaaagttttctaacttgatcaaaatgtagttttaatgcggtgttgtatattaccaggtgtatttatttggttcaatgccattaaaaacctatctcccagatggagatattgatctgacagttctaactcatcatgcttcggaggaggactgtgctagagcagtgtgttgtgtgcttgaagctgaaatgggaaattcagatctccaagtaactggtgttcagtatgtccaagcaaaggtttgcttggttccttgtttgtttttaaatatgtgtgttcaataaaaactcatattccatgcttatgctgtttcccgctcaaatgatgtttttgatggtaggtcaaagtcataaagtgctctatcagggacgttgctttcgatatctccttcaatcaattggcgggactaggcgctttatgttttctggagcag

SEQ ID NO: 176519 - DNA, 279 bp, Arabidopsis thaliana landsberg
atgagagtactgagggacggccaaagtggtggtggtgccaatgagggagctaaagcggagaagactgtgtttgaggttaaacttgagtctttcgaggcacgtgcgaaaatcaagatcattaaggaggtaaggagaatcattggtgtgggtcttaaggaagctatgaaattggtggtgaaggctcctacggttttgaaaacaggactttcaaaagaagaaggagaggaggtcgttgagaagttgaatgcacttggtgctgaagctgttttacagactaga

SEQ ID NO: 176520 - DNA, 1438 bp, Arabidopsis thaliana landsberg
atgagttcgtgctcgtggccggcgattgaaccagacacaccggacctgatttgccagctcgataatgttcaaggaatggtcgatgcactcacttgcgtccgatggaaacgccaccaggtttttatctccatcctccccaaattcaatctagggttcttctttgattttctgaaaacttctccgtttccaggatgctttagtagaattatctgaacacggaatagttttgattgttgaagaatcaggttgtcttcaagccaaagtttatcttcaacgcgaggtatcgatttctgagtttatcttaaattttctaaacccctaaaattcgattgaatccgaaatctgtttgatgtgttatatgagtagctattcacgaaatacgagtatggagctcaaggtaggccgagattcggaatcagcttagggcttcttgttgattgcttgaacacattttcatcacctggacattctaatactatagaaatcaagtatccaggacctgatatggagcttcttctcaagtatgtgtactatgatcctttgctttgtgaatatacggattacgagtaattagctgattggtgtgagtgtttgattagatctgttgataccttaaactcttgcatctactctgagataagaactagaattcccgaaactgttacttgggactacaactttgagcaggcgggaatcgcgccacttacttttacagtaaaggtagtaacatagtttagtatcgtttttcgtttaacattgttagtctgagctttttctcaaatggtaattgataatgtatctatcagtcagcggcgttgaaggaagcaatagatgatcttgaatggcctggttcaagtgtacagatcagtcttcaaaaggaacccccttgtgtaatctttagaggagaaggacatggagacttgcaggtcttgtttctcacttgtttcttggtgatgtatattatcttaatgtgaaagaatcaaggaacatatttcgatctatcctctttgcagatagacttcatgtattatgccaacacagatcttctccttgcctttcattgtgataccgaagtctcttacgggtaacaatgaactcaattctttctctaccgtagctttatggttaaaacacacgctcctacgcttgatttaccaatcaagaatagtagccagatacatttgctaaacttctcattgttgattgtaggtacaaatacaagtttttgaaagcaacaacggcaaacataccgggaaacgtagtgagagaaaacaggggaagcaaactaacaataggaagaggaggaatgttgaaagttcagcacttggtttcagtttctaaagctttagctccacaagtggaatccgcagggtatcagccaccgagtcggattgcttatatagagttctttgtgaagcctgaagagcctgctgattaa

SEQ ID NO: 176521 - DNA, 916 bp, Arabidopsis thaliana landsberg
tatttccttaaatccggtgagggtgaacgagcagcgagcatcttagaggatcatatcaaatcccattcatctgaagtggggcacgatgtcttggatttactggcttctgttttcatgaaaattaatgcgcatgatagagctcttaagtatattcacgatgtgcgccagatttacaatgttggaaaagaattgtcttccagcttgaaaatcagacaagccatctgtcatgttcaccttgaagaaatggagcaggcagaggtttgtatgtctatattataaaactccgttatctcagtggttgctttaaaactataagccatatcattttccccaaattttgggttgcctggaacccgtatcttctgcttttaatgacccagagttgcaatccttattttgtttgaaacccgaggatcggcaagcataaaaaagagagtgaggactccctaaggcatagtaatttttgcaataggtccttatcatagatcgttattttgtattcttctcaaattccatgtttcacatctttccaccataagaactatttcagttctcttatgctataacttttgatgtgatttacggtcttttagatgtctgtttgtgtgattttgtacctgcctatataatttactttgttgctgtcagatgttatgtacctattcttgtgaatgatgctgcttccctgatctgcagagcgtgttaagcattctaccacaggaggctgtatctgaacatccagagctcatcaccaatttggctgatgagctaacaaacattgggaatttccactctgctctcaaatactatatagaagcaatcagtgaacctgtgaatggcaatttgtttgtaaaaattgctcgctgttatatgtcattggaagaaagaaaacaggccattgttttctattataaag

SEQ ID NO: 176522 - DNA, 165 bp, Arabidopsis thaliana landsberg
aattttccatcttcatataaaaaagagatagtagagagagagatgggtgaagcccaaatgattcgcaataccttgtctaaagccacacgatctatggaagccagacgttctaaaacatctcctcctctgataagatatccccgctttgctcctggacatatttag

SEQ ID NO: 176523 - DNA, 216 bp, Arabidopsis thaliana landsberg
gtgattagacatccaagagtggtccaactcctctcctctagcccttggtttaattccatggtttgggaaaagaaaccgggtaagtttctccggtttagatgcttcaatgttgaagccgtacaaaggaatccagatttggtgatcagactagaaatggattcaagacttcagaattatgaagttacacataatttaaggggatttggattcgaatga

SEQ ID NO: 176524 - DNA, 251 bp, Arabidopsis thaliana landsberg
acttttacaattggaacaaagtaaaagtccggtattgtgatggtgcatcctttgatggtgacagcgaaaacaaggttagttaattaaaaccatgaagatgatcattatatatttcactagtaattaacttgggattcatatgtatatgttgtttatgcaattaggcggcacaacttcagtttagaggaaagcgtatatttttagctgtcatggaagatttgatggaaaagggaatgcgtcaggcaaaacag

SEQ ID NO: 176525 - DNA, 128 bp, Arabidopsis thaliana landsberg
tgcgcgtaaatgctttggcgcacgttgtacgcgttaacgatatcgaattaagttacggcgtcgtttcaacgatagaatctgataagaacctcgcgtttagcttacgcaaatcgtttctaaaaggataa

SEQ ID NO: 176526 - DNA, 212 bp, Arabidopsis thaliana landsberg
atgggcgatattgaagatcaagactccggagcagacgcccatcgtttcggcggtccctggacgctgatcaaacttgaggcgctacagaagtatctcgcggcctatacccaggcgcttaagaagcagagttttcgattgctctacattgacgcctttgcgggcacaggaaactgcgatgtcggcatgggtggcgacaccttgtctctgccagg

SEQ ID NO: 176527 - DNA, 164 bp, Arabidopsis thaliana landsberg
ggctttcaagcggctgtatctgcaggtgcaaaggaagttgcaatctttgcatcggcttctgagtcattctccttgtcaaatattaactgtaccatcgaagagagtctcttgagatatcgtgttgttgccactgctgcaaaggagcattcggttccagtccgtgg

SEQ ID NO: 176528 - DNA, 1355 bp, Arabidopsis thaliana landsberg
atggctgatccacgaccagaaatcctcaaaatcacatattcattacatatttgggcccgacttgtttccgaccttataaactacaggtacaaacctttattgaagatatttctaaaacagtttaaaatttaaagattattgcaatcaaaaacactagcgtatcatatatcatatgtagtctatttctcatttattgatcaaagtaaatattgtctaatcttgtaatatatatttcttcctccacttcagttataaataaaatcaatctcaataaaaagagaacaacgtaaagtttccttctatcatcacttttctttcattattactttcttcttatatttctttcttttatagtatatttattattatacattcttaaaacatgaagacaagataaattaatagatgatttacgatacatattctatttaataacaacacgtgatcagcacggtcactccatcacgtcgaaaaatattattaccggagtgcggctctgctgcccctttataaatataatgcttttatatggttgtttaatgcaccatcttatttattatttgtaacttcttaacatggatgattttaatcaccataatttacttcttgtttccatggatgattttattcaccatatttcatttgatactctaattcacagttttaacatggatggtttttaatcaccatattttatttaatattttattcaccatagttttactaatgttgagatacatttggagtcccttgggataacggagactataaaggagaataattcttcgacggcccaagaaaagacaaaatcggtgatcttccttataagacaaatggatgaaagtgtcatatatgactatgcacacatgagagatcctaaagaattccggaaatatttgaaagatcgtttcgatcaccaaagggacatcactctcccacttgcccgagacgaatggcaaagtctaaggtttcaagactttgacaaggtaatgaactacaattttgccaagttgggaattgtcgccaaactgagatattgtggtgaaactatcactaaatctcagatgcttgagaaaacgtacaccacgtttcacaaaaaccacattactttgcaacaacaatataggttgcgtggatataccaaattctcaaatttgattgtggcgctcttaatagctgaaaaaaacagtgagctcctaatcaagaatcacatgtcccgacctaccggatcaaaggcattccctgaggttaatgcattggatgttaaaaatccgcttagagaaaacaaaattttttggggacggggcgccgaagctatcacagacgtggaagaggctttaatccacaaaccatga

SEQ ID NO: 176529 - DNA, 387 bp, Arabidopsis thaliana landsberg
tacctcgatgaagatgatggtaccttccgtttcaccaatctcggcatcgtagtccgcgaggacgaagaggttgaggttaccgttgcagtgtctgttgcaggctctgttgacggcgcgggaactgacgcagactggacccttacccctaccgaggttcgttacttcgatgcagacggcgttgcttctacggaagacagcgagttcgaaatcggaactgacgtagacttcagcatcaccgaagagggagctgatgacggcgcgaagatcaagtcaaactcagacaacccagacgcatcagcgatcctcgttgatgaagatgacaagtcagacgaggttccggttcacaccttcaccataaatgttgacaaggattcttcagatctcgag

SEQ ID NO: 176530 - DNA, 987 bp, Arabidopsis thaliana landsberg
aagaagaagaaaaagacgaagaagaagtgcaaccaggaattgcaaccaacctcatccgatggatagataaatatattcgtaatcagatctggacaattcaatcaaccgaggacagacgctacgacagtcgacaaaggctggtttgcttcacgagactaagctgctttcagtactcagttcctcaggtaaaagctttgtgttctatttttattttcctaggcaatggtttttaagtaatttctactaaaaacttaagaaaaacggatctaaaacgttttttttttttttttgaatataatttaaccaaaaaaaaagacgtagaagaagaagaagccatgatcataaaaagcccaaaggtcacaatgtttctttacagaaatttactaagttggctggccttttaatctatatgatgtttcttgcaggccaaggtagtagtgtcatacccggcaaaactgtccctgacggctctcatctgcatcatcggggcgttggatcaacggtcacggcactaatatgggagagaaataaacttaaagccttgaaacttcatccaaatgtgacagtgttagcgtctctggggtaagttgaattgaatcaagaagtcatttggttgtcatacaatttgtattgaaactcattctccactgtacagggatgtttctcagcaacaacggtttacgttgttgggtggatggcacagaagaagggtgagtatcttcaatccaatcaatctgattgccacggcggtcattagctcggttgtactctctgagcagatgtttgtcgggaggtgagcattggtgctttcctaacatccttggtatctcttagtagtcctcttctcaactcatctttctttgctgaatcaggataattggagctttcgtgattatcattggcatctcttttgttctttggggaaaaatgggagaacaaaccacgccgccgccgccacctccaccttcagagcctgaggcaactgag

SEQ ID NO: 176531 - DNA, 178 bp, Arabidopsis thaliana landsberg
atgaaaatcactaagattcctaatagaaacgacaagacgacgaagctaatgatcgagaaaactatcactgtacggaatcgcaaagctaacgaagagaaaaccctcttttgcttctttgtagtcgttaccgacgacgtcgtttcttcggaatccatttacactttcttctccggtgacg

SEQ ID NO: 176532 - DNA, 1007 bp, Arabidopsis thaliana landsberg
atgcctgccgtgacacttgacatccgatgcatcttagataacctccatcaaggccccatgactatccacgccatacaagctatccgcgctatgattgacaaacacagtgaatcagctatctggcttgctggacactctttgggagccgccctagtgttgctggccgggaagactatgaaaatttctggattccttctcgagagttacatattcaacccacccatcatatctattcctctagagcagctacctggcggcgttctacttaaaggtgtgtttcgaatcaccgagagcctcgtcaaagctactgcaactactgttactatggccttaactgatcaacgggtaaatatataatctttttaacgaatttcaaatgtttgatcatttttggataacgaattcaattagctatggtggtttagtcattaagaactcatcttgttagtcgaggccacgatatcaagttttccatgttggtcaaattagaaaattattacaaaaaaaaaacaacattgttgaaaatacttccagtactagtttatagtttattttcttacgagaacctatattgatacttttttttttttgtaaatcaatacggttgtctttaactattacaggttcaagaagattccaaaacagcattgtggataccttatttatatgtgaatccagcagatcctatatgtgcaggatacattgattacttcaaacacaaaaccttcatgtctaagatcggagcaagtataatcgagaaaaccggttctagaagctcatttagacatccatggacccgaagaataggaacatcatcatcacaactgtctgatttgtcaatggaacctcttcaccttcttccatcagcagatatgactgtaaacaagaacaaatcgacttcttctatggcagctcatgggcttcaccaatggtgggagcaagactccgtcctaaggaaaaattggaaaaactgcttgattaggcccgatcctgaagataaatcttga

SEQ ID NO: 176533 - DNA, 43 bp, Arabidopsis thaliana landsberg
atgggctgtatcggatcttctcaggccagaaatgaaggcggag

SEQ ID NO: 176534 - DNA, 83 bp, Arabidopsis thaliana landsberg
atgcacaactctctcacttctaatcagagtggggctactagtccgaaagttttctccggcgagttcgccgatgacgtcgactg

SEQ ID NO: 176535 - DNA, 117 bp, Arabidopsis thaliana landsberg
gctgacccgtttgatgttaatctaaaaacatttgacgatgtagctcttcatcttgagttacaggatgacccccaagaggctgctaaagcatttcgacttgaaacatatgagagttaa

SEQ ID NO: 176536 - DNA, 145 bp, Arabidopsis thaliana landsberg
gttctaatttttgaattgttagatgagtggaaatactttcttgagcgaatgggatgtgataatttagacgccttaaagaaagagggtaaagaagaacagcttcggacctgggcatcaattagtggacaaacattgagtagtgcag

SEQ ID NO: 176537 - DNA, 424 bp, Arabidopsis thaliana landsberg
atggcttcacttcttgtcctcttcgttttcttcttcatctcttcttgttctgctcaatcctacaatgtattgtcttttggagctaagccggacggaaagacagacgcaaccaaagcttttatggcggtttggcaaaccgcttgtgcatcgtctcgtcctgttaccattgtggttcccaaaggccggttcttgttaagaagcgttactttcgatggttccaaatgcaagcccaagcccgttacgttccgtatcgacggtacattggtggctccagctgattatcgagttataggaaatgaagactattggattttcttccagcatcttgacggcatcaccgtatacggcggagttcttgacgctcgaggagcttctttatggggatgtaaaaaagtccgccaagaattgccccagtggcgcaacg

SEQ ID NO: 176538 - DNA, 83 bp, Arabidopsis thaliana landsberg
ggttttcacttcgaattgaagccgataacatattaaaatttagtcgaaggacgaaactttttggttttgaccgtctagattaa

SEQ ID NO: 176539 - DNA, 596 bp, Arabidopsis thaliana landsberg
atggctcgtaagtatagagaacactcttctgcttaccgtaggagaaagcttatgagtaataatccacttaaacctcacctcaccaataatcatcatcctaaccctaaccctaattaccactcttttatctccactaatcattacttcgctcagcctttccccgagtttaatttgactcatcacctggttaataatgcccctatcacgagtgaccataaccagcttgtgttgcctttccattgctttcaaggtagcctatagctcttcctcctctttcaatagttttttcaattgtcttttgcatattttgaactcttttttggtttttgttatatctacaacgttcaggttatgagaacaatgaacctccgatggttgtgagtatgtttggcaaccaaatgatggtcggcgataacgttggtgccacgtcagacgcgttatgcaatattccgcacattgaccctagtaaccaagagaaaccggagccaaatgatgcaatgcattggatcggaatggacgcggtagatgaggaggtgttcgaaaaggctaagcagcaaccacattttttcgattttcttggcttggggacggcgtga

SEQ ID NO: 176540 - DNA, 106 bp, Arabidopsis thaliana landsberg
ccgactcttcaatcttctgcgtaagcgcgggttctttggcttcagtagccgaagaggtctcaccgccaaattcgggcactgtggctggttcaatatagcgcggtcg

SEQ ID NO: 176541 - DNA, 54 bp, Arabidopsis thaliana landsberg
atggggcattttcagagctttgggaaggcaaagcatcaaggactctctcgagag

SEQ ID NO: 176542 - DNA, 393 bp, Arabidopsis thaliana landsberg
ttttccggcaacacgcgcaccgaggacgaggtgctgcgccgcgagatgcgccagcttgaaggatcgtggtattccaaagccttcatcgagcgttccaagacgcgcctgaaccagctcggcttcttcaaggacgtcgagatcaagcacaagcgcgtgcccggcaccgacgaccaggtcgacctgaccgtatccgtcaaggagcagaactccggcagtctgcagttcggcgtgggctactcacagtattccggcaccatgttcacggcctcggtgtcgcaaaacgacttcctcggcactggcgacaagttctccgtcggcgtgcagaccagccgttattacaaagccatcaacctgcgttacatcaacccgtacatcaccgaaaacggcatcagc

SEQ ID NO: 176543 - DNA, 228 bp, Arabidopsis thaliana landsberg
atgtacggaagcgtgtctcacaagtcagatgtgtacagctatgggatgttggttcttgagatgatcggagcaaggaacaaagaaagagtccaaaatgctgatccgagcaatagctcggcttactttccggattggatctacaaggatcttgaaaattttgataacacaaggcttcttggcgatggactaacccgagaggaagaaaaaaatgcgaaaaagatgatcttg

SEQ ID NO: 176544 - DNA, 559 bp, Arabidopsis thaliana landsberg
aacaagatgaccagagtcctaagaaggttgaggagattcatgaggaagaaccaaaggaagcacacgatgtagaagctacgagtgaacggaatcttccagttgaaacatccgatgcagataatactctgtcctctcagttagtgtcagaaacaaaggaagaacacaagttacaggctggagaaatcctccctaccgaaattattccaagagaatcatctgatgaagctctagtttccatgttggcttctagggaagatgataaagtggctcttcaagaagataattgtgcagatgacgttagagaaacaaatgacatacaagaggaacgatctatttctgtggaaacagaagagagtgtaggagaaacaaaaccaaaagagcatgaagatgaaataagggatgcacatgtcgagactccaaccgcaccaataatcttggaggagaatgatagtgagactctgattgcagaggcaaagaaaggaaatgaagaaattaatgaaacagagagaacagtggctttggaccatgaagaagagtttgtgaaccatgaagctccaaa

SEQ ID NO: 176545 - DNA, 318 bp, Arabidopsis thaliana landsberg
cccgagcccttggacagcttccctgagaggctttgaggcttttccaagcttgagccaagacccagccctaaagaagcagcaagagcgacctcgcaggacttcggccgcccgcaaccgcacgcagaccgggctaccaggtgagccatttacaaattccttgtgcctacaacctccctgacttcctgtgaagctccccaactcactggattgagctataccgccatggttaggctgaatcactcgccgtcgacgagctcccccgcctgcgccgaggacccaccaactctggccatctccgacaccgacccgcacaccgac

SEQ ID NO: 176546 - DNA, 194 bp, Arabidopsis thaliana landsberg
ggaagaactcatggccggagcttttaggaacaaatggagactatgcggcttcggtgataaaaggagagaactcgagcctcaacgttgtcgtggtttcggatggaaattatgtgactgaagacctcagttgctaccgcgttagggtttgggttgacgaaatccgtatcgttgtcagaaacccaaccgccggctag

SEQ ID NO: 176547 - DNA, 150 bp, Arabidopsis thaliana landsberg
gctttgaatgagagaattagattttctcaccataactatattcaatcaatgcactacgggtttcaacggatgggctctcagcttcgaaaaatccagactagcatcaagctcctcgtccagctctccgataacacctctgatcaaagatga

SEQ ID NO: 176548 - DNA, 107 bp, Arabidopsis thaliana landsberg
ttgtaaaaaggaactacactgaacctgaacttgtggtagacggaaggcggatcacaagcaccggtctcagcaagtttcgattgcaaccaaaagaacctgaactctga

SEQ ID NO: 176549 - DNA, 199 bp, Arabidopsis thaliana landsberg
gtggagactgagctgagagagacaaaagagaggctagagcagcagctgaaagaagagaaatctgctagacttgaattggagaaaagagcaaaagaagtcgagaaacggtcaagtgaagtagtaaaggagctgaacgatgagcaagctaaaagacttgaatcggagagtagagcaaaggaagccgtgaaacagtcgaatg

SEQ ID NO: 176550 - DNA, 1474 bp, Arabidopsis thaliana landsberg
atggccagatctcgcatcttgtctgaggtgaagagtgagactccgatggctcttgttacgacggcgcaccggaattcgaccccgaatatcatcaattcgacgaagttttcttcgccggagagttacttgtcgcctgggattagacagcctacgccttttgcggaggtttctccgtcagcgagctgtgttaagaacgatccgattaatgagatgcgacatagcttgtccggtagctttccttctgctactctgttcaaggagtaccagaatacagcaatggcggtatcatttcgattttcctctatccatttttgtttatttcggaaatgagttttgtgcactgaaaggtgttcgatgaaatgtcaagcattgttttgcttgattatttcgatcatgacttgttccttcataataatttctaaatttttctcaatacaaaaccaaagaacccaagctagatcactactcttggattcactcaaccaatatcatatttgtcattggtacatcaagtgctatcgtgaactaacaatattgcttcatcattttgcagattctagagaaatctgattacacgatgatatcagggaaggcatacatcaaaaagtcaggtgaagattatgcttgtagtctgcttattgtttcttttacattcaaaattggttttgatgctacattgtatggaaatgtgaaggttggaggaaaatatcgttttacttcaatgtgtcttatgaaataagagacaagactattgaattcgacgaaaacagaaatgtccagcgtgctgagttcatcgttcgagccattatgcagtaatgttcttctatataaacttgaatttgatggtgggtttagcaaatagtgtgtagtgattaattggtgtttaaccttttggttgatggggtctcgcagtggaggaagattcgctgacggatggggttcttgtgagcgacgtgagaagaaatttcttaaaccgaatcacgatatccctagcacagcggagaccagagccaaaaacagggcttgtcaggtaaacttccacttctaatgctccagttacttgagcaagttgctatgtcattttgtcacagactatacttgttgaatcttaaacatctgcatattcaaggaaacaaagaagcttagagaatcaagtaccttaacatgtagaggttttagcctaaaggtcctgcatatttgaaagagacaagacaacacactgatatcttgcactttaccatcaagaagctgttccctaagaagctgtttttttctttcctgcaggatcttcttggaatcggtgaatatcgagaaagcccagctgggcttccacgatgatcagacaacatcaaatgtatttcccgaccttgccaatcccaagctaaaccttatcaaacccacaccaaccgatgtcttttatgggtttttaactcttgaaatcatacgatataaacgaatagaacttggttgctga

SEQ ID NO: 176551 - DNA, 779 bp, Arabidopsis thaliana landsberg
  unsure (1)..(779): unsure at all n locations
agttgtcatggactccgggtgacctgattcaggcagaagatcgtgcacataggattggtcaggtgagtcatgaacaatagtttagtggagttacaaatcagaatcactctcttatatctcgcttatcatttgtagtgtactttttaaactctgcctgtgattttgcttcacttctacaggtttcttcagtaaacattcactaccttttagcaaatgacactgttgacgacatcatctggttctctctcattcacatttaccgttgaaagttcaataatttctcaaaattatgttcttctctgctgaatcagtgaattctccttgccttgctcacttttcgtatagggatgttgttcagagcaagctggataatctaggacaggtatactctttcccaatgtctctccacatggagagaaaatctcttggtgtcaaatacacatccattatatgaggattccagtacggctttgactataattactgnagagtgcatagtgattcataaaaaaaagtagatgtttgattgcctgaatttncncantggtatagcctttcgaaatgctggaaactaagcttgtgaacaatttgcaacacagatgcttgatgggcaagagaatgctttggatgttgcatctagtcatatgatgagcagtccaacaaaaccaagaaacagccccacgaagcagcaaactttagaaccgttcttgaagcgctgcaaaagattagatgacgacaccgaggaacatcaacccatgcccaaagttcccagattctga

SEQ ID NO: 176552 - DNA, 63 bp, Arabidopsis thaliana landsberg
atggtcgacacgctggaagctcgcatcttatgcggagttacgtttcgatccgtacagccttcc

SEQ ID NO: 176553 - DNA, 1365 bp, Arabidopsis thaliana landsberg
atggagcaattatggatagcaaaagaaaccaagaagaaggcaaagctcatcaaaggaagagatttagtcgataatgtaatctcttggtctcttcgtgatgtgttaaactcaaatctatacagaggacaggttatgttttcttctgactcttgtctttactttaaaacaattctcttttttttttcttagttgctttatggattttgtgtttttggttattaggtagggaagattcctaacacattcacatcaaccaaagagtattttgagtcatttgttaaaccgattattgaagagacacatgctgatttgttgtcaagtatgggaacgatacgtcgtgcacaagcttttaagttttgggaaatcaagccagggaaagattttaaacctcctagggatctttattatgaggttactttgcagatgacaaatgagtatatgaccaaaggaggtcaaaatctgttagaggttaatgatcttattgcagtgaccgataagaggcctattcgaatcgatgacttgagattttctcatgagccttatttgctagctcttgtttgtggagtgaatgaaaataatccacatttgataactattttggcttctaagccaattattttcgacgatgatgacgatataaaaacgtcgtcgaatataggaaagggtgagaggaaaagcttaagtttctttggggttaatttgatcaacatgatgacaaatattcgtatttggactgcgttgcatccaaaccccgaaggaggaaacttgaagcttatttcaagagtacttcaaagcaacaatgaggtaattaagttaagttttgaaaacagaaccaaaatcatgttttgaaatatttttcttgtgtaggttgatggaggaagttgtgtttcttgtaaagaaaacagtgagagtgtagtctcagattactcagctcgaatgctacgttcatttaaactgaattcatctcaagaggacgcgattttacgttgtcttgaagctaaaagttgtaaccattccaacaatatcaaacttatttggggaccaccgggcacagggaagacgaaaacaacaagtgttctgcttttgaactttctgaaaatgacatgcaggacattgacttgtgctccaactaacataactgttttggaagttggttcatggcttgagaaattagtctctgagtctttgaggtttgatgggtatggtctcggagatataaagttgtttggcaataaagaaaggatgaaaatcgatgatcgcgaagatcttttcgatgtcttccttgagtaccgagttgatgagctttataaatgttttatggctctgactggatggagagcaaatgtaaaccgtatgatctgtttg

SEQ ID NO: 176554 - DNA, 462 bp, Arabidopsis thaliana landsberg
gatcttgaagatgaggaaggtgtttgccacattgagggccctaattgaagtgttagaggtgctaagcagagatgctgatccaaatggtgttgggaggtctatcagggacgaggtacttttttcccttacctgttgtgtttcgaaagctatttaatctgcttctcgcttcctgttctgatgatgccaagcgttcaaaaagtcatatctaataactctgatgagaagatcttggttcagaagttgcatctgcatgagttgataataaatgtttcctaagatcattaaatcaatcattcaagttgtcacgttatacacttatcttgtaactcatatttttgtttatgttttcagcttgggcggattaaaaaagctgatgcaactttgtctgcggaactaactccttacaatattgtccctctagaagcgcagtccatgaccaatgcaattgggggttttccctga

SEQ ID NO: 176555 - DNA, 559 bp, Arabidopsis thaliana landsberg
atccgagtcggttgaattcagacgaaccggaattattagatcggaccggaaaatcaaaaacaatttcatcgattatagtcaaccaagtccacaaccacagattcgaagatcatcgagcatgacggctcgtgtgaattcaatcagaaaccctaaatcatcctcgatttgggattttctcaggctaggactcgtccgtacaccggagatagaactccgaaccaccgccggaaacgcgaaattgtcagtgagtcggaatagtagctgcagtagtacaagcacgagttcgaattcgaagaaaataggatcaggtgaatcgagatcgaggaataggaggagaagctttatgttctcggattgtaaatgttcggtgtcgacggagacgaagatggcacctgtgaagattaaagtgtcctccggtgagacggaggagaaacagaggatgatggagaagaagacggcgaagaaagaagagaaatcggcgatggcgaggaagagaacgtttgagtggttatcacaggttggttttgtcgtcgatcatggaagacgaaccttggtctga

SEQ ID NO: 176556 - DNA, 307 bp, Arabidopsis thaliana landsberg
atggcggattttacgacctctattgagaagctcaataacaacaattatgggtcatggagtacccgtatgaagttttatttgctcggacaagatttatgggatatcgtgaacggagctgagacgacaccaccaagggaagcaagaagcacagacacaagtcccgacacctcaacctcaacaccggtacgaccagatgttgtatctcaaagaccagcgggtgatcctgacgccttaaagaagtggaaggttaaagcgggcaaagccatgtacgctctaaccgtagctgtagaagaagagtttctacaac

SEQ ID NO: 176557 - DNA, 558 bp, Arabidopsis thaliana landsberg
atggaggaggagaagaaaatgcagcttttaatattcaggagattgattctgttggcggtgacgctgcggcggtggaggaggttcctctgaaatcgtcttcggtggttggggaaggaagagaagaggaagctggggcttcaatcgtcaaagaagaggattttgtagctgaagctaatttgtcaggagataggcttgaggaaaacaaagaagtttccatggaagaagaaccttcatcacatgagctctcggtttgtgaggtaaacggagttgattctttgaatgatgaggaaaagagagaggtaggtgaacagatagtttgtggaagtatgggtggtgaggagatagagagtgatttagagtctaaaaaggaaaaggtagatgtgatagaggaggaaaccacagcgcaagctgcttccttggttaatgcaattgaaattcctgatgataaagaggtagcttgcgtggctgggtttacggaaatttcctctcaagataaagggttagacgaatcaggaaatggatttttagatgaagagccagtgaaagagttgcaaatag

SEQ ID NO: 176558 - DNA, 104 bp, Arabidopsis thaliana landsberg
gtagacgtagtgcgatcacggtcatagcaggatcgtcgtcttggaaatgccaggacataaaggcaccagaaagtgtgaagcagaacaaagccgacacgtcatag

SEQ ID NO: 176559 - DNA, 364 bp, Arabidopsis thaliana landsberg
  unsure (1)..(364): unsure at all n locations
atgcaggttccgggggggctacgaggtgctgctgcctatggcaagtatgcttccggaggcaatggcggtcgccagcaggcggtgctgttaatttggccggcggcgccgggggatatagggnnnnnnnnnnnnnnnnnnnnnnnnnnnnnnnnnnnnnnnnnnnnnnnnnnctctggggacagggcggcacgatgattctctcgggcgacacatatactgccggccgtaacgcaacaggttttggcggcgggtggcgaagggtcctcaggaaccggggcagcgggcaacggctctaatggcgcgatcattatttatgccatgcggataaatgacggttataaaacgcccgaatttaaagaggatg

SEQ ID NO: 176560 - DNA, 211 bp, Arabidopsis thaliana landsberg
gtccaatacaattaccacacttacttttatgaattctgagaaaataacatcggcatcatcgtctccagatttgcatgtgattgggtcagcttctcgatctgaaactttagagcttccgtgctttgtttatgctcttcaagtttttcacttcgtccatgggttctggttacgaaagatgatgatgaatgatggtgataaggacgatgaatag

SEQ ID NO: 176561 - DNA, 105 bp, Arabidopsis thaliana landsberg
ggtttaaggaggaccttggtgctattcatatcgatcaatattcctcagacaaggtaagcaataaaataaaacacgtttaattttcatattttatagactatataa

SEQ ID NO: 176562 - DNA, 111 bp, Arabidopsis thaliana landsberg
atgggttctcgtatagaagaagagagaaagaaacaaaagcagaggtttaatggcggcgagaaaattctacaaatcttagtgcaacaaccatctggacgagaaagagaaaca

SEQ ID NO: 176563 - DNA, 123 bp, Arabidopsis thaliana landsberg
agctccgatgttcagggcaaggtaataatgggcgggtgcggacttcgaatcagcggcaacggcagcgcgtccggcatcgactccttcctgcgcgatggattccaaattgcttttgtccactga

SEQ ID NO: 176564 - DNA, 378 bp, Arabidopsis thaliana landsberg
ggtgttagcaaaggtcttgtagctgagaagatactcacgttgatgatggagaaatggcggcaagcagattttgtattatgcatcggtgatgacaggtcagatgaggacatgtttgaaaatattgatgatatcatgaaaagaaacattgttgttctgaagacaccgctatttgcatgtacagtggggcaaaaaccgagcaaagctaggttctacctcgatgatgcatttggagtagtcaatatactaagcttgctagcagatgcttcggaacctgcccatgtaatagaattggaagatgacctggctacatctgactcatgcatatatattagtgatgaacccgcacagcttggtattagagaggatgaaggatcttag

SEQ ID NO: 176565 - DNA, 750 bp, Arabidopsis thaliana landsberg
atgatcctgaattctgagaaacagttcttcttgttagggacggtgagattcaatatcgatccatttagtgaacacaatgatgctgacctctgggaggctctagaaagggcgcatataaaagatgtcatcgataggaatccttttggcctagatgcagaggtatagtttatctttagtgacatatattagttagaagaattctttgatttcttatggagatggctgatcaaagtgttactttaatctgtaaaggtctctgagggaggtgagaacttcagtgtggggcaaagacaactgctgagtctagcgcgtgcattgctaagaagatctaagatcctttttcttgatgaagcaactgcatctgttgatgtcagaacagattctctgatacagaggaccatacgtgaggaattcaagtcttgtacaatgcttattatcgctcacagattgaataccatcatcgactgcgacaagatccttgtgcttagttctggtcaggtaaggccaggattattgttcatagaactcgcttaagaagattctggtacagaatagtaacgtccttctgtgactgacataaaactacgtcaattttgttaggttttggagtatgatagtccacaagaattgctatcaagagatacaagtgccttctttaagatggttcatagcactggaccagaaaatgctcagtacctttccaacttggtctttgaaaggagagggaatggaatgagtcaaggtggatag

SEQ ID NO: 176566 - DNA, 677 bp, Arabidopsis thaliana landsberg
atggaatcgtccattgaagggagctccgagtcaactactgtcactacttctccttcgcgtcgtgtacgagaacttttagctttgtgtttcagtgtaagctttctctcttcttcttctcctcgtttcgggtttgtgtaatttgttttctgggtggaatttctagatgctttgagatcgatgaatacttagctgtttcgtgatttttggagctcgaatgaaaaattcgccgctaattttgtgatttttcagtcagttgaagaagccggaggatttcaagagtttgagagttttgtgacagaacttgtcagctgtttggattctttgtatgagaacgtagctttggatgctaacaatgaactggagaacgatgttattgaagaagtattagatgaaattttgaaagttttatcatctcctcaaatggatcaggtacttttcagttttcgaatcgctttgaaagccaaacggaaggattttgtttagagaaccaagcttatgattttgttccccgattcattttattacaggatgttatagatgcactgtcatttcacttgccaaaagtaacttccaagtttgcagacatatcaagcagatgtttacagttagatgagaaaatcgttgatcggtttgtggaagcatgcaatccacgggatatgctttcaattctttgtgag

SEQ ID NO: 176567 - DNA, 174 bp, Arabidopsis thaliana landsberg
gttgacgataagtaccaatattcgtgtgaaaacaaagacattactgtccacggatggatatgcacagagcagccatcggttggtttctggctcataactcctagccatgagtatcgaaccggtggacctcaaaaacagaacttgacatctcatgttggacccacagctcttgct

SEQ ID NO: 176568 - DNA, 216 bp, Arabidopsis thaliana landsberg
atgatccagcgcggcgaattccgcgaagatctctactaccgcctcaacggcatcacgctcgaacttccggcgttgcacgaacgcgccgatctcgaacgcctgatccgccgctacatcgcgatggaaaccgagcgaccgatcgcgatcgaaagcgatgcctacgcctgcctgctcgcctatccatggcccggcaacatccgcgaactgcgcaacgtc

SEQ ID NO: 176569 - DNA, 151 bp, Arabidopsis thaliana landsberg
tcataaaactctcgcaaacgcactcattatcaaacgctcaaccagtcgttcaaaacgcttgataacgcttgaaaccgcaaccgcccgtttccgcaaactctcgcaaccgcaaccgcacccactgcgtttaaaccagtcaggccctaagtga

SEQ ID NO: 176570 - DNA, 411 bp, Arabidopsis thaliana landsberg
atgcctggagaaggcataccggagatgcagaggtcgaatcttgtttctactgtaatacaggtactaaacttgctcaactcttgtcatttagtttttttttataagaactcaaaagttgggaggcgttacgcaaaaccacacaagttttttcttttcaccttttctattaagtaattaatatccagatgagaggaagctcttgcttctagatttctcaaactctgttgatctttttggtattttcagctaaaagctttgggcatagataatatcttgggtttcgattggcctgcacctccatcgtctgaagcaatgattcgagcacttgaagtactttattcacttcagatcctcgatgatgatgctaaactcacttcgccaacaggattccaagttgcagaacttccactg

SEQ ID NO: 176571 - DNA, 126 bp, Arabidopsis thaliana landsberg
cgtggcgtctgtatcacttatgcatgcatcgactgggagcacaccgtcacagttctggaagaccttgcttcttccgtccgcgccagaagaaaggtcaactctggtgtgccgagcgaggaggctaag

SEQ ID NO: 176572 - DNA, 405 bp, Arabidopsis thaliana landsberg
  unsure (1)..(405): unsure at all n locations
atgagccggnnnnnnnnnnnnnnnnnnnnnnnnnnnnnnntcacgaccaatatccgcaatggtttccgttacaaggtgtttgccgagtatatgatgcagatgaacgacaaaggcgggggcgtgtacaatttcggctttgatgcgcggaattacttcaaaatatacaagaacctgatctgggccttccggctcgccgcagcacacagcggcggcaaacaaaagatcctttactttatggggggtgtcgacaactggctcaattaccagaatgccagcccgcctacacctgtaggccaggagacattcggtttccagaccgtcagcaacaacctgaggggctaccgccagaatgcacggaacgaaaacaaatatgcgctggccaattcggaattccgcttcccgatc

SEQ ID NO: 176573 - DNA, 899 bp, Arabidopsis thaliana landsberg
atgacgactttatccaagaaagaaacattgaatatgaacaagtttggattgcaactgaggaagaccttgtccaagaaagttcttcttattgctccaatatttggtgaagatgaagaagacaacgatgtggacaaggagatttctcggcaagcttcaaagaccaagtctcttaaaaaaattgaggagcagcataagaaagccttggaggaagacccttgtgcttttgcttacgatgaagtttatgatgacacgaaacaggaagcacttcttccacgactacatgaacgtcaagagtgcaataagccaatatataaccagcttatgagggaaaaggcagaccgtagacagaaagaacgtgagatagtttacgagagaaagcttgcgaaagagagagccaaagagcaacatctttttccagatcaagttaaggttgtaactggtagttataaaaggaaactagaggaacgagatcgatggctctcagaagaaagattgcgtgaacttggagaggaaaaagatgatgttacaaagaagaaggacttgagtgatttctacttcaacattgggaaaaatgtggcgtttggagctcgagatatcaaagctagagaggcagagaggctcaaggagcaaagaaaagtaccgaagctagagaagctaagggaaaagatgaaaacagaatcaccagagagggtagtgttgcctgactccagagatattggatcaagttgtaggataattgtggaactgcaagaagcagagcaagtagcatctgagaagaagatgaattcagatgccacagaagagagagacttatcaatcaaagggcccgccccagatgagccgagagccacttaccaacaaaggaaaagcgaggatgcgcttgctgcagccaaaaaacg

SEQ ID NO: 176574 - DNA, 111 bp, Arabidopsis thaliana landsberg
gccaggaagacacgaccgaatccgatgatgaacaagacaagcgggaaacatatcatcatcatccgaccctttgttgcacgtgtccgaagaaccattcccactttacgatga

SEQ ID NO: 176575 - DNA, 1680 bp, Arabidopsis thaliana landsberg
atgaaaccagcaagtgctacggtggctaaagtcgacagcggaggagaggataagaaattcgaggtggggaaggtatacgctgtcaagctgaccaccggagatcagttcaatggcatcgtcttggcttatgattctgaacccaacttcgccgttttcgatatcctttttcgaaatcgctactcgcagctcgtagattcttatctctgctacttcgccttcttgatttcatcttcttgtgtttgttttcgcgtattccttgacggattagtgattttacaagaaggcacgaagcctaaacctctggattcgaaatccttacggatggtgaatgtgaattacataacggagatgaagaatctggggagggttaaggaacgtctcgctaaaaatactttggttaatcttgatggactcatagagaaagagaatcatgctattaggtgatagtttttgcaatttgttgtgaaaatctctatgattgtttcgattttatcactgattttgattaatgtattatgcagtaacgtcgagaagattggttttggtgttaccgcagaagggcagatgatctttgacgcgatttctaagacgtaaggatctctttggttctttatattgaatggatgatgatgatgattttaatacaatccagtagtgtttgaaatcttgttaatggtttttgttagttctttgtgtgaagaagataacaatagcttacattgttactgcttttgctactgtttgtgaacagatttgtgctttgtttctgttagcaacgagggttggatcagatgcttgcttatataagtaactgtgaatcgtttagtttttgaatctggattcaatttagtgtttgtattgttcttggtttccagaagatgtaagctatttggaactaatacttgcgctatggttgattgtgtcttttgctttgcttcatttgttgctactgtgaaaatgcctgtaaattagcatcatatctcacatctttactagagttttcatacttgtcatggcatagcgtttttattgcttgtggtttttagaagatgcaagctttttgggactatatatttgacgaattgtatctttagctatgcttcagttgttgctgctatcaagtcacaaatctttactagagtttatttatgttggacacttggactacttgtcatggcatagctgaaagtataagctacaatggagtaaaattgtcaaagaaagtaattatgtagtttttgctaccattgggtgagttacattatataaaactcgacatggtcagaggctacttatgttgtggaccttgagttttccctgttttgcatctaagaaccgtggtgacaaatggttttatgcttatgatgataatcattctattgacttttagcatatactctttttttattcattgttatgtgatgctgcattctccaggcttcctatacgctgggtgaacaaagaaatgctggtaatgggagatgtgtttattcgtagcccttatcattctgattgtgtctatggaggaccccgtatggtcaatgaacgagtaaagcatgtggtaagtgtcaataccaagtaataaatgtaatatttgcgtttcatgtcatattaatacagttctttgttgtgtcacagctggggcaggagagaaagaagttgcaactcagtgacacctga

SEQ ID NO: 176576 - DNA, 159 bp, Arabidopsis thaliana landsberg
aatagaatagaaacaaaacgtagacgtttagagcggtcctcgtcaactacgacaacattagagatcgatcgtcgtcgtcgtacccgtcagactcaaggaaaaagaaaaaaagagattccgccgcacgttgttctaatcgaaaaaagcgactctcaataa

SEQ ID NO: 176577 - DNA, 124 bp, Arabidopsis thaliana landsberg
atggcttctcattcagaagggagaagaggagtaaacttcttcaagtataccttcaagctgcctgagaattacatgaataggctaattagcgactgcaatgaacactatctaagtgttggtgtta

SEQ ID NO: 176578 - DNA, 318 bp, Arabidopsis thaliana landsberg
atggcagctgatcagaggagaaagcggatgaacagtgccaatgttattggtaccagttctcgggagcattacagagcaaaaaggaaaaagaatgcttcaccagatggtgctttgcgttccggtgatcacatcactcttgaatgggatcgcaaccgaagtaaagtagtctctaagaaggaacaagttggtctaagttttaggcatcttcgtgaatttgttgatgtcgttcctcctaggcgtaatgtcttggcacaagtatgccctgtcccgcatgaaactttccagttggaaaatctgtcggaggtgctttctaatgag

SEQ ID NO: 176579 - DNA, 906 bp, Arabidopsis thaliana landsberg
ggactaagacagacgctctacacaacaagggctggtatgcaatttatgcagaagaaatttcaagaagagttctcttctcttggtattcagatctttcttctcttactttctaagaaagttttttttggatatccaagaatttgacactaatgaatctatatctgtctacaggtatgcacgttcatggccttgctcatgctgcttctggctatcaccgagttcttgaagaaaaccgaaaactttataatcaagtgcaggatctcaagggtagcatccgtgtttattgtcgggtgcggccatttttgcctggacaatccagcttttctagtacaattgggaacatggaggatgataccatagggatcaatactgcatctagacatggaaaatcactcaaatccttcactttcaacaaagtctttggcccatctgcaactcaaggtaatgtaattgaaatgccttgctgttattctctagtgattgaatttaacctgaaggatctatcttgctctttgtagaagaggtattttctgatatgcagccattgatccgttctgttcttgatggatacaatgtctgcatatttgcatatggtcaaactggatcaggaaaaacattcacaatggtaagattagagttgaataaattttgaagactgttacatttgaagctagagaattttcattgttcccatttttgtagattttatagagtggacctagagatctaacggagaagagccaggtagttaattacagagcacttggtgatcggtttcttcttgctgaacacagagaagacgcattccgctccgatagtacagttcagatgattgaggttcccactgagcaagttagagaccctttggttactgatggcagcaataagccatatcctttttcatga

SEQ ID NO: 176580 - DNA, 34 bp, Arabidopsis thaliana landsberg
atggtgttggagaagaagaagatggatctgctta

SEQ ID NO: 176581 - DNA, 147 bp, Arabidopsis thaliana landsberg; identical to SEQ ID NO: 175929

SEQ ID NO: 176582 - DNA, 153 bp, Arabidopsis thaliana landsberg
gattcaacttcaacgtcttcttgaaactagaagaacattgcttcgaagagagcaagcaatggcttatgcacgaggggttgttgctggttatgaaattgatagtattgatgatctcattttatttgctgatgctttcggggcttcaaggttaag

SEQ ID NO: 176583 - DNA, 255 bp, Arabidopsis thaliana landsberg
gggaacaagcaactaaagcagaatagtgaccggaaacacaaaaccccgaaccaacaaaagcgaaaaggaagccaccctcaaaggacacagatacccgacggccaaccgacgccaaatgcggagccagccatcgacacgaccacaagaaagcaacaaccgcgagggaacaagcaagacaacaagaaactcggcgcaaccacgaggaaacggcgacaccaagaggggcgactcagaccgcacatcaaacaccaataa

SEQ ID NO: 176584 - DNA, 90 bp, Arabidopsis thaliana landsberg
atgggtctgcggtcacacgcagaagaatatgaagtgaaagctcgatcagatgccgtactactgaagcgatgcttacccgcgcaggaaaaa

SEQ ID NO: 176585 - DNA, 467 bp, Arabidopsis thaliana landsberg
atggctaccgttgaggtatatattctctttatttttattttgtcaaactataaacctgtatctatggttcatattcgttgttaatatatatatatatcatgtatctagaaatctatgtctatcaagtgatatggactattcgccgtttaaacggcatgcattttttcgtttaataagtgtgttttcgcttacaggttgaacacgtgacttcagtagcagtagagatcgttgagacggaggtgaatcaacacccggaagaagtgtttgtggaagatgcagagaagacaaatgaggatgaagaagagaaggcagcagtgatcactgaaactccaacagttgtggaggaggagaagaaagctgaagaagtgactgaaactccggaggagaagaagactgaggcgttggaggagaaacagactgaagttgcggctgctgaggaagtcgccgtcgagaaggccaaggagtaa

SEQ ID NO: 176586 - DNA, 84 bp, Arabidopsis thaliana landsberg
aacggtacagatctcacggaggattttatcctctatggtcggatgctgcgtaatcaaccagaagaaccagctcagcgcgactga

SEQ ID NO: 176587 - DNA, 376 bp, Arabidopsis thaliana landsberg
taaaaaaactgatgtgttagatccaaaaaagaatggcggcgaattagtcggtatcaaacattcgtttactttcattgagacggaagaagaagaacaatccaataataagatcggcgatgaagaagaacctccacaatgcaattggttcttggatgaaatcagcctcccattgacagttgtggatactgattggactctgtgtcatatcttttacgagaaggttaaacctgaatttggtaatttgcatatagtcgaatctgaatccgaatccgaagaagaagaagaagatgaaagtgttgataagcctgcagagagtttggatagtgttaaagagaaagatggaactgttcttcctccacctcctgctacaccttag

SEQ ID NO: 176588 - DNA, 559 bp, Arabidopsis thaliana landsberg
ctcaaagaaagctttaaaagcagctttagctccaactccggggaaaccacatcgcgtatgtgatgcttgttacagcaaacttaaagccgcggagtctggttatagttctaatgtaaacaggaatgttgcaactccaggacggtcaatagatggatcagtaagaactgatagagaaacaacaaggtcatcgaaagttctcttgtccgcaaataaaaattcagtcatgtcatcatcaaggcctggattcacacctgagtcttctaatgctcgtgcctcgcaagttccatctctccaacaacttaaagacattgcattcccaagttcgcttagcgccattcaaaatgctttcaaacctgttgttgctccaactactactccaccacgtacacttgttattggaccatcatctccatcaccgcctccacctccaagatcatcctctccttatgcaagaagaccgagccctccacgcacttctggattttcaagaagtgttatcgatagtttaaggaagactaacgaagttatgaaccaagaaatgacaaaactgcatagtcag

SEQ ID NO: 176589 - DNA, 169 bp, Arabidopsis thaliana landsberg
agttgcaaaatttagcttgccaaaaagtgtgaagattagggtttgttctaaatgttctacaatcaatccagaccgacagaaagcgagactcaatatcgtagaactggtcgatccaccggtaaccaacaacaacaacaacaacgccgatcttcttccgccgccggttacg

SEQ ID NO: 176590 - DNA, 646 bp, Arabidopsis thaliana landsberg
gggaaggctggggtatgatttttcaattcgaactccatgtacacctgcaaggtggagcgactttgatgaagaaatgacctcagcttgggaggtaagacctaagcatatgcaaataattggtatttcttttgtttctgagaaaacaaactcaaaagtctaactgaatccacaggctttatgcactgcctattgtggagagaactatggttctactgagctcgacgctttagaaaccgttagagacgccatcttacgcatgacatattactggtaaacgactatgacaacctaacgtatgattgattaattactcggaagctgttggtatttaatagcaatcattggtttttttaccaggtacaattttatgccattagctcgaggaactgctgtaacaggatttgtagtgttacttggacttctgcttgctgctaatatggagttcactgagactatcccgaaagggttacagatcgattgggaagctatacttaatgtcgaaccgggttcctttgttgattcggttaagtcttggttatacccgtccctgaaaatcaatacgtcgtggagagaccatacggaaatttcctcggctttttcgacaacaggagcggttgttgctgcgcttagcacttacaacgattga

SEQ ID NO: 176591 - DNA, 390 bp, Arabidopsis thaliana landsberg
atgcgcgcgacctcaagctgcattgctcttctgatcatcgcaacgacactgtcgtgcagtaatgcggaagctctgaaacgtagcgctgacgcgggtttcagcgattcttcatcgttgcgctacgagctcgttcgcacactgccgcatgcgcgcgatgcattcaccgaagggctcgaaatctgcgatggcgagatgctcgagagtgtcggcctctatggcgtttctgcgctaattcggaagcgaatcgacgacggcgaggtactgcagcggcacgatttgccggcaccggtgttcgcggaaggcaccacctgtttgaagggtctgatctatcagctgacgtatcgcgaacagatcgtcgtggtctacgacaacgcgcttgccgtgcagaaa

SEQ ID NO: 176592 - DNA, 39 bp, Arabidopsis thaliana landsberg
atggagcgcacgaagcacattgaatctgattgtcatcag

SEQ ID NO: 176593 - DNA, 391 bp, Arabidopsis thaliana landsberg
agcatttacgaaaggagcagaaactgcggctgcgttctggaggaacgttttcgactcggtgaaagcccgcggatttcgacctccggaagtgattttcaggaacacgatcgcgacgggcggttacgcgaggaagcttgcgtttaacccgagcaagatggaagtgtacaatggggtgtttttagagaaaatgaaggggttaggattggtctcaagtgtgattgataactttgacatgacgtacccgtggcattttgataaccggtgtaacgatggggttcactatggaagacctccggcgaagatgcggtggatagacggcgagattgggcatcagtactttgttgatctcatgcttgttcatgtcttgttaaatgcagtttgtctacgttag

SEQ ID NO: 176594 - DNA, 880 bp, Arabidopsis thaliana landsberg
atgtcagagaacaggcgtagaggaggaaggcgtgctcagcaggagcgagccgctccgcagagatgaggtgccccagcagcagcacctgccgcccccgcccccgatgtcgattgagcagatgtttctgatgcagactcaggcagttcaagccatcggtcagactctggccgccattcagcagcagcagcagcagcaacagcagcaagcaccaccccagcctcagatgcctcagatgcctagagacaagcgtgctgaattcatgagaggtcatcaccaacgttcgctcactcttctgaccccatggatgctgaagattggctgcgcactgtggagcgggagttgcataccgctcagtgcgatgacagggagaaagttctgtatggtcacccgtctgttgagaggagcagctcagtcttggtgggagtcttatctcgccacccatgccaaccccgacgccatcacctggggagaattcagagatagcttccatcagtatcatgttcctgcaggtctgatgacaatgaagaaagaggagttcctggcactcaagcaagggtcatcgtcagttagtgagtatcgagacaggtttctgcaactgtctcgctatgcttctgaagatgtcaacaccgacgccaagagacagtatcgtttcttgagaggcttggtcgaccctctgcagtatcagctgatgaatcataccttcccgacattccagcacctgattgacagagcaatcatgacagagaggaagcgtaaagagatggaggatcgcaagcgcaagatcagtggaccccagcctggaagcagcaatcgtcctcgtttctcaggcaatccacctcagcagtttaggcaggaccagcgtccacctcagcagcagtag

SEQ ID NO: 176595 - DNA, 873 bp, Arabidopsis thaliana landsberg
ttgcttcttgctgtgaagcaatgtcatgagaaggatatatgtcatggtaagctttaatagtctgagagggatgatcatcgtgatggtgcattaagttgattcgtttgaatttgcatccttttaggtgatatcaagtgcgagaacgtattgttgacttcctggaactggctttaccttgctgattttgcatccttcaaacctacatacattccttatgatgatccttcagacttctcgttcttctttgacacaaggggacaaagactttgttatctggctccagaggtactatagaaccattatcagaatttatttcttttgtttgatcgtcctagatctgtcaaattgttctattgcacttctgcagaggatattatccctttgtttgtggtgcaccaaatagaactctatccgtatcacttacaaagatgtggtggcaaagaaccatcaacaacaaagcacccttgctaattggtcatgtgtctgtttagtttttagtttattcaagtttaaacagtttgttgcttaattacagagattctatgagcatggaggtgagacacaagtagcacaagatgctccattaaagccctccatggatatatttgctgtggggtgagctcatataccatctctttttgtatcactctatatgttcaatgctcctaatggttcaagcacacataccttttcaaaatggaaaaacattttcaccttaagtattagagtttttatcatattgtaatagttttatcttaatgcttcaggtgtgtgatagccgaactttttcttgagggtcagccactatttgaactggcgcagcttctcgcttatcgtagagggcaacatgatcctagccaacaccttgaaaag

SEQ ID NO: 176596 - DNA, 114 bp, Arabidopsis thaliana landsberg
atggtaaaaacacctgatgatgagtctgagtctgagtgtgacactgaggaggaaaaacatgtgaatctgatcacatggtcttcccatactcttttagttattacagttatggag

SEQ ID NO: 176597 - DNA, 435 bp, Arabidopsis thaliana landsberg
atgactttatcaaatggagtgatcattgaagatattgaaaaaggaaagttagatggaaaatcagctgttaaagggaaaaaggtgagtatttttgacatcctatccacttcttcgacacgtgctatcttgatgctgtctcaattctcagcaccattaggttggaaatctttgaacgattgatgttttttccaggtcagtatactctatactgggaagttgaaagacaccgggaacttgtttgattcaaacttgggagaagatccactaagattccgcttaggtaaagatttcatagatatcgtagaatcctcattataattgctttttctcccatcctcaaacacattttgctttttgtttactttttatgattaattataatgctacttgcaggtggagaaaatgtcatagaaggtctcagcattggtgttgaag

SEQ ID NO: 176598 - DNA, 1805 bp, Arabidopsis thaliana landsberg
atgaagtttggtaaagaattgtcgtcacaaatggtacaagagtggcaacaagcttacgtaaactacgattatctcaaaacccttctcaaagaaatcatcaaactcaaagaaaaaaccaaccctcctccacctccacatcatgccgtccccggtgaaggaattagtcggaaaatgactctataccgagcatttagcggtcttgtccaaacgccgggaaagaaaagacaaagctctcgtcaatccaactattcttcggaaatagacatagaagaaggtaatctcaagtttcatatagttttttaacttaatactaaaatggtaatgagtgcattagtccatgtttttaatgtatttatgtaagtttgtttgcatttcctatgtgggattcctaataggtaaagctccaatacttgttagcaaatcgactcatggattagagacaacatttctaatgacggcagaggaaggaggagagtatgaattggtatttttccggcgactcgacgatgagtttaatagagttgaaaaattctataaagagaaagttgaagaagtaatgaaggatgcaattatgcttaataagcaaatggatgctcttattgcgtttagggttaaggtggagaatcctgttgggtggggatgggaggaacggacggtggagatgactcgtttggcctccgatatcgcgacttcgactgcggctatcgctgcttctacacccgccagaacccgaaccagtaagacaattaaagcagttaattctgtattttaacatacataactaaaacagttgcaacttgagattctccctaacactacatatttacaatttgaatagatcaaacttgactttaatttatgtgacaacaattagtctccgtcaatttatgaccgtttctaatgtttctttttaaatattttttcttcaaaaatcagtttttaaatcacatttaaattactaaccataagtactctctatggatgttcaagaaaacgatgtgttaagcagcgtctaaaatgtctaatttgatttaagcgattttagacgatttaagcgtttttaacataaatcttataaatataagatcatacataaaaatatctattagagaaataaaaatattaagtcttaaacaaaaattagatcaaagatttatttagtttataccaaccaatataaactaaatagagctatgtgtatggacataaaacttagttcgaaactgaaaaaattatattaaaacgaaattttaagcgagtttaagatgtcaagacggttgtttaggtgttgtttgagtgtttagcatttagtcggggtctatacagtttttattttttgtaatttggttttaattagagttcaaaagagtcattcttgtaaaatattgtttacataagtgatgtgatacggttcggaatgtattttccgtgccgaattattcgcttttatatttgcgcaatgaaaattaaagatgaaaaaaaatttgtgaactcatttttcacaatcgtagacggcttttaagtataaacttctttttcagtaaaaatgatatactaaaaagaaaaaattgatctcactaaaaaattccggtttataaaagctatcatcgtaaccggatcgccaatttgaaattgatgaatttatatatctcccgcgcgtttggttacagtgaatcctcgagctcaagctcacatggaagcaattcaagaaggaagcttcagcagagaaaacgaagacgaagatcacggctccgtccgcggagcaaccggcgacgtgaaaacgagcagcttgaacacgatgagag

SEQ ID NO: 176599 - DNA, 320 bp, Arabidopsis thaliana landsberg
gctccacaactacacacgggggttcataaaaaccgcttactctcactattgggtggcgttgaaactttagcactaccgagcccaaaggtacgttcattctcattatgggcatttcaattttcaatattttgatgaatacattcaaaaaattagataatataagaagatatatgagtttgaaaccatgtttatttttcttatgtacttttttccaaacaggtagtgaagaataagaaaagtagtgatgagaagtatattgttatgggatgggtgattctagccattggcgttgttgcttgtattagttttcgaaagctaag

SEQ ID NO: 176600 - DNA, 1450 bp, Arabidopsis thaliana landsberg
atggggccttcagtcatctgggagaagtaagtgattttgtactctcagaaataccacaagaattaacaaacactattgtttactctgcaacctagtagatgatattaccctttatgttacttcttgagtcttgacatgttttggctttcatagatacggactcttgggatgttgcgatctagatttgagtcaataccaattgccttcagccgcaccctcatgccatccgaagatgcaaaaagaaaacatgcggtactgtgctttttatagtttattgtccttccatatctcaaaaggtggatcacaccttcattccctgttctgtcatttattgattcccactgggaaatgtaggatgactatgtggaccagaaaaacatcactaatttctcccaggtgtggaacgagttcatttactctatgagaagcgaggataagattagtgacaggttagattcttttcttttagaaagcaatcttgtcatcattgtcctgttctgtttagcaagcatatatgtcatgtaacgtttcctttatatgctgtaactcagagatagggatttgctgcttgtaccatcttcgtcgggtgatgtgtctgtcatccagtggccacctttcttgcttgctagtaaggtaatgaataattggtgtttttggaggacttccttccattttagtagaaaataaagattcattgatcaaaatgctcgagttctcaagacttttgttaagatgcttaatttccaccaagggccaaaagttctgtcactggataatcatccccttaaaccagaatatgctgaatgaacatatgtgattgtttcaataagcatggttcctaatgatttttttcaacaatgtagattcctattgctgtggacatggcaaaagatttcaagggaaaagaggatgctgaactatttagaaagattaagagtgatagctacatgtattatgctgttattgagagttatgagacattgaagaaaataatttacgctcttctggaagatgaagcagatagaaggtataccagattcatgctcctcttccaatggtgaaatacttcgttctctataatattatgcatcttgagccttgtttcattgattcatttaatttttctcttttgaataagggtcatgaatcaggtatttttagaagtggacatgagcatgcagcaacagagattcatatatgaattccgcatgagtggattaccgctccttagtgataagctggagaagtttctaagtatattggtaatatcaaaatttgtagtccactcattaattacatgaggccttacacaggaactaatgcttgaaacctctttgtgtgaatagttaagtgactatgaagaccagggtacatacaagtctcagttaattaatgtcttccaggatgttatcgaaattatcactcaacctctcttggttaatgggcatga

SEQ ID NO: 176601 - DNA, 181 bp, Arabidopsis thaliana landsberg
gcttttagctatttcagatttgatcccatgcttgtcttctacaatgtctccaactactggaatcagcttgctcgtcatgaaggcttcgtaagagcttacatgcgcttgcttaagaagattgaacagatccgagcttatgatcggtgtgaaagacaaaaagaaagaagaatgaaaggaaaaa

SEQ ID NO: 176602 - DNA, 113 bp, Arabidopsis thaliana landsberg
ccatttggatctatttgaagaaaaatgaggccatgagggacaacctggacaatggacgtaccaacgggataaagtttcaaattcaaataatttgcgtcatattcaaaatgtga

SEQ ID NO: 176603 - DNA, 465 bp, Arabidopsis thaliana landsberg
ctacccgatgagattgttgaggatttcaggagacttaacctggggatagttgctcatactgaaggagttattattgatgtggaacctactttggagcaagaaattcgcaaaggtcaacttgacgatgctaaaataaaagagattaaggatctgattactgaaggtcgagttccggaatttacggaagatgagcaaggcaccgtatggttcaaggacaggatgtgtgttcctgatattgaaagccttcgagagtctattttaaagggagcacatgactcggattattcaattcatactaggagtacgaagatgtatcaggatttgaagcaaaaatactggtggtatgaattgaagagagatgtggctgcacatgtggctatgtgcgatgtgtgtcaaagagttaaagctgaacagcagaggccagctggactattgtacccattaaagatacccgaatggaagtga

SEQ ID NO: 176604 - DNA, 98 bp, Arabidopsis thaliana landsberg
ttcgagtacaggataagcagcgacgcagtcatccacgactctttcgagatagcgagggagtacaaagagatactggcgactttcactttgtaggatag

SEQ ID NO: 176605 - DNA, 374 bp, Arabidopsis thaliana landsberg
atggtttcttatgattttgataaggctcctgcattagttgccaatcatccaacttacaatgagcatagcgtgttttacgggccattcgaaggtcagtgttaactttcagtgagatctttctaaagtagattgagtgacatgcttcaccatgtggtttttgtttgcagatggattcttggaggaatttgtgaaacagagttttcttcctttgattctacctattaaccatgacacattgaagttgttgaaggacgatgagagaaagattgtcttgacgatcgtggaagatgaaacacacgaaagcttggagaaactatacaaagcattgagaccagccgctcatgcgaaccgcgacctcgttaatggaaaagtcg

SEQ ID NO: 176606 - DNA, 185 bp, Arabidopsis thaliana landsberg
cactgtgtctgaaatgtgttgattctagtagagagtttttcgtaaatccatatcgagtaaaaacactgaagtttaagacacttgagatatttgaacataagcggaatcgaatcttacgagaatcggagtttataatcgaatttttatcatttcaataccaacaattgctgcttatttcaagatga

SEQ ID NO: 176607 - DNA, 257 bp, Arabidopsis thaliana landsberg
aggaagttgaagaacaactaatcttactgcaagaaattgtccctgaatggatgtctgagaaaaaatcatcaagtggagatgttctagtatggtgagtctaatatctcacatatactcaactcactttttcttggttttatggatcgctcatgtaagcaactttaatatgcagcataaacaagttggcatctcctctaacaatccgatcacgtcttgaagaagaaaacaagcaagagatggctccactgctttcttga

SEQ ID NO: 176608 - DNA, 376 bp, Arabidopsis thaliana landsberg
atggcttcgcatggcggcagcgcgggtgccatcgacccgagcaccatcgacccatggcgcctggttcgcaccgatcacgacccggcccgcgccgcgcatcacgaaagcctgtttgccctggccaacggcacgctgggcgtgcgtggcggcctggaagaagtgcccagccccagccagggcagcttcctcaccggtgtgtgggaacgcacgccaatcgaatatcacgaacgctttcccggcttcgcccgccacaccgacacccgcttgccggtggtcgatggcacccgcatcggcctgcgcctgggcgaccagccggtcgatctggccgcggggaaatggcaggacttcaaacagtcgctggacctgcgcactggct

SEQ ID NO: 176609 - DNA, 159 bp, Arabidopsis thaliana landsberg
agtttaccggcccctggtgcaacacattgtccaaacacctctccacgaagaaccgtgaatcaacgcacgcttatacaagcctcggacttgtcggaccttgtctgtctaaaatggattgaccatcatattgcatatattgctggcgttgtctgcatgtga

SEQ ID NO: 176610 - DNA, 82 bp, Arabidopsis thaliana landsberg
ctgtactgttcctgagaagaaaaagcttgaagatgagaatagcattgattcttctctggatgcttctcaacgcctcaagctc

SEQ ID NO: 176611 - DNA, 428 bp, Arabidopsis thaliana landsberg
atggcaaagggaatccttttggccttggatcacttggggagactctgaacaaaagaagaaagacagagacttatgcgagctcttcatcaacggttgcaaagcttcaagagcagctgcagctcaagatgtctgaacaagcggagcaaaatgcaaaacgtgatgaggagcaccgccaatctcaatctcggatagccagcttggagaagctcgtcctcttcatgaaagaaaaagatcccgagttggctgtttatttgtcttcagattctacagaacctgaaccagtcacacttccaaccacaacacttccaaccgccacagccaaccaaccaaccaacacagaagcaggcacccaaggagacaacagattaggcaacacaccgttagcctctacttcagctactttgtctaacactgcttctaacaattaa

SEQ ID NO: 176612 - DNA, 438 bp, Arabidopsis thaliana landsberg
attgccctggaagaactcgctgagagagtgaatggtgacatacgattggccgtaaatcagctccaatatatgagcctgtccatgtcagtcatcaaatacgatgatatcaggcagcgcctgctaagcagtgcgaaggatgaagatatttcccctttcacagctgttgacaagtaatgtctgaagtcctttagtttagtttatcaatgcacatagtattgtttgccaaactttttgagttaagtcttatagctgctgttatagaagaaatttcttaccctggttttgtcgtaaaaagtttggttttaagcggtctggacatttcataatttaattataaatgattccaggttgtttggttacaatggtgggaagctgagaatggatgaacggattgacctaagcatgagtgatccggatttggttcccctacttatacag

SEQ ID NO: 176613 - DNA, 493 bp, Arabidopsis thaliana landsberg
atgagtacagcagtagacgacatcatcaatgcggccatcgccactctcggcgtcggcgagaccaacggcaacaacacgaattacattacgcagtggtatgggctcaacgacgcctggtgcgacatgacagtcacctactgggcgtaccactcgggcaacgcgggtccggtatgcttcaacaagtaccatgactacacggttgagcacgcccaggcgttccagtcgcggggccagtggcacaccgacacggcaggaattcagcgcggcgacatcgtctttttcgattgggatggttctaattccatctcagcgatagaccatgtgggcatagttgagagcgtgtcgggttccaacgtgaacacgatcgagggaaacatcgacaacgtctgcaagcggatggttcgccactccgacttcatcgttggctatggccgcccggcgtaccccgccgactcgacttccacccctgcgcctactcccataccgaccgccg

SEQ ID NO: 176614 - DNA, 1018 bp, Arabidopsis thaliana landsberg
atgcagtggagaaatttggctgaagaagcaaagtcagagctagcgagacttagagttgagaaagaagaggagactcttgcattggagagagaacgcacatcgattgaaacagaaatggaggctcttgcaaggatacgaaatgagcttgaggaacaacttcaaagccttgcgagtaacaaggcagagatgtcatatgagaaagagaggtttgatagacttcaaaagcaagtggaggatgagaaccaagagatactccggttacaaaatgagcttgaagttgaaaggaacgctttatccattgccaggtatagaatatagtatcttgtaagttcttctttctttcccaagcaagatcaaatgagcatgaatagatcttacacagtgagatagaggcaaaacatttcttaattacattgattagtgaaactcaaaaacttttatattgaaaaatgtgacaaatcaaacatatgagagtttagctcttcagattatttactgttttgagttttgtttttgaaggaattgggctaaggatgaagcgagaagagcaagagaacaagcaaaagtgctagaagaagctagaggacgttgggagaagtatggcctaaaagtgattgttgacagcgaactccatgaacagacaacaaaaaccgaatctacttggctgaacgcaggaaagcaaaatcatgtagaaggaaccatgaaaagagctggaaatctgattgctaagctgaagaagatggcgaaagatgtaggagagaaatccagagaagtaatttacttgatcatagagaagataagccttctgatatcagccttaaaacaacaagttcatggcatggagaacaaagccaaagacctcaaaatcaaaactaagtctaaagcagaggaagtgtggagacaaacgagcttgagggctgatgagatcagaaatatctctatagtgaaggctaaggagactgtggaagagtttaaggacagagtcggtaaactcggcgagaaattcaagtcgaagtag

SEQ ID NO: 176615 - DNA, 108 bp, Arabidopsis thaliana landsberg
gtttctaacatgagaaatccggattcgtgtcggaggaaaacagaaacgatcgaacaaacgtcggcaacttctcagtttatttacaggactgctaagttcacatattaa

SEQ ID NO: 176616 - DNA, 463 bp, Arabidopsis thaliana landsberg
cgtgatccggctggccgacggcgcgggcgcgcgccacgcgtgcgtgagccgggcgtacaccgatgaatcgtccgaagggctggccgtcagtccggacggcggcctggtggccaccgtgaacatgcgcggcacgccgtttccgccggacagcccgcgcttcgcgcgcacggccacggtgtcgctgctgaccctggaccgtgcgagcggcgcgctgttgaaagtggcggactacgcgttcgagggcgtgctgcccgaaggcgccagcttcgatgcgtcgggcaatttcctgctggtggcggtgttccagtaccacgcggacgggccggccgggggcggcctggaagtcttccgcgtagtgcgcgaaggcgggccggccctgcgccacgtgggccgcctgcccatgccgcacggcgcgcatcacgtcgccgtggcgcgacgggcgcccgcgccgcaggaaaagtag

SEQ ID NO: 176617 - DNA, 630 bp, Arabidopsis thaliana landsberg
gttttgttagctatgactcacaagccgcggcgcagaacgctattgacatgatgaatggtcgccatttaggcggtaagaaattgaaagtccagcttaagagagacagcaacaatggccaaccgagtagtaatccttccttaatctcctgaaagtgctaaaactcctctcttcaacttgaaagttcataacagaaaaaaacaaaaaacatattcgggcttatgggtcgacccggttcaaagatttggaccgatcttgaatggatgcatctgtatagatccaaatctcattgtgggtcaaaatgtcccatcaactcaaaagctccaaactggatcatctcttttctttttttttttaatctgcaaataacaatttgtaatttatgtttattattgaaactcatgtagaaattttatgatttattaacattaaattcattgaattcttcttctatcattttttaatgatctgttgttgtctttagagtttagaagaaagattcagtgttgttcaaaaataaaagagaaatatcagattatctttgctacaaaaccaaacatcacaacaaacagaaacagacagacacacaaacatggagagggacgacaacaacaacaagaacagtcaacatag

SEQ ID NO: 176618 - DNA, 126 bp, Arabidopsis thaliana landsberg
aaaatttctggattttgtctgcgaatcacgaatattccagcgtttcttcgtcccgcattggcgtaggatttttgtcgtgtttccgggattcgaagaacagtttaaagagtgaagaagagtcgagag

SEQ ID NO: 176619 - DNA, 1089 bp, Arabidopsis thaliana landsberg
atggttgcttctgagcttcgtccggatcatggtgtcaatcgtactgttagtatacttgcggggactagcttcttcttattgatttttttatacagatatcttgagagatgcattttggaaggaaggtgcttaactagttggattgttttgctttcttggacagatcattgagaagctttctcctaccagtccatctggagcggcaaggctcaagatgttaaaggaaattgcgcaggagtacagtttgaattgggattcttctgccacggaagcagagttcatgaagagccatgaagacctactggtaccatctctgaacccagtttttcaaattttgtgggaaagttagtcggtaacaaccacattcttcggtctcctaattcagatgtgaactttgatagaagttagttatgtcacgaggtaaaaatgtggtttccctaaatggaaagagcatgacaatgaattggaaatttgagaactacttgtaggaaagtggtgcctaacatttctatatgcgtccacggattcttacgttttcttgtaggtattcaatagagcaaaaggaacgatatatatatatacccaaatgacgagttttgttcaatatagcttctgatcttctgtagatttgaatgattttgcaaatgttttgtaaaccttttatatgaaatgagtccgtttataaagttgatagtttgatttcaatgtcatatgtagggtggagctaagcaaatacatcgtcaagatggtatctctgaatctcgaccgtcccaacaaggctacggtcagtcttcggtttctagggaagttgaaagtctgcctgcagaggccacacagagattccaaaagcttcaagctcaaaacccagtgagcaaaagcatgccatcatctaagctgacttcagcttctcaagctcctcctgatactagacggaatcagactgatgtaatggagatagctcgagctgccctagctagcgctgatcgtgcaacagcagctgctcgtgctgctgcgcaactagtgaatgtctcttatggggctactacacccacagtagcagcagaagggaagcccttaaacttaatgtag

SEQ ID NO: 176620 - DNA, 577 bp, Arabidopsis thaliana landsberg
caagaaaacagataaatgcactgaaaagttagagaggagtttagatttagatgaaatcagagtaaaggataaagatgccattggtttttcaaaggtagtggagaagcatgggagagattttaataaagaagtatatcagcttcctgtcaagaatcttgaacttttgtttcaagataagaacattaatggaggtattcaagagcgatgtgcttcatttgatcaaaataacattactctaggaagcagtaggatctctgaatctgctttcgtcggtaataaaggatgtgaaaatcttgatattgcaaataatgctcaggcagataaaggtttgataggcaagatgtatccagaacccgaaggaaagaaagttttactgtgtgaggaaaatcgtggtgtaagatctgtttctatgataagcaacatgaggaaaccagttggttctagtgaatccgaagaaagtcatactccttcaagctctcatcgtaattacgatggcttgagtctcagcacttggcttccctcagaagtttgcagtgtatacaataagaaaggaatatctaaactctatccttggcag

SEQ ID NO: 176621 - DNA, 756 bp, Arabidopsis thaliana landsberg
atggggggggatgggaatagtcgattcggctgtatatctgatggcagtgtaagttatattttccatttagagttcaatggaagaaaaagttcaggatttagagaggagttgggctgttatacaagaaagagcactgaagcagccttctccaggtacttttttttgtcatcaattctgattagttagtaaattactattttatcaccattcagaaccatcacgtcttcaatatatatgaaacaaaaaaaaaattgttttacatagcttattttcagtaagaattcaatagagatctgttttttggttccgttagataggttgatagcgtgaaaaatttcattcacattatctgactggaaaggtttttctttcacagctcagagagagaagacactggataaacaacttcatagcctaatcgagcaattagctgcaaagcaggtccatcacaacccaaattaatctacacttttccctttagactgtttcttaacagaaactttgatatgcttatcaggcacaagcagaggggattgttggtgagattcatctaaatgagatggagttagagagactaaacaatttatggagaagatatgaaagctttaacgttgaagggaacgctgcgaggaacagattcaagagaacaaattcagatagagaatttacatcagaccacgaagttgatggtcattcctaccttccatattcatctgctacaccaaatgggacccaaacaaggcttatgtatcaaag

SEQ ID NO: 176622 - DNA, 351 bp, Arabidopsis thaliana landsberg
atccttgtagtcggcgaggagaaactaaatgagcctaacgatggaataactcagatccaaataccagatgatattcttattcctgatggagacaaccctatagaatcgatcattaaagcagtttatgatacaacctttgctcaagagaaatctcctacgtttttccaagacagagctattttgtgtccctccaatgacgatgttaactcaattaacccaacatatgctttccaagctaacaggttagtgaatgtccttttttcattactcaaaagcatatatatacatataactttatctgctgttacggataagtgtatatgatattgaactattatttttttcaggtga

SEQ ID NO: 176623 - DNA, 235 bp, Arabidopsis thaliana landsberg
atgattgcctatgaaggctgtgtacggttatgtcttcattcatggtcaacggatagtgtcagcgaggcttcttacttcctcaacaatgaatgcaccataatgcggaatgcatttagtttgcagaggtttttccttcattctgaagaagagttactgggaaagggaccttctgagttggttactgagacgtctgttccaaaatcgaagaagactattggaaaaattaaactccaag

SEQ ID NO: 176624 - DNA, 128 bp, Arabidopsis thaliana landsberg
aatctcggaggcaaagtgagatcctgaaagcgttcgcttcacatctgaaaggcgaccgaggcgctcgccttaggcgcaaggcgatagcagagggtctttacgcctttcggtcgcctttcgcgttttaa

SEQ ID NO: 176625 - DNA, 94 bp, Arabidopsis thaliana landsberg
caattggtttgatacacgctttcgtctccggcccccttctgtttgtatgttttctgagactctgctgagtcatcgtgccaattccacgacagca

SEQ ID NO: 176626 - DNA, 491 bp, Arabidopsis thaliana landsberg
atgtggtcttcgagaactctcaagtatattttcaggctaagacctgaaccaatttcttcctcatcgtcttctgcgtattcgctctctcgcatcaccggaggttctccaattccgtcgcagcagcaacgatcgattacctccacggcgccgcttaatggatggatggattcgatcaaaggtgtttttaccgggaacaaggatactcctttagaagaatcaaatctacccgttgaagctttcactcttctccgtaagtcttacatggatacgtgtgattgactgtaatggtggatagatcgatatactcatcaaagctattctctttggattgaaaattgaatttaggatttgctgatgaattgaagaatgctagacggttagggaaattcaagcagtacattgtgggacgaagcagcgaggccacttttgctgatgcatttgagaaacaagaagctgttattagatatcttggagctcttgatgctacatga

SEQ ID NO: 176627 - DNA, 273 bp, Arabidopsis thaliana landsberg
atgagactaacacccgcattattgctgctctgcctcaccctgctgccggcccttggccaggccgcaggcaagaccgtgtacggtctcaacgaatatgcacgcctgggcgacctggacctggaagtggccgccaagctcgacaccggcgccaagaccgcctcgctcagtgcccgcgacatcaagcgtttcaagcgcaacggtgaaagctgggtgcgcttctacctggccatcgacgccgcccattcgcaccctatcgaacgcccgctggcacga

SEQ ID NO: 176628 - DNA, 257 bp, Arabidopsis thaliana landsberg
agaattccagtctggtggagatggctctactggatttgccccatcgcatggacgctcaacgggctggtcacttcacagtttggagatgtatccgagacgttcagtgacggtggggtgcgtatagctgacttcgttgaagactactttgggtaccatcacgacttgctgtgggtggtcgctgtggtggtggtcgcgtttcctgtgctctttgccttgctctttggtctctcgctcaagatattcaacttccagctgag

SEQ ID NO: 176629 - DNA, 246 bp, Arabidopsis thaliana landsberg
cgctgggcggcggggaacgagccgctcgaccgcttcatcgccacgctgacggagaaccgctgggcggagtccggcgagctggcgcgcatcgacgaggagatcgcgcgggagatcgaggcggcggtggaggaggcggaagcatctccgatgcccgagccgatggaggcgctcgagggggtctacgcgggtgctcgcgccgccgttccgtggacgcgcctcgacccgcccgacccgcaccgagcctga

SEQ ID NO: 176630 - DNA, 280 bp, Arabidopsis thaliana landsberg
atggacgggttccacaccacaccggaacagctcacggcggcgggcaactcgatcgactcgacgatcaacggcggcgacgtcgccttggcgcccacgcttgcttccggctaggcctacggccacgccggcatggccgccgcggtgtcggcgttcgcgtcggcgctgcgcatcgccgtgccggtgctgacctcggaggccaagaactgtgccgaggggctccgggcgagcgcccgggactacgcgcggaccgagcagcggaacgcgggcgagctggccgccg

SEQ ID NO: 176631 - DNA, 463 bp, Arabidopsis thaliana landsberg
atgtctcaagtcaacggcctccccgccactagagacgaagctatcgttctcacccctcagacactctttaacgtcaatacgtcgaatgtcactaagctcacatcgaccaactatttgatgtggagtattcagatccatgccttgcttgatggttatgatctagcaggttatcttgataactctgttgtcatcccaccagaaacaaccaccatcaacagtgttgtctctgccaatccggcgtttactctcaggaaacgacaagacaagttgatcttcagtgctttgatcggagccatctctcctgccgtgcaatctttggtgtcacgagccactaactcgtctcagatctggtccactctcaacaacacctatgccaagccaagttacggccacatcaagcagctccggcaacaaatccagcgtctcacgaagggaaccaaaaccattgacgaatatgtgcaaa

SEQ ID NO: 176632 - DNA, 154 bp, Arabidopsis thaliana landsberg
atgtatggcttggacagatcggaagaggaagacttgattccattggtttttgcggtggcggaagtagagaaggaagtggttgtggacgttttggcagcaggtgagaatgttcggcggagcaaagcagcaaagaagagaagctgctcggagaaag

SEQ ID NO: 176633 - DNA, 106 bp, Arabidopsis thaliana landsberg
gcaaggcgatgatgtcgtcgtgacaaattccgacaacgtgttcgtcaccatcctgaaggacggtagtaacaacggctggtttaagggggcgagtccgctcggatga

SEQ ID NO: 176634 - DNA, 614 bp, Arabidopsis thaliana landsberg
caatttgcgaggatttccaacgacgactcgcaacttcctcgcaaacttgtaacctacagctttgcgaggaatttactacggatccacgcaagtccctctcaaatttgctagggatttactagggacctcgcaaccacctcgcaactttgtctgaaaaacctaatcgaatctttgtgtaaccccacaactttgtgagggatttactacaaagactcgcaagtccctcgcaaaattgaagcgatttcattcgttgtttagtcggttcctcgcaaagccctagcaaagttgcgagggatttgcgaggctatttaagtttataaatacaatgcgaacgagtttcagcgaagctcaaacccagctgtctctcatccgaaccctaatttctttcttcttcgcttattctctctcgatctgacgactgccgaagctggtcgccgccggctcgaacttcttcagcgattccttgccgtcgtgtcttcatcttcttcgccgccgtctggagcttctcatccacgcctgttcttcgtcgccgtgtgtcaggagcttcttcagcgacgcctgttcatcctctccgccgtgtctacctcttcttcgccgtcgtctggaacccaaag

SEQ ID NO: 176635 - DNA, 165 bp, Arabidopsis thaliana landsberg
ttcttttggtgatacaagtacactttgagaatacaaaagcagctcgacatgcaccagttgtttcgtggtcaccacctgagccgcctaaggatgattttgtgtggtaccacaagatcaaccgcttcaaaaacatagaacaagatgcatttcgaccaaccccaccag

SEQ ID NO: 176636 - DNA, 299 bp, Arabidopsis thaliana landsberg
acgcctctccggcgattgtctcccgtcgctactataatgattacctcaccgaatcgctcgtggaatatgaaaaagagcatttggaggaaaccaattcggaattccgcagcctgatgaacgaaatccgcgagggcgtactgctgtcccagattatggaagaacaggtttggcagcgctcgctttcggactccaccgggcagcgtagtttttatgagcagaacaaggcgcgctacaactatccggaacgcgcattcgcgaccatcgtaacggcgaaagacacgcaaacgttgacagcgtga

SEQ ID NO: 176637 - DNA, 141 bp, Arabidopsis thaliana landsberg
atgcggcaccctcatccgacacatgctgaggatgccgaaggtatgaacaaaaactatctgtggaaggccgtgtctggagcagaacgccgatcatacgaaaggtttaagtgcaacgcagttgtccacctcgtttatcgccgc

SEQ ID NO: 176638 - DNA, 717 bp, Arabidopsis thaliana landsberg
atggaccggtacgtgaaatatcatgtcaaagagttcgagaagactttcaaggtcaagttcccttcttgttctgtagcagcaaataaacacattgatcagagcacaacaattcttgacgtgcaaggcgtggtacgtatttaataaattcatttctttatgatctctttcagttcaaaagtgggtaaattcaaaactgtgcgtgttttctgagtgattagggtcttaagaacttcagcaaatctgcaagagagcttcttcaaaggctttgcaagattgacaatgaaaattaccctgaggtatatatgtagctaattagaataaatatgttttcttataagcgcgtaagttgttgattaccggtttatcttgtagactttgaaccggatgtttatcatcaatgctggttctggattccggctcttgtggagcacagttaagtcgtttattgatcccaagaccacagcaaagattcatgttcttgggaacaaatatcatagcaaattgctcgaggtcatcgatgctaggtaacatcatgctactataaaattgttgactatatatgttcttttttgttgtcgaaactcgaacattcattagatgttttgtattgtaaacagtgaattgcctgagttctttggaggtgcttgcacttgtgaagacaaaggaggttgtatgcgctctgacaaaggtccatggaatgatcctgaagttctcaag

SEQ ID NO: 176639 - DNA, 431 bp, Arabidopsis thaliana landsberg
atgactaccctgctagtctcccatcgcctccacgccgaacgtggtgccgacatcgcagcccatgcgcagcgtcttggcatggtgctggaacccgtggtgctgcccgccgatcccgaaggccggctgtctgatgccgattgcgctcggctcgacctggcatttttttccaacgacatcttcccgatgcattcgcgccagtttttttcaacggtgcgcaaagcgcccggattgagctggttgcatgtgttcaacgccggtgttgatcatccgatttacaccgaaatgctccagcgcggcgtacgcctgacgacttccgcgggatcgactgccgtacccatcgcgcagaccgcgatcaccgggctgctgatgctggcacgcaatttcccgcgctggctcactgcgcaacacgaacggcgctggcatccgatgcg

SEQ ID NO: 176640 - DNA, 43 bp, Arabidopsis thaliana landsberg
atgaataatgcaccacaaagccagtctattcgccaaagcgaag

SEQ ID NO: 176641 - DNA, 906 bp, Arabidopsis thaliana landsberg
atgagctttacagcaagggttgtggttatcacttggtacttcattgttcttgtgctgactcagagttatactgccagtttgtcatcgcttctcacaacacaacagctcaatccaactgaaacgagcatcaagaacgtgcttgcaaaaggaggacctgtggcatatcagagagattcattcgtactggggaaactgagagaatcgggcttccctgagtccagactcgtgccatttacctctccagagaaatgtgaagaacttctgaacaagggaccatcaaagggtggtgtttctgcagccttcatggaagtaccatacgtgagagtttttcttggacaatattgcaagaaatataaaatggtggaggtgccatttgatgttgacgggtttggctttgtaagttccatcacttctctttggcttgcatacaatccttccttttaatgatgcatataactagtttcgattctgtaggtcttcccaattggatcgcctctagtagccgatgtatcaagggccattttgaaagtggcagagtctaacaaagcaactcaacttgaaactgcgtggttcaagaacatagacaaaacttgtcctgatccaatgaacaaccctgacccaaacccaacagtctccttccgaaagctcagcctcgatagtttcttgcttctatttgttgctgcagccactgtctgtacccttgccttgttgaagtttgtgatctgtttcttgattcagaatcggattattttgaatgacgaattctaccgtggcaaacgaatgaaggagatgtggttaaagttcatggaaagtgatggtgaatcatacattagccgtgtgagatcaacatgtcctcaggtgttaatacaacccagggaagaggacattgatcccattaacggctaa

SEQ ID NO: 176642 - DNA, 410 bp, Arabidopsis thaliana landsberg
ttatgtcaaaccctcaaagttcctattcagttcgaaatgttcttgagaaggacaaattgaatagatcaaaccctcctgaacacttggaagatctggagaagaagaaaacattcaagatttcttcttcgggtatctatgttatagaagtaaatgttactacttctggttctactccttgggtattggataccggttgtggtgctcacatttgtgtaaatgtgcatggcctgaacaacagtagaactttggaggaaggacaagtggacctacgtgtggctaatggagcaaaagtctctgcattggccgtaggaacatattcgttgtctttgccttcatgcatgggtttggagttgaagaactgctactatgttcctgcaataacaagaatatcatctccgtttcatgtttga

SEQ ID NO: 176643 - DNA, 133 bp, Arabidopsis thaliana landsberg
gtgccgcggcggctgtattccaaatccccgaacaactccacgcaaatccgaagggagcgccaacaaactcaaccgtgaatgccgccagctacgggatcctttcggaatccgcacgctccctgtttgctcgccc

SEQ ID NO: 176644 - DNA, 588 bp, Arabidopsis thaliana landsberg
cgtgtctttgccaaatttgtcggaacatcatcgaaggtggttaattaactgctgtctgaagatctatgaatcctcgtactgtgccgtacgtgtcttttgccgctgaaactcgggacttcccctcttatggttaaaactttaaaaaaaacaggtacagtttttctcattactacataactcgtttcaataagcgtgcaatttatagcaactgaatttgaggttttaagaaaaatagacaagcacacaaactgttcgatgaaatgtgtcttagaaagtttctcctctttcacccttgtgtctcgtctctcttcctagttgtttcgtttccgtgtgattacatcttgttttattgaacacagaaaccttgaatttgtagcaaacgaagagttgatagctttgaggatgtcgttttgctatccatcttcacaaagaaaactggcaatgacggtggcattttttgcctcaggggctgctcttttcgccattggaatccatttttcgtatctcaacgttgctcctcagcaagctcgtactaaagcccgtaatgattttgtcaaagaacgcctcaggcagaaacaaggcaagtga

SEQ ID NO: 176645 - DNA, 156 bp, Arabidopsis thaliana landsberg
tgtcgcctgaacacagaagtgactcttcctcctgaatctttgatgacacttccttatagatttcctcgactttctatcgatgaaactccatcaagttcctgtgtgttcatcgtagaggaggagaaagctggagtctttctcatgcatgcacactga

SEQ ID NO: 176646 - DNA, 157 bp, Arabidopsis thaliana landsberg
caacaaccacaaccagtatcagctcaacccgaaccagtcagtgctactgcctctgctcctgctgaaacacaagagcaaagcactcaagcaagccaagaaaaagaagaggaagaagaaactacacaagcagatgaagaggaaacggaatactaaataa

SEQ ID NO: 176647 - DNA, 474 bp, Arabidopsis thaliana landsberg
ttgcggctgctgtacgaggtgttggacaccgtgctggccgaggacgggtccgtcctggtcttcacgcagtatgtggcgatgggccggctgatcgagcaccacctgaccgcccgcggcgtgccgagcctcttcctgcacggcggcaccccggtcgcgcgccgccagcggatggtcgacgccttccaggccggcgagcggcggatcttcctgctgtccctcaaggcggcgggcacgggcctgaacctgaccagggcgggccatgtcatccactacgaccgctggtggaacccggccgtcgaggaccaggccaccgaccgcgcgtaccggatcggccagacccggcacgtccaggtgcaccggctcgtcgcggagggcaccgtggaggaccgggtggccgagatgctgcggcacaagcgggagttggcggaaaccgtaactgggctcgggggaggcggcgctgagcgaactgagtga

SEQ ID NO: 176648 - DNA, 321 bp, Arabidopsis thaliana landsberg
atgttggctggctctactacgtacatcaaggagctccagaatcgtctatacttgctgtaccatatcttcatccaaggacaaggacgtttcacacgtgaaaacgcattgcgtttgtgggattgcttgtacgagcacgctctcaactttggtgaggccgaagaggccgctgaatggttcaaggcagctgctgcacctggatctgcggcaattcccccgtctctcgccgatcagctcttccaggcacgattcactcaattagactgggtcaatgtcactcctggcctctatacctgcttcgagcgctactttatccattcaaac

SEQ ID NO: 176649 - DNA, 221 bp, Arabidopsis thaliana landsberg
ctaatcaaaatttatctcttgaagctaatgagtggattggttataaaggaatacaagtagagaaaaatgtggtgatgtgtttattagagaactctccacagctaaagacaatggtcattagatccttgaaattgaacaatgatactgagaaactcaagatgttgcaagagttgtcgtctatgcagaggacttcaaccaaatgtcggctttcgtttacctaa

SEQ ID NO: 176650 - DNA, 97 bp, Arabidopsis thaliana landsberg
atggagccgcaacgaagaacaacaaatttggattcacttagaaactccggtcgaaatatctgttattacaatagagtgggaaactccggctccggcg

SEQ ID NO: 176651 - DNA, 598 bp, Arabidopsis thaliana landsberg
atggatattgaggtaattttaaatagttttttttttttcagtttagttcgtgcaatgttgcgttttactgtaaaatctattgggttattggttgtcaacaaaaaagaagaagacatattgttatcgttaagttgaaaatcttgtttaatgacctttacttagggtgatgatcaattggacttggatgtggaagcttattcacgaaactacgaaggacgaaacctagtgctgaggctacttcatatcgcagagaattctgttggcacgatgttcactgacgatttggaacttgaagcccttcgacttgcctatgatcttatccggaatgacggaattgtctgtgacatgcgtttgttcacagttatagctgaaaaaatacaaggcagattaggagaaggttatctcttggatgaaaaatggcgtcttactaagaacaacaatttcgtcaaacaagacagcattctaagaaacgacttagaaagtgctacggtaaggaaaagtgactataaaactttgcttgcgcaacaagattccatattgtacatctaatcttctattcttttgcaggacgaactcgaaaaagaccgtcttgcacttc

SEQ ID NO: 176652 - DNA, 701 bp, Arabidopsis thaliana landsberg
gagaaaatctcacttttggtactgacaacttcatcgaaatggaaaaaagaggtgtcgtcgaagctaggaatgctgcttttgttctggttgctggtggtcttggcgagcgtcttggttacaatggaatcaaggtacatagtgaacaatgtttcatttacttaatcacttacccgtagatagaatagatagacctacaaacagatttgacccagtaatgaatctatttcttaggtggcacttccaagggagacaactacagggacatgcttcttgcagcattacattgaatctatattggctcttcaagaagctagcaacaagatcgattctggtatgtttctaattttttaaatcaacgtaagtgaataagtactttttcacattcctcagtgattgtatatttctgcagatggaagtgagagagacattcctttcattattatgacatctgatgatactcattcacgtacactggacctgttagagttaaactcttattttggaatgaaacctactcaagtacatcttctaaaacaggtaaaggatcatctattgagtttcctagacagattttatgaaaacgtaaaatgttttgagaaataatgcactattggctaccttttttctaggaaaaagttgcatgtcttgatgataacgatgccagacttgcattagaccctcacaacaaatacagtatccag

SEQ ID NO: 176653 - DNA, 485 bp, Arabidopsis thaliana landsberg
gaagcagtggtgcgcatcgacatcagcggattcatggagcgtcacagcgtggcactccgttcggcgcgccgcctggctacgtgggttatgaagagggcggcacgctctcgaaagccgtgcgccgtcgtccatactccgtgatcctgcttgatgcagtcgagaaggcacacccggatgtcttcaacgtgctgctgcaagtgctggacgacggtcgcctgtccgacggcctagggcgcagtgtggactttcgcaacaccgtgctgatgataacctcctacctcggctcaccagtcatccaggaaatgttggtcatcagcgccacacgaggcgtctacgcagcgatcaaggaatcggtaatgggcatcgtcggcagccacttccgcccagagttcatcaaccgcatcgacgtagccgtggtgttccatacgcttggcagcaagcagatccgcagcatcgcctcgatccaggtgcagcgcgtcgtctag

SEQ ID NO: 176654 - DNA, 75 bp, Arabidopsis thaliana landsberg
atgaaaggctgggaaattatcctctctttggacaacgccgtgtattatgaacttaagcccgatgtcggtgttaag

SEQ ID NO: 176655 - DNA, 179 bp, Arabidopsis thaliana landsberg
gtgtcgtagtacgagagtggaacagaagtacggcagtgctacgcgaccggtcattatttattcgtgcacaaacagaagcgtttctgatctcagtgcccccactcgctctattctcgatgcatgtcatgaagacatcatcacgccttgtctccattcgctcatcctcatcaccggcataa

SEQ ID NO: 176656 - DNA, 318 bp, Arabidopsis thaliana landsberg
tttgaagagctagaagctatcgtagatgattttgttacaccgccatctagtccaacttcttcggtgaagaacagtcctagagaagaaacacagagctcatcaaacccatcctcctcatggtttcaatggatcaaaacaccaagccaacgtccatcaacaagctcgagctctggagggtttaatatcggtaaagccgaaaacgatcaagacccatttgcaattccaagaggatacaattggatcacagctgaagagaagaaaaagaaggtccaagagaagaataaagctaagaagggcaagtcatctcagaacagctga

SEQ ID NO: 176657 - DNA, 658 bp, Arabidopsis thaliana landsberg
atgcatagggctcgttaccgtgcagtcgcagaagtaatcaacggaaaagatttatgtcatcggaggttgctagaagcggtacgacgattggatcgaagtgttcgatgtagtgactggaatttggagtactgtccctgatcgatcccatttcatgtctagtttgccaggaggagggtttgtgacatctgtggtgatgcaaaacaagatttacattttggatgctacgtgtggtttggtttatgatcccattgatggtacatgggagtcaggggagcttggaactacgttgaagtcttactggtacaagccgtgttgtgtgattgaggatttgttgtatagttttgatccatactgtcttcaaggttctccgataaatgtgtatgatccaaatgtcatggtttggactcctatgatgggtacgggtatacgtgcttttcctgatctcgattactttgagtgtaaaatggcgaattttggtggaaagttgatggtttttggtgctacttataacaacccggttacagatacttggtgcatagagatggcgttgataaaaggtgaaacaggtccgattttggggatgatcaattcaatggtgcctgtgctcagatccgtgtactcgccttacattgatctttgtcgctctgttacattttga

SEQ ID NO: 176658 - DNA, 65 bp, Arabidopsis thaliana landsberg
atggcgtttgcgttcgatgtagctgaaacgtctaggcggaccgggcctagtctgaagggcccgag

SEQ ID NO: 176659 - DNA, 201 bp, Arabidopsis thaliana landsberg
atcacaacacggagaataaattttattgttgacatcagagaagaccaacatttggatgacaagtcagacggttcaaaatcaagagacgaagaaagagatcgaagttggctgatgtcttctcttcatcagatttatagccgacggttaagttcatcattaatgttgtctctagctcactatttcctccgcattatcatgtaa

SEQ ID NO: 176660 - DNA, 427 bp, Arabidopsis thaliana landsberg
gacagtcaagagacttggaataccagatgagaggatcattcttatgctggctgatgatatggcctgtaatgctagaaatgaatatcctgctcaagttttcaacaatgaaaaccacaaacttaacctctatggagataacgttgaggtaaatttctggttaaaggatacttctccaagggtttagtacaatgagttgtttatgtactattgaaggttctgtcttgagtagactaggtgtattagaagcatctgcatcttagcacagaatcattatctatgttgggcggcttcttttctctgtgttttccatacaattaaatttttttgacagtgattgctcccagcccatataaaaagatatcttttccagtagaaaggctgattgtatgaaatcattttctttcaggtagattatcgtgcatatgag

SEQ ID NO: 176661 - DNA, 57 bp, Arabidopsis thaliana landsberg
actctagatggccacgaggcccacgactggatcggcaagggagtagaggcatattga

SEQ ID NO: 176662 - DNA, 75 bp, Arabidopsis thaliana landsberg
atgacaagaatccatggccgctgggagagattgaatcaagattatattcaagaacctatgagtgtttccttctgg

SEQ ID NO: 176663 - DNA, 700 bp, Arabidopsis thaliana landsberg
gtgatcagaacacatacacatccgtacacgacccggattatgaccttaacgaagccacacttggagagagtacaagttgccttagagccatatactgaaaacgtaagacatggcttcgaaaagttggttaactggacaaaatctttgggaggacaaaagtaatatctattttcttgtttggtttttacggctgccagcaattgccgggtggtttctttcccatttttttttagtaattgtgatgggagacgctctctttaatcatttttcgtattttttttttcttattttggatggtgatggtgttaccagattcaaaatcagaagattcataccaccgatgtcttcatccagtgtcatgttgattcgtttgaatcgtactatattcataaatataaagtttgttttcggtggtctcactcaccagcgccatatatgattctcaaccgacggattttctcctaacggtttggctagaagtcatttggatatttgatccgtgaatcaataaccaaatatgaatttgacctctgagataacttctcatttctagttttctaatttcatccctacgctaaatgcaccaattgtcccttatttcgtgaagcacgcgacacatgctttggctaagccacataacctacacttggtagcatttgagatatcaaactttggttttcaaaagttcgacatcttgtga

SEQ ID NO: 176664 - DNA, 35 bp, Arabidopsis thaliana landsberg
atgaaggagagaaatattattgctgctgacataat

SEQ ID NO: 176665 - DNA, 113 bp, Arabidopsis thaliana landsberg
cgcggccacacgggcccaacaatagcaacgtcacatggtggttgccattgtcacgtcgagctctccctctccaccaactaacagttcctgacggtggagcagaaattcattaa

SEQ ID NO: 176666 - DNA, 62 bp, Arabidopsis thaliana landsberg
atgtatgataaaccaattaaagttgaaaaagttatattcttatttagctttgccgtcaaaag

SEQ ID NO: 176667 - DNA, 148 bp, Arabidopsis thaliana landsberg
atggctatcttcgagagactcattcgtacaaccactacttcaactactaactcagattcctcttcaagtcggggccttccgggtatggattctcgggtcgggtttaacggtgctgctactaaactcggttatcaatctcccaaggcaa

SEQ ID NO: 176668 - DNA, 297 bp, Arabidopsis thaliana landsberg
atgaatacgcgtaccaggaaagcgcttacagaggtaaaatacgaggtacaggacctgaaactgagccgtaataagcaaaccttttacctgcttaccaatgaagaacatcccggcaaacaaaactggtaccggatgaaaacagatggcagcaaaaaagaaaagatcacatccatgcccggtggttatgaagtgagcatgtcgccggatgaaaaatggatcgcttaccggtattcctatatcaacaaaccctgggaattatacatacaggaaaatgtgccgggcaaaaaaccggtacag

SEQ ID NO: 176669 - DNA, 341 bp, Arabidopsis thaliana landsberg
atggaagaccgacgccttgtccatggagctgcgccgccgttgacagccgtggagagattcttatacggtcaaaagaatgatgccttgtgttccaagaaacaagagagttctagagaccaaccgatcgtgaagacaaaaatatcgattgagactagaagcgacaacaaagagaacacaacgtttgggccgacgagggagaaacacttggtccttaatggcggcaacagaaaccctactggagaagtggtcgctagaagtgcagccagagattatcaaaacagtacgaagaaacgatcatccaagaacctcatcaaagggcaatggacggcggaagaagacag

SEQ ID NO: 176670 - DNA, 59 bp, Arabidopsis thaliana landsberg
atgaagattgttggaggagaagaagataaagagataaagatagagatgatgagaagcaa

SEQ ID NO: 176671 - DNA, 267 bp, Arabidopsis thaliana landsberg
caacccatcagatacaatttccagacgcagcagaatctcaatttccctcatccacaatttggcggcggcgctaatgtagaacttattcgaattgataaggccgtaaacaatacgcgtaaatcattaattgctgctggagacaacgtatcttcgactagagtttcgcaatcggttttagcacaacttcaggctgacacttggcgttccttggggatatggatgcaagatgttccttcgcttcgccaactcatggcccttgaaggcaag

SEQ ID NO: 176672 - DNA, 124 bp, Arabidopsis thaliana landsberg
atgaataatccaaatcttcctcatggatttgtacaccgaggagttcatcatcccgacattaatgctgctatctctcaattcggtctagggtttggacatgacctaagtgcaatgcatgcgcaag

SEQ ID NO: 176673 - DNA, 294 bp, Arabidopsis thaliana landsberg
atgcagttgcgtatggaccgcgaattacgcgcgaccggcaacgcggtaatgcgcaaggatggccagcaggttactggtgacgatatccgctatgatgtgcagaatgatgaattgcaggtagaaggtcacgccgtcatcaccactggccaggctaccatacgcgggcctatgttacgtatgcgcatgagcgagaacattggcgaaatgcgggatgtgaccattgaattcaaaagcgcgccaccgccgccaagcaatcaggacagcagcggcttgctgaatgaaaatgccatcctg

SEQ ID NO: 176674 - DNA, 81 bp, Arabidopsis thaliana landsberg
atgaacccaaaacttgaagacccaaaggcagattaccggcaagcaatacaacttccgaagcaatctccgaaaaatcatgag

SEQ ID NO: 176675 - DNA, 198 bp, Arabidopsis thaliana landsberg
atggcttggaacctggcgataataactttggttggcaaagatggtacaaagttggaggcaactcttcgacgggaaaacagaggattgatgtgtctcggaaatggctggaaagatttatctatatccaacggcttgaagagtggcaagtcgttcacgctggagctaattttggagaatggaactcctatgctcagtttg

SEQ ID NO: 176676 - DNA, 279 bp, Arabidopsis thaliana landsberg
gaactctcgccggagaaatttcccggcgttacgacgcatctctcgttcacgatggacttggccactctttctgctatattcgaccagatctccccggagtagtattaccttcgccggagtctcctctccgatcagatcatatccaagaaaccactttccgttcaatctccggcgcatcggtcagcgcaaatccttcaacggcgctctccggagctctgtcatcggattctgattgtccgtacagctccgcagtctccgcctccgcattcgagagctccg

SEQ ID NO: 176677 - DNA, 187 bp, Arabidopsis thaliana landsberg
gtgttcggacgagaagaatccgagggctaagccatacaagtttactacccaaaagataaaagacttaggcttggaatttaaacccatcaagcaatctctttacgaatctgtcaagagcttgcaagagaaaggtcatcttcctctacctcaagattcgaaccaaaacgaagtcatcatcgaaccttag

SEQ ID NO: 176678 - DNA, 529 bp, Arabidopsis thaliana landsberg
ggtttgttgttgctgcttccattgcagcagttactgttaagcggctcaacgttaaaccctccaaaccaagcaaaccatcaggtactactgtttttacttatacaagcaccaactgtatttaacaccatacatagcatctgactttgttttgttttctgcatttcgctcttaagataatggcgaaggaggcgataaagaacagtctgtggatcccgactacaatctcaatgacaagaatgtaagtgtactttggaaagttttgttctttcagagacatgtttttgacaacttggataatattttcagctgcaagaggaggaagaggaagaagaagaagaggtgaaactaatcaacagtgtaatcaatcagactcgtggaagtttctcggactacttagatgatgatatattacccgagtttgaagatcttttatctggtgagattgagtatccattgcctgatgatgacaataacttggagaaagctgagaaagagaggaaatatgaagtcgagatggcttataacgatg

SEQ ID NO: 176679 - DNA, 537 bp, Arabidopsis thaliana landsberg
agaacacaaaccccaagagacgtgccgtggaacagagaaagagtaagggtgggttcaagacagcaaaggttgtactttttccactcaccgagagagagacaccggagtgggttttccaggtgatgagatacatgaatgctgatgcagaaaacccgaggctgatatttgagaggactctgttcaagagtgatgtcaactcaaacctgagcctgtctcttaatccctttccagaagttaatcagaaacgacttcttgacgcctgctgagtgtagagccatagagaaagacgaagacaacgaagacgaagaaaatattggtgtgggaacggttcttgtgaaccaaagatttcaaaagtggggtttgcgtttcaagatatgggcgatggagaaggacactggacatggaacattgaattacactttgaattggggttggaatgatgtcgtcaaaagtagcagcttaaaagtcggcgacaagatcagcctttggactttcaggtgccgtggagtcctctgctttgcacttgacacagagtag

SEQ ID NO: 176680 - DNA, 262 bp, Arabidopsis thaliana landsberg
atgggactgggcattgacccatctgtcgctattacggcactgattgtggtcattctggtggttccaatggattgccaaagacctcaactggtgaacatcggtgctgtttttgcttttgattcggttatcggaagagctgcaaaagtagctctagaggcagctgtttccgatgtgaacaatgataaaagctttctcaaagaaacggagctacggctattaatggaggattctgcctgcaatgtctttcgtgggtcctttggag

SEQ ID NO: 176681 - DNA, 70 bp, Arabidopsis thaliana landsberg
atggtgatcgaatcaattatcgtagaatcgattggtatagttgaattccagtcggagactcagagacaca

SEQ ID NO: 176682 - DNA, 214 bp, Arabidopsis thaliana landsberg
atgtcttctatgaatgcgaatgctgagaattctgagagcaaaccaaaaagcggtaacgaccctttggatcatcaaggaggagattcatctgctgcttcggaagatccgaacaaatccaaaacagtaagttctgatgatgatttgagtgagactaacaaggagaaagaggaagaagattgtgaagagtgttggcttagtcggtatttgaaaaaag

SEQ ID NO: 176683 - DNA, 499 bp, Arabidopsis thaliana landsberg
atgcccgggttcgctccggtgtccgcccgggtcttcttcatgttcccccacaccgagcacgtggaggtgctcacgctcctcgagcggacgtaacaaccgcggaacaccggcgacacgagcctccgcgacgctggtgccgtgccggcactcacccctggtcgtgacgaccccacgacgtggcgcgaccacgtcgtggtctgcggcctgcacgacgagggaatgcgcgtggtcgagcagctgcacgctgccggggtcgccgtcgtggtggtcgacgacgtccctgaccaacgtctggtcggggacctggaagcgctcggtgtcccggtggtcgccgccgactcacgccgcacggccacgctgcaggcggcgggtctcgcgcgggccactgcgctcgtgtgcgcggagagcgacgacctgcacaccctcgccaccgcgctcgcggccaaggaggtcggcgcgggccggatcgtggtccagctgcgcaaccccgcagtcgggc

SEQ ID NO: 176684 - DNA, 518 bp, Arabidopsis thaliana landsberg
ttgacaacggcaagcagtttgatagtcaagatttcaaggatttttgtttttccatcggcaccaagcttgccttcgcatcagtctatcatccgcagtccaacggggtcgtggagcgtgccaatgggaaaatcttcacagctgtcaagaaaatgctcctcgatgaaaaaaaaggcagatggaccgacttgttaccggaagcagtctgggcgctaaacacaaccgagtgcagggcgaccgggttcactcccttccgccttctatacggatcggaagcaatgaccccgcaagaaataaagcatgggtctccgcgcacagctccgtcagccgcccctgacgtggatgagccaacctccaaagacctcattgacggagaccgggtcttcgccctgcaggccttaaacaaataccaagcccagaccaaagcatggcgcgaccgcgagtcattccaagggagttcacgcgggggactcgtactcatccgaacagctcggacggagtcaagggcaagttggagctaa

SEQ ID NO: 176685 - DNA, 473 bp, Arabidopsis thaliana landsberg
cgcccccacattgagcttgggggctgggagcacgccgtgaatccggtcccgcgccgccgtaccctgttctgcggacgaccaatcgaacgtgccctggagcgaagacccgtcagccagaaatacgcccagcgccgcccggtgcagcggaaacgccgctgtcggagccaggcgcgcctggcccgtcatggtgatgccctggccctgtcccgacaacgagacatcgagccggtcggcatcgccctcgcccgtaatggttacttgcgccgaacatgtcgcagcgcgggcgtcgccgacaggctccgcatcgccagattttgcatcgccaggttccgcatcaacaggttttgcatcgacaggttttttaccggcggccctggccgtggaagcacccgcacggctgcctgcggctacgtcttgcggcaacgccgcgacgtattggcgcacgcacaagggcgaatccttgccgtggccct

SEQ ID NO: 176686 - DNA, 76 bp, Arabidopsis thaliana landsberg
agtcagaaagaaacaagaagaaggcgtcactgaaaaaatctattttctaaaacgacaaatatttgcattgcgataa

SEQ ID NO: 176687 - DNA, 42 bp, Arabidopsis thaliana landsberg
atgcctcgcgaggtgctgttactgctttgtctttcagtacag

SEQ ID NO: 176688 - DNA, 165 bp, Arabidopsis thaliana landsberg
tcaaccacccaagtggaaccaatgcagatagaagaagtggaaggagaggcagaatcagggaatgaaaatcccaacccggaaggtccaaaggagacagtgatggaggagacaatcaggatgactcgtgggaggtcgaggaagacgcgttcggaagaaagccgttga

SEQ ID NO: 176689 - DNA, 372 bp, Arabidopsis thaliana landsberg
gcaggcggcttcaccaaggtgcgcaagcacctgtcgaccggccggatcacccgcggcggtaccggcctgacatacacggtgtgccacgggttcttcggttccggggccgcgtggaacgcgtggtggcggaacttcgcggcgctgccgttcacgaccgtgctgagcatcggcttcgagccctacgacgcggacaaccccgccttccgacagctgctgcagcaccgcgcagcggagctggacgacctcgcgacgccggggacggcctcgcccctgaacccctatccggtgcccgcggacccggcgtcgcgggcggcggccccgggttaccaccgtgccctcgcggactaccgcgggcgctgcttcaccgtgcgg

SEQ ID NO: 176690 - DNA, 286 bp, Arabidopsis thaliana landsberg
atgttgcgcgaggaacgcagccccatcgagcgagaaccaggcttcgatgccctgctgctcgacttgtttggcgacagtctccagcagttcgagtgtctttggatgcggctcgccggactccttgtgcacgaacaacggcatcggcacgccccagttgcgctggcgcgagacgcaccagtccggacggttcttgatcatggcttccagacgcgcacggccccagctcgggaagaactgggtgtcatcgaccgccttattggcatgttcgcgcagcgtgacgcctgcg

SEQ ID NO: 176691 - DNA, 190 bp, Arabidopsis thaliana landsberg
ttcccagaaacgaatcgaagaacaagtgtgtgattacttcttctttctcatggaaacttatagtccttctctctcctcactccatcgaatcgaatcgatcatggggaagaaccggttcgaatctgacttaattcgacattataaccggagagggcgaaaaaccaatgtggaaaaatataaaccgaactaa

SEQ ID NO: 176692 - DNA, 174 bp, Arabidopsis thaliana landsberg
atgaccagagaacgacagaagagacaacaggcgatcacaaagccgcgccacaaaggagcggatccacaaacgcgagaggcaaaagaagcctgcacagacagatcaatcacagagaccactgaaagcaggcccaaaaacagagaaatcagccaaactgagcaaccaaggaaccag

SEQ ID NO: 176693 - DNA, 218 bp, Arabidopsis thaliana landsberg
caacaatagcttcactacttcatcatggtcaaatttgacaccaagaagtgaaggagagctcttaccatctccaacactaaaggcctttacattcaacgagctaaaaaccgctactagaaacttcaagccaaatagtatgatcggtgaaggcggttttggttgtgtctataagggttggatcggtgaacgctcgttgtcaccttcgaaaccagggtccg

SEQ ID NO: 176694 - DNA, 784 bp, Arabidopsis thaliana landsberg
atgacggatccggagaccaggtatacgatgatggaaaatgttgcactacaagaatattgaactttaatagcattagttgatagcatttaatgtgtttttgctatggttgattttctataacgtttccaaaataacaaacgctatatttgttttgcttgggaaaagttgtgcttgtttattaatatttttttgtccatttaacaaatattaaaccaaaacgttatcgtagagttaatgcgaaaaattgtgcgcttaaaaattggcctcctacatttgcgcttaaaaataggtctcctacatttaacacctaaacacttaatctcagatctgagataatttttcccattcctttcttctttcattcttcctctcagactcttctttttccaatctctccttctttatccatccaaatactctcggatctgaactcgaacaagtatctcaatcatccctaaaccctcaacccttcatctcccttttcaagtgatgcctcaagttcatcttgtgactcgatccgacccgacccgagtcttcttctcctcaccatcagtctactcactcattcctcttcacgctttcgtttctctaaggttctctctcacccctctttactatctcttattttcctcgccggtaggacagataatcataattcaatatatcaccctttgaatcttaactctcagattcaaaaatattgagtcgtattgaagatgagatcagagacgagaagaatcctcgcccgctttttgaagatgatatcgctctcctcaagacatat

SEQ ID NO: 176695 - DNA, 3 bp, Arabidopsis thaliana landsberg
atg

SEQ ID NO: 176696 - DNA, 189 bp, Arabidopsis thaliana landsberg
attggatcaaccttcataaatatgcttgtcaaaaaggttgatgatatcatgtcacacatgaaggagataaatgtttcagatgcatctcgggtttctggtcaagctcccaaaggagattactcgttggaatttatacaggttatctctgctgttctggctcttgaccaaaacgtccagcaagatgttctg

SEQ ID NO: 176697 - DNA, 160 bp, Arabidopsis thaliana landsberg
gttttcaatgaagattaaagatggtgaacgtgagggacctattagagagattactgtgtatgactatttcaagcaaacctacacagagcctatttcttctgcgtactttccatgccttgatgttggcaagccagatcgccccaactatcttccactggag

SEQ ID NO: 176698 - DNA, 828 bp, Arabidopsis thaliana landsberg
atggcggtatttcctatcggttctcactctgcaccgccgcatcagttgacgaagagacacgtcatcgcgacttcatcacctatctccatctccacccgattgccgcaaaatgtttccttttcgaaagtatctggagttacaggctcgacgaggttatccaaacatggtgttctcgtgagggccgaggataagataaggagctcttcttctccttcttctctcgatgaaccaatcgatgaggttcgagtttccacgatgttgtcttagtacaaaattcgattttgatgattacccattttcgcttttgatccaatcttagctaattactcatgaacaagtcacatattttctaattggataagtttcattcatatagtgacctgaagaagaacactaaaatgggtgtagtaatcgatggtcattgctacagaaatgaaagtttatatctttctgtgatccacaggatttgatggactcatcaggattatgtgacccgttatgctcggttgatgaacctagttcaagttactttgaggcgaattatcagccaaagacagatataatcaaagctcttgctattcttgcagcagctcttacaggaacagctgccattaaccattcctgggtcgctgctaatcaggtgtgattctttgtttttatgttctttggtttcaactcaaaatgcagaattttgattaacaattatctatggacaatgttatgttacaggatgttgctatggcattgttgtttggaataggatacgctggcatcatctttgaagagtctttagcttttaataaaagtggaataggacttttgatggct

SEQ ID NO: 176699 - DNA, 470 bp, Arabidopsis thaliana landsberg
atggaaaggtaaatacacctatctttcagtttagaaagtttatggaagatattaggggcggggttagtccaaactgaaacatgaacttaatgacgtgctagatagttccccttattattacagtctttctccaaaagtactgcacccacactgctgtaacaacatccttttgctttagatcaggcttgaagttgttactactaattggagagcaaaaagttcttcttcatagaaacccaagaaaatcagatttgaatatacaacatagatctcacgggtcacggcacatggctgattccaaaatggacagagttaagagagagaatataaatgccattgatatgctgatgctttgttctcttgtaggtgcccaagcttcttgcccataggatgtttccaaatgctcgctattctttatggattgacggaaaactagaacttgtcggccatccatatcaaattcttgaaag

SEQ ID NO: 176700 - DNA, 424 bp, Arabidopsis thaliana landsberg
atggcgcgaagctccctggccgcggcagagggtgtcccacggcggagcaggagtttccggtgagcaattgccggcagacacacggcgctcacacactaccgtaaggtcctacaggttctaggggggtaaagggagtcagctggaggggcacttacccaaggtcggcgcgttggtggagctgcccgcgtcgcgcagcgaccgcacggcggaactccaaccccggcgagaaatctcgccctcccaggtcactcagtcgcccgggcacgccttctgctatcctcctggtgccacgtgatggccacgaatcccgcccaggtgtaggaccacccgcgcgacgtccgagcgaatcaagcaacgacggcggcgcttctcccaaccctctgactttggagcttgcacggcagcggtggtcttcggttcctaa

SEQ ID NO: 176701 - DNA, 510 bp, Arabidopsis thaliana landsberg
tgggaaaatcaatgatattgtgaaaatatttaaagaccctcgttgtccggtatccataagtattgcagcttttgcaaagaaggtaacttttatatctggtctgtttaagatttacttgttcatctattgttgaatgttgaaaatgactcaaactgttgtgctcggatctaattggtgaagaactctttgatacgttcatatattggcctaccctctggactctatgattaggaaactgtgaaccgatgacattaacgttttgctgattctttcagatggtcaccactaaggaaaaaccaaacccttttgcatgcagctatgtcattgtttacatcaactcacaggtacaaaattacttttgatttgtacagtgcatttttgttcttgttactgttattgaatataatctaccatttatgcctacagtttccccaagttatggatattcttctcgcggaattccacaaagcttgcatttacactgtcccaaagcatattgtaaactcacag

SEQ ID NO: 176702 - DNA, 104 bp, Arabidopsis thaliana landsberg
atgatacagggaccaatcattgatgaaaaaactcttatgcagaaataccagtttcataacaagaggaaagaaaagatgattgagcaagtgaaacacatgcttgg

SEQ ID NO: 176703 - DNA, 662 bp, Arabidopsis thaliana landsberg
atgagctctagagaatttgtggataccattacgagggatcttttaggtagtcgtgtgtttgtattcacacctaaaggagaggtaaggactactatacctcaaagcctctttaaccatcatctaacatttttatgtttttgattaaatgctttggtgttctatttgcagataaagaacctcccgaaaggggccaccgttgttgactacgcttatctgattcacaccgaaatcggaaacaagatggtagcagcaaaggtattttccctagttatgtcgttctttccatgataactttgattctcgatttgttatctttgaaatagagacaacaattggaccagactttaatgatacttaatggcttgaaactgcaggtcaatggtaatcttgtttccccaactcacgttcttgagaatgctgaggtcgtggagatagtcacctacaacgtttgtacctttttcccttgcttttgttttaaatttctcccttttcttcttgtcctgcttaggaaaattttgattgccttcatcatgttccacgggctctcatgttttattattattgtcacatcacaggccctctcaagtaaatctgctttccaaagacataaacagtggttgcaacatgccaaaacaaggagtgcaagacacaagaatatgagg

SEQ ID NO: 176704 - DNA, 491 bp, Arabidopsis thaliana landsberg
taacaagaaaaccggcaaggttggagccatcgagaagggtcacaagattgactggactgtcgagcagcctattctcgttactcgcctcggaagtcacacccccgaactctgtgagtgattcccttgaaccagacgacatcgttgtattaaagatcacgtattattattcgatactaacatatttctcttttgtagctttccgactctttgaggccaagtctggcaaggaggttggctacttgaacactcaatacggccctgtcgctgcctcgttcggtcgcagcaagaacatcgataccaacactaacaagcccgccatcagaaccttcaactggctccagggtactgtctatgctagcatcaatgccaccgtcccaacagctgtacctgccggtgaatacaaggtcattgttgctgctcagcgcaagctcagcagaggcaaattccctgctgactctgagggttacgaagtcgctgatgttgcattttaa

SEQ ID NO: 176705 - DNA, 168 bp, Arabidopsis thaliana landsberg
attttgtacgagaaaacgttacaagctgctggtccaattactctaggagaagttaaagagttaacttctaagcgtaaaattatcgaagaatctgtaaacaaaaccagcaaagtcattgattcaactacaagagagatgaccagaggactaacttctgcttgtgagcag

SEQ ID NO: 176706 - DNA, 190 bp, Arabidopsis thaliana landsberg
aattttgagaattgcatctcatggtttagaagatagtgtattaaaaatgaggaaagaacttctgaatctctacatctcactttttctcctcctcggcgccaccatagccatgcttctcgtccttggtgcatccgacccatgtcttctcggtcgtatgcagccattgcccaacatatatttggatccttga

SEQ ID NO: 176707 - DNA, 375 bp, Arabidopsis thaliana landsberg
atggatagggagataccagctttgatgggtgtgtcaaaagctattttagaaaacgtcatatttgtgcatcaggatgagtctaactggccactgcaagatccttctactttgaaaaagaagtttgatgatattttctcagccaccaggtagtttctggctcaccaccaacatttctcttaaatcatcagttccttgctgtattttgttgtagaagaaaccgaatcccagaaaatgtaacatgtgtgtttaacatgaaacagatatacaaaggctctggaagttattaagaaacttcacaaggatcaagctcaggagataaaaactttcaagttaaaattggaaaatctgcagaccttgaaagacgcagcttataag

SEQ ID NO: 176708 - DNA, 48 bp, Arabidopsis thaliana landsberg
gacaaggacactagtgtagaacctcctcgtaggcgttgtcatcgaaag

SEQ ID NO: 176709 - DNA, 349 bp, Arabidopsis thaliana landsberg
atggtggtgaacggagagaagctagctatagcgagtattggggaccatagagtagtggtttgcaaagatggtgaggctcatcaaatcagagataggaaagcctcaacaaaacattggtcacaatttattttccctggttagttccttcaaacccgaatatcctcttaggttacttgtgtgacaagaaaatgaaatgagacttaaattctttaaatgtaatatctcagtttgtaatcaaggagaagaagaagatgaatcagatccaagaaattcagagcttgtagtgattacagaaaagattaattcagatacagaatttatcattatcggtagccccgggatttgggag

SEQ ID NO: 176710 - DNA, 231 bp, Arabidopsis thaliana landsberg
ctgttactgcgcatgacatctctagatcctactaccatggtttatcaagcaggacttaacaaagtcatcaataagcctaatagcgggaagttaatattcaggtatcttaatgaattttatcctactaccatggtgaaggagcagtcaatggcaagttttagtatctcaaattataaaactggaaaaatagaaagaaagaaagaaagaattaataatctgctcagacaataa

SEQ ID NO: 176711 - DNA, 630 bp, Arabidopsis thaliana landsberg
atggcggattccgaatctaaaatctatcacgaacgacaacgattacaattttgcctcttgcactgcctcaacaatctatttcaggtgattgatccaatttctatttcaatctcaaaatttcatcctccgaatcaccgatttgagagtttttgatagtgatctcgtttgatttaggacaaagacgcattcactaaagaaagcttgaactcaatcgcagagaagctcgagaccaatgatccaaacaaagaaacatggacacctctctctttcgtcctcaagcctcaccacaatacaatcactggtaactacgacgtaaacgtgatgattacagctcttgaaggaaaaggcaagagtgttgtttggcatgataagcgtattggagcttcttcgattgatcttgatgatgcagatactttaatgggtattgtgttgaatgttcctgttaagagatatggtggactttggagaagtaggcattgggttgttgttagaaaaatcaatggtgtttggtataatttggatagtgatctcgttgtgccgcagctgtttagagatgatgatgaagttagagggttcttgcatcaaaatctgagtttaggtggagaggttttgcttgtgaataatgcttaa

SEQ ID NO: 176712 - DNA, 98 bp, Arabidopsis thaliana landsberg
aagatgaagaagaagatgaagaagaagatgaagaagaagaagtagaagaagaagaagaaggagagagtgtcgatggagaagaagaagaaatagaatag

SEQ ID NO: 176713 - DNA, 115 bp, Arabidopsis thaliana landsberg
aaagaactattacgctcaggaccgtgttaataaacattggtctcagacacatgatactggaggtattaagaatgagctagaactcactactagagctcagagaaacaccggatga

SEQ ID NO: 176714 - DNA, 571 bp, Arabidopsis thaliana landsberg
atggaagcaaaggctgaagaagatggtaatgtggagtgacagtttgaacaaaggaggcattacgaataaatataaatgaaaaggtattgatattgcttattggaataggagagtgttgaaattgtagactgatatgtttcattctttcttctacttttactttcttttttagtaacattaagtggctaccatccaacaagtagagtcttaggatataatgactcaaaggagtctatgagagcaaaaagtttacagtaaccaattatgtcaatagatttgcagtgaataactacccttcgtcgtgtatctgtcttatgtgacttttgtgtgcaatgaaaaccagtggcctaaacattattactcctttttcatgactaaagaagcaacctttaattgttcattgttacattctattttctgtttgctttattgttttttttatattttcatgattacattgtcccaattattgggggcattggctaattcacctttgttattgtaatcgtagctcacaataccttggtcgctctagtggacaaatacacaggagaaacatttttcttctcat

SEQ ID NO: 176715 - DNA, 48 bp, Arabidopsis thaliana landsberg
aagttcattcgaagaaagaaagacacgcaagttgacgttgaggaatga

SEQ ID NO: 176716 - DNA, 1260 bp, Arabidopsis thaliana landsberg
atggcggcagcggttgccacaggtgttgcaccggcgacaatggttgatcaagttcccagtccgacggcgcagacttcggttcaggttccggtttcaatacctcttccatccccggtagtggtagccgatcaaacccacccgaactcgtcgctctatgccggtgatctggacccgaaagtgactgaagcgcatctatttgatttgttcaagcatgttgctaatgtcgtctcggtaagagtttgccgtgatcagaatcgtcgatctttgggatatgcctacatcaatttcagtaaccctagcgatggtaaatacaattctatatcgcttcaattgcaagttagggttcatgtcttgcaaaacaaaatatatatattatcatgaattgcattacaataagaaaaagtgttttgatttgatttttttcaatctcgattttttattagacatggttattaattatgatcagtatcatgttcctgtgcgaatcatcttcttatatgttatttgtcttgaaattaacatataatgaatattatatattgtagttacgttcatctctactataccatgattctgctacattgatatgtttcatttgaatatcaaagctacaacatttattttagtagttgatgcatcagtctcttattctatgatttttcttaattagttcaaaacgtgaaatttgtttgaaattgttctttcaataccaacctcattaattgtagaaacgataggtatttgtgcatttataaattccatagatgctggttttctaaaatgaattgagatcttatttgcctatatttatatatgttaagttaacttgatttacatttgcagcttaccgtgcaatggaggccttgaactacactcccctctttgataggcccattcggatcatgctctcgaaccgtgacccgagcacgcgactgagcggtaaaggaaacattttcatcaaaaaccttgacgcttcaatcgacaacaaggccttgttcgagacgttttcaagttttggaaccatcctctcatgcaaagttgcaatggacgtgactggccggtccaaggggtatggatttgtccagttcgagaaggaggaatcggctcaagccgcaattgacaagctaaacggaatgttaatgaacgacaagcaagtctttgtgggacacttcatcagacgtcaagagcgtgctcgtgatgaaaacacccctacaccgcgtttcactaacgtgtacgtcaagaatctccccaaggagattg

SEQ ID NO: 176717 - DNA, 153 bp, Arabidopsis thaliana landsberg
aggaaaattaccaatcgcccccttgctggaactgtcagaagagggaagacacccaaagaagatctaatgctggaaaaagagctcttaagcgatgaaaaacaatgcgcagaacatattatgcttgttgatttgggaaggaacgatgttggcaag

SEQ ID NO: 176718 - DNA, 327 bp, Arabidopsis thaliana landsberg
  unsure (1)..(327): unsure at all n locations
atggtctcgggcggcgcagggcttttgagctcgcttccccccgcggtgcgccgggcggtggcgattaaccccgatcccggaacgacgttcctggacgccgagcatgtggtgatcctgatgcaggagaaccgctctttcgaccacnnnnnnnnnnnnnnnnnnnnnnnnnnnnggtttaacgatcccggcgcgatccgtacgccggacggcaacctggcctggctgcagacggacgataagaaacgtacttacctgcccttccgcctggacatcaaagatacccgggctacctggatgagttcgctgccgcactcctgggcctcccag

SEQ ID NO: 176719 - DNA, 345 bp, Arabidopsis thaliana landsberg
atgggtggcgccggcttcctcctgcggatccttgggcgggcgatacatgcggcgcagcacggccacctcgaaactgttgatcaccagcatcgcctcgttccactccaggccgcgcagcagggtggcgaaagcgtcatggttgggtgccggcatgtttgccgcgtcatcggccggcagcggatcatgcccaacatcccgttcatccgcgtgcgacgccgcggcgggtgcaagatcgccggcgcggctcgccaagtgcatggattgttcggcctcgtccagccattgatgcaaacgcgcgcggacgtcgccatcgcgttgtgtgagcacacgaaagttcagctcgcg

SEQ ID NO: 176720 - DNA, 1305 bp, Arabidopsis thaliana landsberg
atggatgcgctgagatcatatgatccagatgtatgtgataatttgctgaagacggatccaaccacgtggtgcagagccttcttcagtacacactctagctgtgaggatgtaagcaataatctctctgagagtttcaacagaacgattagggaagcaaggaagctcccagtggtaaatatgcttgaggaagtcaggagaatctctatgaagcgtatttctaagttgtgtgacaagacagccaagtgtgaaacaaggtttccacccaaaataatgcagattcttgaaggcaaccgcaagtcatctaagtattgtcaagttctcaaaagtggagagaacaaatttgagatattagagggtagtggctactactcagtcgatctcttgactagaacatgtggttgtaggcagtgggagctgacaggcattccttgtcctcatgcaatatatgttatcacagagcacaaccgcgacccggaagagtaagactttaatctctttctcttctcttttaccaatctatgttattatgtgattgtgttttctgaattggagtttgcttgccatttagctatgtggataggctcttagaaacacaggtctggaaagctacatacaaggacaacatagaacctatgaatggagaaagattatggaagagaagaggcaagggacgaattgaagtccctgataagagagggaagcgagggagacctaagaagtttgcaaggattaaggagcctggagaatcatcaactaatccaacaaagcttacaagagaaggtaaaactgtgacatgtagcaattgtaagcaaattggtcacaataagggatcctgcaaaaatccaactgtgcaattagctcctccacgcaaaaggggtagaccaagaaagtgtgttgtaagtattcttaaccattacctatcttactatcatttgcaatattatagcattaataattctgggttttgtataggataatgatgatccatggagcatccacaatgcaccaagaagatggagggcagctcaaagccagtccacaccacctgttgctcaaagccaatccactccacctgttgctcagagtcaacccacacagaatccgcagcattcaagtgctccagctgctaatccaagtggtagaggccgagctcgtggacatcctcctggagttaaaaatggtcaaggcaagggtaaaggcaagggacgtggtaaagtcaccgatgaatctccgagacctcctgtgttttttatgtccccttggactgataaggtcttcgatgtttggagacctgagaggaaatag

SEQ ID NO: 176721 - DNA, 420 bp, Arabidopsis thaliana landsberg
agcaagatcaacaaacgccaggaactcgtcaacagcatcaacaggcaggtacgccagctggatgagaccatcttccttaatgaaagggatatctaccgcctgcggcgtgaactggatacgctgaaagtgaaatacgcccagagcattgtatttgcttacaagaacaggggcagctacgagtaccttaactttttattctccgccagcagcttcaatgatgccgttaagcgtgttacctatctgaaaagctatcgccgcaaccgggaaacacaggcggagactattgttaaatccgataagctgctgcaggaaaagatcacttcgctcagctccaataaaaaagaccgactggccactttgcaaacacagagcgagcaactgaaagtgctgcaggaagacaggcaggagcaggatgcggtg

SEQ ID NO: 176722 - DNA, 173 bp, Arabidopsis thaliana landsberg
aacgccggacagcatcaaaagcacaagaggggaaaggatccaaagctcaacaaccaaacagggcaaccacagagaacaccaataccaagacgaaacagatggcaagagcacaccaacaagcgaaaaagaacaacgacacggaaccagagatgcaaaactcgctgagaagctaa

SEQ ID NO: 176723 - DNA, 501 bp, Arabidopsis thaliana landsberg
gatagctcctccgcacaagagctggttcagtatttaacaggcataggtgtaacggtaatgaacccccaaatgaatggtacctgcccgacaacggcccggggtaagtttaatttttttggtcctaatgatttaggtattgatagcgggattgtgttgactagcggcaatgtaatatcaaatccggctgctggcgtttatggcattaatgggcctgcaagttcgtttgcagcaggcttttttccgtccccaatcggggacccgactttagattctcttttaagcgaaaatggctcaaattctactacagaagatgcttgtgtattggaatttgattttgtacctgccggagatacgattaagtttgattatgttttcggctcggaagaatatccggaatttgcttgctcgcaatttaatgatgtttttggcttttttatcaacggcccacgctttccggcagggattaataatattgctattgttcctggaacaactattcct

SEQ ID NO: 176724 - DNA, 1010 bp, Arabidopsis thaliana landsberg
atggtggtgattcacgaagtgtctcttactccacgcttcactcttccttctcgacctctcaacactggctttaatgccggcaattccaccctctctttcttcttcaaaaagcaccctctctctcgtacgcctctttctctttctcttaatttgctgtgctctgtgacgccattgttgtaactgactgtaataattgatgattagcgagttcattcgtctattggactagcttcatgaactgtactgtcttttctttcgctggggaatacctcttgattagatccatgtctgtagggaagatctttgctgggaaacaatctgcggagtttgattcttcgtcacaagctatctctgcttctgagaaagtcttagtacctgataatcttgatgatgatcccagaggtttttcacaggtggatatcttttgtcatctctgctctttaatcagtgagttatatacaatgcataggcaaattgttagaggttgaaccttatgtgcattacatgaaaatatataaaaaaacaataatctcttctttttgtagatatttgatctagaaagtcaaacaatggaatatactgaggcagtaagaacagaagaccaaacaatgaacgttgtcaaggagagaggggtgaaaccaagaatagttcccccaccgggtgatggcaagaaaatttatgagatagaccccatgttacgaacttacaacaatcatcttgattaccggtaagaatctttgtttcaagttgtttcgttattactatacctgcttgagacttattatgtaagcctctgagtcttatttattcaaggactattcttacaattgatgtacaagtttgtagcaaggcgagatgttgttttttacttttgattccggttatgtatcctgcatttttgttggctgcagttatggacagtataaaagattgcgtgaggaaatagacaagtatgagggtggtcttgaggcattctctcgtggctatgaaaagttaggattttcgcgcag

SEQ ID NO: 176725 - DNA, 664 bp, Arabidopsis thaliana landsberg
atcttcaggctaaagaaattgctgtttcataccgtaagaagattcctacatctcgcttttctgctttaggtcaacgttctacgatcaaggaagggaaaatctctaagagcagaagatcgatgatggctaagatttattcttacatttcagagtattttggtgtgttactgaagcacacagagcatatatccagaataaagtcaaatatatctatttcgttctatatgaagtatgaaccatatattaccacattagcctagcctataataaacaaaccagtagtatgatcttcagaataacttgtgtggaataatccctgttataatcttcacatatgtctacaaaagaaaagatcaaataacatatcactacaagaacacataccatgatctaagcgtttatgtatttttagacagagaagcaaaagaaaagagatttcactttcattagttcataaggataaaaagaaagatgcagggacaagcatgtgctattttcaatcataccttaaaagtccagaagaagctggggaagaatcctctctaaatgagtagcttcaatcttttccattccctcagcttcagcgattatagcagcgcgctgcacagcctctgccaatgccgataaaatccttaagatagcttatagatacaacatgacttaa

SEQ ID NO: 176726 - DNA, 941 bp, Arabidopsis thaliana landsberg
atgcaatcggattcgggtttgcctcccaagacgtattcgggtgtcaaattcgctctcgttggattcaatcccatccatggaaactcggtatgtcatctctctctcgctctctattttcaatcgtagattcagatttccgtaacggtttctgattttgcaataacagttacggtcgaagctagtgagtggtggtggtgttgatgttggccaattcactcagtcatgtactcacctcatcgtagataagcttctctatgtacgtctctctctctcttattatctgatttcgtctctcgttgaaaaaatcttactttttgttttcttcaacaaacataggatgatccgatttgcgttgctgctcgaaacagcgggaaggtagttgtcaccgggtcatgggttgatcacagcttcgacattggaatgcttgacaatgcaaattcggttagtcataaccaatattttaaaatggttttatatgtaatgttttgttgattgcttaattttggtattcacagatattgtataggcctcttagagatttgaatgggattccagggtccaaagccttagttgtgtgcttgactggctaccaaggtcatgatagagaagatattatggttggtgtgttttttgttttttgtcttcttcttgttgttgttgtgtttgggagttaaacttgtttcttccgttttatacagagaatggttgagttgatgggtgggcagttctccaagccgttggttgctaacagagtgacccatcttatatgctacaagtttgagggtgtggtgtctctactttggttcaactttcctttagcttagtgtttttcggggagtttacattctgtcgagtctttctttctgcgcaggagaaaagtatgagctagccaagcggattaagaggattaaacttgtgaaccaccgttggttagaggactg

SEQ ID NO: 176727 - DNA, 401 bp, Arabidopsis thaliana landsberg
atggtgagttctgacaaacgcactttctttgtggtgaaattttttagttaatggtggaagaggaccaagttatgcagattccggtggagcagaaaattgtacgccagaaatcaattgttgaggatcatgacgaagaatacagagcggctataatgaaagcagcttctctgaacatccccatgtctccatcgccgtcttatggaacattccatgatacagaagaaggagaaagctctgcaggatcaggcatggaaggatccccttccgggtggtccttcaaaggaatgagaagaaaatgggatcaattcatagattgccattttcctgtaaatgacaacagtgaacatatgatcttcaaaaatcaggaatctcaagctttgttgtgtggtcaagaaacatga

SEQ ID NO: 176728 - DNA, 1422 bp, Arabidopsis thaliana landsberg
gcgaataagttggaggagaatcacgcgtggttcgttggaactctgtcgatgttcaagccaccgagtgagaaatcaaaagaagctttgaattcggatctagtcaaaattaaggagcaccagttggtgataaagccccaattgaaagataaagcgcttcgaatcagctctcatctggttagcttcttttccactcttcaattttcaattgaactcgaaagaaaactttatcatctatttcaaaatagtcttcactcaagcatgtaggcttcatatatatgctgtattagtgaaaatgattatataagtagaatggatgtggatttctgaatttgttttctgaaaatgattatataagtagaatggatgtggagaaaaaaactgacatggttctgaattttttttctgaatttttgaaatcttggccagaatctagatgaaatccaatcatacatcctcgtggaaagatctatggagcaggaatatggaacaactgactcggtagctcaagaactaactcaagaattcattgacatggttagtagcttacgtgtctcagcttctttttggaattttcagtcttcattcttgcagataaatcaatgttttgttgtatgggtagaatcttgtgaaggtgatcatctatgagttagaattcacaagtttttttaaatatatttgtttcctgttttttggttagaagatttcttttgaatattccgattgttgttcatgatataaattcttagaaagaactcaagaaatactctttcagtatgctatcattctttttctgtaatttgttacttatgtattatggagcttttcgctatcatggccatatcaataacataaaaggaccagctttatctacttttgattctctatagtaagttctatagctcattatagtgtaagctctgtagctcctgtcctacgtatatatttgccaatgactttattatgtaagcagttttcaacccttttctcttcagctttcttgctaacacttttgctgtccttctattctaatgttattcttgaagatactgcttcagtattacatacagcgccagtgcctactaaagtgtacaaagcgtattctcatacatgcatgtaagtcgttattttgttgttccctattttcctagtctcttctagtttctgatgtcttaacaaatagttgctgttaatgaaaacaaaagcttattttccgatggtggggttacgcttctaaaattccacccacacttttgtccatttttgtctcgtttttcaactgattgaagaatttgttcagtatatgcgccaagagaggaaagttcaatcaaggaagaagctgtaaagctgatctcagatgggcttgaaagacgacaatcatccgttcttgaggaccttttgtcctcttgttttccaaagaatatg

SEQ ID NO: 176729 - DNA, 1008 bp, Arabidopsis thaliana landsberg
atggttaaacatcaccacttgtacgagttgtctccgatggttactggttggacgatttgtgtcatggttttgaggatttacaaaaaatttctcaacccgaacgctttcgaactacgtcttgttttggccgatgaatgggtaaacaattttcctcaatttgttttgcaatttgcagaatttttcgttttccagtgtatccctcacccctaaaatgttgttttcacagggcacccaaatagaagcaacaatcggtcctcgtttctctgccttctactttgacaggatcaaagagaatcaatggaaaacaataactacgtttctcgttcgacctaactgcgaagcaataaaaacaactcctcatcagtttcgcattctattcatggatcacaccattgtcacttcttccacaccaagagaaacaggtttactgaacaagttcactccatttgactacattgtggatgatgttgttggcaacgataccttggttggtaagtaaattcttttttataaactccattcacttttttcaaaacattacttttttaatagatatctccaacatatctcttatagatgttatcggggcactcgttaatgttgggattctgactaataccgcaagtaacgagaatgatatggccggattcaaattgccgttcacgatcatggataaaaagtacatttcttaaaacctcaatttacagtttttttcaaacatatcatgtttatacattattatagtaagtatataaccacatatttttacatattttcagcaaggatacattggtatgtgaggcttatggagaaattgcagtggacttggagaaaagatttcgagcatttcgcaagaacaatgttgttattgctcttgcttggtggaagattattagattttatccaggttgtaactggtttaagattgttagccatgcacctatattaaccatgtatccagaacctgatgttgaggaagttgaagaaatcaaaatggttgtcgactaa

SEQ ID NO: 176730 - DNA, 402 bp, Arabidopsis thaliana landsberg
tctgaaaatggtggaaaatggatcgcgaccgaagtcaatgtagaagatcatgtattcgtgccatacataggtccagaagatatatgtgaaggtggacaaagcttcgtcgatgattttatctcacgtctcacattgattcctcttgatagatcaagacctttgtgggacattcacatccttaatgtcaaaacctcatatgctgaagcagtaggtgtaataagatttacccatgcgttggccgatggaatgtccttcatttccctagttgttgcatgtacccataaaacatcaaatcctgacatgttgtctagtgctattccttcggtgaaacggcgaagcacggtgtcacacagccttaagaaacccggctggctcttatcggcaataaacaccattggttaa

SEQ ID NO: 176731 - DNA, 64 bp, Arabidopsis thaliana landsberg
acataagaaaattggaaccttcagaattgttatccgcaagtacgttcgttttgatggattctaa

SEQ ID NO: 176732 - DNA, 2402 bp, Arabidopsis thaliana landsberg
gaaaagttgaaagtggacttgaatagcacacaggaagtagaatccaaagtgttgcgttgtccattgagttttcagataaatgaaaatccgcagcaccaatgtgtcattcaaggtgatactggaaatttagttctggatgatgtaacttattgcacatctgagaagatttctactgaacaatgtcaagaattccagggtaacagtgcgctgccgccctcaggctgcaaaaataatgtacaagatggtagtaatatgtctgacgataatagagatgagaaaaggaagtcttgcctctcagtagaagaatactgtgctttaccaatgaaagattctatggattctacgatgcagggtcctccttgcgatgagttgacactgtttgacaactactcacagttgaaagtcagcaatccgggggaagaagatatgtgtactaccaatgattttagtggagattctgatacattggatgtacctggacaacctctaaatgaatgcctgcaccctggaaacgaagacgagattagtccttgcctttctgaagaaaaagatgcgttagttgtttatcattctactgaatatgtagcaaagcagcctgaggttttggattccttcactgcaaaatcatctttctttggggatttggcttcaataaagggtgatgcagacaatccatcttcttcagaaaatcagttaggtaatactgaatttgtttctgtacctttggagccttctgaagcactagattgtgttcaatcaccatgcaatcatcttgaggtaaatgcggtagcgaactctgttttgtgtgatcataacatggtgtgtgatggtcaatctgtattagaaacggagaagagaattgaaataagcgaaagcacagagaaaaactatgagactgatttcattggtccattttccgaatgcaaatactggtttagagaatctgaagagcaacatttgtcgaaccaattagtccttgaggtgaaagagggtggtcatgagatagatgtcttgatcagaaacgaagaagctgatgggcctgatatgcagatagaatgctttactggttcgtctgatgctgacaacatggaacaagtgaaattactaaggccttcctccgttgaagttacgatggagattaaacctctggaatcatctcatgaacccttctctgagaaatcaacttctgaaaagcagaagcaatacaattgttccagcagtgaaaatacatctgatgtaaatgatggttgtgtaatgaaacaggctgatcaacttggaacattagttggttgttctccagaaaaagatgcatctgttgcggttttctcttattcaaatgaggagcttggagataactctgagctggaagacatggatttggttacagactcagattgttcagatgaggagcctgaggataaattggagcggacagaggtggatgtggttactgatccagagctcattagtggccttgatgagttttctgtcaagggcgtccgtaatcaagaatatccggaagtagaagatatccaaactgcatcagacctttgtggaaaaactaaaactctactaagtgaatcagtcagttcctcggattctatatttggagttcctgagtgtctaaatgagggcacaaacttttccagaatctctgaaggcatgtcaaaagaggattcaaattctggacgtattgagcataactatgttgtaaaagctgaattccaggtagatgctgaaaaggatttcagtgcacaggttactggtcaagaactcgtccccaatgaaggagatgaagttaaagttgtaaagatctctcctgatcctgtatcatttgcgcccagagaggaagaactaggaactccaatacccatgaaggagactatctcaggcagagatgatatgcagattaacgagttcaatgtactcagcgatgacattttgacatcagaaagcaatgcatcagaaggcaatgacaagatgatactactgtaaataatctaatccagtctccactagtaaaccttttctattcctccagtgcagtttattttaagaatgagctaataagtcactgtttccaacagggatgctaaacttgagaagaaacctgatccaataattgtgaagcctccaaatgctgttccattttctgacgagtggttagctgcaattgaggctgctggggaggtatgtatatctcaaatatatgaatgaaaccatgatgttgaactgaagacccacttgctgttattgcatatgatatataagtatatctgcaatgcctcagcagaactcttctgttaaatatgcaggaaattttaacactgaaaagtggacgtgtgcaacattcaccaaccgagaaatctgctcctgaaccaggtccatggtctccggtataa

SEQ ID NO: 176733 - DNA, 576 bp, Arabidopsis thaliana landsberg
agagcgttcccaacccctcatgcccttggcggtcacggaaccacccacaaggaggaccgagaattggagaggcaacagatcgagtcaaggctttctaacaaagacaagtctaacttgctctttggtgggtcttcacaagatgttttatcaaatgataatcaccttggactctctcttggtccattgaagtccatagaaggtagcagcagcagcaacaacgttaacccattgcttaatgttggagtccctagaggaaccacagatatgaacatgaacaactatagctcacatgctttatcaactgatgatattaatcttgatcttactcttggtccatctaagtccataggagatagcaacaatatcattaataacaacactaactcatccttcgatgggaatctgatcattcccgttcgtcctcgtgtgtctagataccattttgttgctgggaacccccttgattcaatctctagaaacattcctccttctattacttttcctcatctaaacatcaatctttctcatgattcgttttctttacaagagaatggttcgggctctagtcactcataa

SEQ ID NO: 176734 - DNA, 52 bp, Arabidopsis thaliana landsberg
atgacgattgaagactctccatattgctacattaaagaagatatcaaagagg

SEQ ID NO: 176735 - DNA, 390 bp, Arabidopsis thaliana landsberg
atggtatgtcttttgtttttcgaggattagtattacttggtctcactcaagtgtaaaatgataaactatattactgaaccatataattgatgaactgtttctcaaaacaactgtcaatatgtggtgaccgtgtttggggagttggttatgaacaccaacagccagtgtagtttttccttcaagtgaactgacttacccgccttaatctgttaacgagctaccactatgttatacctgtcacagacttgacatgcctgtcgttctgctattgcagctatcctatgtaaggtcagacctcgaggatatggactttatcatgtccaccagtggaaataacttggcagagcggcttcttcctccaaaatattcattatttattcgagaatcaag

SEQ ID NO: 176736 - DNA, 390 bp, Arabidopsis thaliana landsberg
  unsure (1)..(390): unsure at all n locations
atgcccaccgccaccgatgccaccgatgaagcactgatgctcggttatcgcgacggcgatgcggcggcttttgatgtgctctacagtcgccatnnnnnnnnnnnnnnnnnnnnnnnnnnnnnnnnnnnnnnnnnnnnnnnnnnnnnnnnnnnnnnnnnnnnnnnnnnnnnnnnnnnnnnnnnccgcgcccgcgccggctacacggtgcaggcgaaattctcgacctggctctaccggattgcccacaaccggctgatggaccactttcgccgcgacgatgccggcgtgtctctggatgacgagtcggtgtcgatcgccgaaccggtggcgccgcgcagcatcgagcctgaagtcagcgccgagtcacgacagcaggcggcgcaactgctg

SEQ ID NO: 176737 - DNA, 2653 bp, Arabidopsis thaliana landsberg
atggatcgaccaccgtcgttgccacactatcaaaaccctaatccgaacctcttctaccactatcctcctccaaattctaatcctaatttcttcttccgacctcctccacctcctcttcaaaatcctaacaattactccatcgttccgtctccgccgccgattcgcgagctctccggtacactctcttctttaaaatccctgttgtcagaatgtcaaagaaccttagattctctctcgcaaaatctagctttagatcactcttctcttctccagaaggacgaaaatggctgttttgttcgttgcccttttgattcaaatcactttatgccacctgaagctctctttcttcattcacttcgttgcccaaatactcttgacctcattcatcttcttgaatcctttagtagttaccggaacacgctcgagttaccatgtgaactacagttgaacaacggtgatggtgatctctgtatctctttagatgacttggccgattttgggagcaatttcttctaccgagattgtccaggagctgttaaattctctgagctcgatggaaaaaaacgaactttaacacttcctcatgttctatctgtggaatgtagcgattttgtaggttctgatgagaaggtgaaaaagattgtcttggataaatgcttaggagtcttaccgtctgatctttgtgcaatgaagaatgagattgatcaatggagggatttcccaagttcgtattcctctagtgttctttcttcgattgtgggttcaaaagtggttgaaataagtgcattgaggaaatggattctggttaattcgacgagatatggtgttataattgatacattcatgagggatcatatattcttactctttcggttgtgtctcaaatctgctgtgaaagaagcttgtggatttaggatggagtctgatgctactgatgttggtgagcagaagattatgagctgcaagagtagtacatttgagtgtccagtcttcattcaagtcttgtcttggttagcttctcaacttgctgtcttgtatggagaaggaaatgggaagttttttgctttggacatgtttaaacagtgcatagtagaatctgcctctcaggtaatgttgttccggttagaaggaactagatctaaatgctctggagttgtcgaggatttggatgatgcaaggttgagaaataaggatgtgatcatggagaagccctttgagaatagttcaggtggggaatgtggcaaaactttggacagtccacaggtgatatctgtgtcccgtgtttcagcagctgttgcagctttgtatgaaagatccttgcttgaagaaaaaataagggcagttcgatatgcccaaccactaacgagatatcagcggtaggtttgaaatctttcaaaggcgattctgttttgccgacttgatttttagtttatgaaagcatcatttcatgtttgcatttgagtttgattcctcatgatgtctctgtctgtcaatctgtagggcggctgagcttggttttatgacagctaaagctgatgaggaacggaatagacgttgtagctaccgacctattattgatcatgatggtcgtccgagacaacgctcattaaatcaggttaatactcaactaactgttatctaacattaagtaaacaaatattactgtagggaacttttattgaaggtactgaaatacatatattttactgtctataatgtgtaggatatggataaaatgaagacaagggaagagcttttagctgaagagagagattataagcgtcgtcgaatgtcataccgtggaaagaaggtgaaacgaacgcctcgacaggtaagagctgtttccttttcatgaatgacaatcacaaattccagtgttttgaatgtgctacaaaatgctcaatgtttggacaatctcattgaaattttgttggaaaaagtgtagttatatgctgactctactattgtcttgtcgaggcattttgcagattttgtgaaaaaaattggtccttgctaaattcatacttttagttatgaccacccttcagttagcaataaacttatactatcctcttcttccagtgagttttctccttcttttgtcttgtaggtcttacatgatatgatagaagaatatacagaagaaattaagctagcaggaggtattggatgttttgagaaaggaatgccattacaatcccggtctcctataggcaacgaccagaaagaaagtgactttggatacagtataccatcaacagataagcaatggaaaggagagaaccgtgcagatattgaatatccaatcgataatagacaaaattcagataaagtaaagcgacatgatgagtatgattcaggtagctcgcagagacagcagagtcacagatcatataagcacagtgatcgaagagatgacaagctccgtgatcgaagaaaggacaagcacaatgatcgaagagatgacgaattcacaaggaccaaacgacatagcattgaaggggaatcttatcatcaaaactacagatcatctcgtgagaagagttcttcagattataagaccaaaagggatgatccttatgaccgccgcagtcagcaacctaggaatcaaaatttgtttgaagatagatacataccaacagaaaaagagtga

SEQ ID NO: 176738 - DNA, 163 bp, Arabidopsis thaliana landsberg
aatgaaaaagaaagctaaacggattcggaggaacacatgtaaaggattcacttatctcaatgtgagaccgagcttatctcggcaagatgatcgatgcaatccacaatttggttatcagcgagagagctacaccaaggaaagtgcaaaactgttaacagactaa

SEQ ID NO: 176739 - DNA, 37 bp, Arabidopsis thaliana landsberg
atgtccgatgtagaaaattgtcaacttccttggaaat

SEQ ID NO: 176740 - DNA, 902 bp, Arabidopsis thaliana landsberg
atgccgtacaaatgggtcccctccgttggatccataaaacgacgtcggtgtaaacgagtatgactaccacgactctactacgagttgcgaactgttggccggaaatcaatttcgtcgtcttcatcgactctttctctccctgaattttctctggcatttcgaatttatagaggtacgcgagtcaaataatcttcactatttactcttcaagttagtagtcatcgataccgcttgactcgccgctactttttctattcttctgcgttttcgatctttcgcggttgcagtagtttacggcgccggagttagatttcggactgcgaggatttgtttgaactttttagagtccttgagtgggatcgaggttttttgcttttgttttgagtaaatttcgtaattgtttgaaataagatttgggaatgtagatagatctctgctctttaatgttattgctgttgaactctcatagtaatgtgtttatcttacaatttctactttgaaagggtttcatataagaatacttaatactaagctagaggtcgaaaattcatctataatcttatctttggttttgtaatcgcagatgctaaacttatgttgtttgtacttataatggcgtcttctttgttacttttcaggtacgcatggctgccaaggctttaaaagatttgaacaatcttcctgtctctgagaggaatatcgactataaaacaaagcttttggttggcaaaatgaatggaacagctgaagataaaccaccacaaaactctgtcccctttgatcacaatcatcctaaaggcgatgagattgagaaacctgaggcagagagagttatcgtagaaattgagtatatagaatccaaagacttgaacaatgtaacccaagttgatgcagttctcaag

SEQ ID NO: 176741 - DNA, 74 bp, Arabidopsis thaliana landsberg
atggagacggctgcagcatctcattcattgctagagactcaacgagaagtcaacatcgacggtgatcctataag

SEQ ID NO: 176742 - DNA, 244 bp, Arabidopsis thaliana landsberg
atgacaattgccagcgaaataccagggaaaaacgacgatcaaaaggttaccggtgtgtgttaattcatcgatagccccagcgataactctgatgattgaggtctccccgttgacagaagcagacaaaaggtcatcttcagtgaaagataacttactccaaagctgccgaagcagcagcagcagcagccaggccggaaatgtcaatttcatcgtcgtcaatcgtggtggaaaagggcaagcttga

SEQ ID NO: 176743 - DNA, 114 bp, Arabidopsis thaliana landsberg
atgtgccttcgaggtgctggtgcgggtgacgactcagatgcggcgcacaatgcgtgctccgatgcggcgttgctcttaacaaagttggctctagcaagacagagctccgataac

SEQ ID NO: 176744 - DNA, 232 bp, Arabidopsis thaliana landsberg
atggcgttgtgtgctggtggtgagttgtttgataggattatagctcggggtcattactctgagagagctgctgttggtatcattaggtctattgtgagtgttgttcagatttgtcatttgaagggtgtgattcatcgagatctcaagcctgagaatttcttgttctcgagtaaggaggagaatgcaatgcttaaagtaaccgatttcgggttgtccgcgttcatcgaagaag

SEQ ID NO: 176745 - DNA, 2677 bp, Arabidopsis thaliana landsberg
gggctttgacgttacaagtcagcctccacgactcaagcggaatgcttctgctgcttctgatatgagtagcatatcatcccgttctgcaacttctgtttcaggtgtgtgaaagcattgaaatgaataattttcttacgtttaacaaggtctagatcctctttaagtcttattctagtttagatttctaaaccctttttgttcatttgtggctgtttatatctttctagcttcaagcaaacgcagtgctaacttgtgctttgatgagagacttttccttcagtcactttacaaggtaacacttaaaatgaaatcagcagggaaagattctattctcgtgcaattcttaaactgaacggttgttacctttacaggtcttggtttcgatttcagaaaccaatcctataataatatacctgagggatgttgagaagctttgtcagtcagaaaggttctacaagttgttccagaggctcttgacgaagctttctggccctgttttggttctcggctcaagactattggaacccgaagatgactgtcaagaagtaggagagggcatttctgctttgtttccttacaacatcgagatcagaccgccagaggatgaaaatcaactcatgagctggaaaacgagatttgaagatgacatgaaagtgatacagtttcaagacaacaagaaccacatagccgaggttctagcggctaatgatcttgagtgtgatgacttaggttccatatgccatgcagatacaatgttcctaagcagtcacattgaggaaattgttgtttctgcaatctcctaccatctgatgaacaacaaagaacccgaatacaaaaacgggaggcttgtaatatcttctaataggtactaagaaccacagttatctcttcaacaaaactaagtaattattattttcttatagctaactaaataaatggttctgcaacagcttgtcccatggactgaatatattacaggaaggtcaaggatgctttgaggactccttgaagctggacacaaacatcgactccaaggtataatacagttttgaccatgtactttaaaattttaaagtgagtaaaatgtgaatggctctggtgcaggtagaagaaggtgaagggataacaaagagcgagtcaaaatctgagacaactgttccggaaaacaaaaatgaatcggatacatcaatcccggcagcaaaaaatgaatgccccctgcctccgaaagcacctgtacatgtaaactaatacatatgattcagcattgataccttgatgtgtttgcctgaacataggtttgattttccttatcctgtcaatgtaggaggtggctcctgataatgaattcgagaagcgcataagaccagaggttatcccagcaaatgagattggtgtgacttttgctgatataggttcactggatgaaaccaaagaatcacttcaagagcttgtcatgcttcctcttcgtaggcctgacctgttcaaaggtggtcttcaagccctgcagaggaatcctcctctttggaccacctggtactggaaaaactatgatggcaaaagccattgcgaacgaagctggggctagtttcataaatgtgtcgatgtccacaatcacttcaaaatggtttggagaagatgagaagaacgtgagagctttgttcaccctcgcggccaaagtgtctccaactattatatttgtggatgaagtggatagtatgctgggacagaggacaagagttggcgagcatgaagctatgaggaagatcaaaaatgagttcatgacacactgggatgggcttatgtcaaatgcgggtgaccgtattctcgttcttgcagcaacaaacagaccatttgatctcgatgaagctatcatcaggaggtttgagcgaaggtaagcaggcccggtacgccttttcacttgaaaccctgaacttgagctgtactaactccagcttctgcttttgttttgttgggagacagaatcatggtgggtcttccatcggtcgagagcagagagaagatcttgagatccttattgtcaaaagagaaaacagagaatcttgatttccaagagcttgcgcagatgacagatggctatagtggaagtgatctcaaggtttgtcacagttcccatctcgctttacaaacatctgaatcttctctttatgaactaattattgtgaatgttatacaaacagaacttttgcacaacagcagcatatcgaccagtgagggagctgataaagcaagagtgcttgaaagaccaggtaagaactcctaaaactcgtccttcctttatttctctactttctagcgctagaatgagtattttaatggtggtttctcataaaatccaggagaggaggaagagagaggaagcagagaagaatagtgaagaaggatctgaagcaaaagaagaagtatctgaagagagaggcataacgttgagacctttgagcatggaagacatgaaagtagctaaaagccaggtaaagttaaaaaaagattagttgcggtgttgatgatgatcatgcgcaaaacactaactgtttcgcgtttacaggttgctgctagttttgcagcagaaggagcaggaatgaacgaactcaagcagtggaatgatttgtatggagaaggaggctccaggaaaaaggaacagctctcttacttcctttaa

SEQ ID NO: 176746 - DNA, 667 bp, Arabidopsis thaliana landsberg
ctaccaatacctactggatcctaaggttgctgggttcatatcaaaggagttacaaaaagagtcagttgtagtgtttgacgaggcccataatatcgataacgtgtgtattgaagcactcagcgtcagtgtgaggagggttacacttgaaggagctaatcgaaatcttaataagataaggcaagaaattgataggtacgctaattttttcctatatagctgatactccttaagttctcttgaacgtgccactcttaatacaacaataaacacagtgatagggtcttttctttttcaattgaatttcctgattgttcttgaatgccatctgggtgtctgctcactccagttgctaattgttggttttcttaaggaagtttaagttagtaagaaaataatctggttttatgagactgctttttgtcaaagaactgtaaggggaacaaaaatttacaaacgcttttgtcatcatcttaaacacatgaagcataattttcttggttcaatacaggaagtgacctggttatttgctgatgcttatttttaagttcttattacattattgaaattgtccaactggtaggaaggttcaaggctactgatgcaggaagattgcgagctgaatacaaccggctggttgagggtttagcactgagaggggacttatctg

SEQ ID NO: 176747 - DNA, 198 bp, Arabidopsis thaliana landsberg
atggtggcgccgccgggccgggccgggccgcactccggcgagggcgactccgctggacttccccgcgagcaggaggaggaggaggaggaaagcgggagcgggagctaccggaggaagggaagggaagggaagcgaacgaaaggaaggggagagaaggcagtagcagtcagcagagcagtagaaaatcctgcgactcgg

SEQ ID NO: 176748 - DNA, 332 bp, Arabidopsis thaliana landsberg
gttttcagttcgttgacccgaactatctcaactgccaaaaatattctcgggaagaacccgcaagagagctttctggacagattaccaaagtccactaaggatgaagttatacatgtaagtctgacatcctccaatgtcctaagtaacaagcagctcaatatatactgattactgtaatttggttaataatgcctatggatattgttgtcccctcaaatgcatcaatactttttccttttttctctcgtatacagcactggacatcaatacaagaattactgagacatttttggtcatcttacccaataacaacgacatatcttagtaccaag

SEQ ID NO: 176749 - DNA, 165 bp, Arabidopsis thaliana landsberg
atcactgacatgaagattacggatatttccggaaagatccaggctttggttgattccttaagggatatgtccccgacccgtgtcagatcttccttctctgatgaacatgtctccgagagccatgacgagagaagctcctggattgtccgtcattttgttttatga

SEQ ID NO: 176750 - DNA, 241 bp, Arabidopsis thaliana landsberg
tggctctagcggcagcacaactgtgacacctggcacaaccaatccaaaaggcagcccaacgaccaccacacttcctggtagtggtaccaacagtccttattcagggaacccaaccaatggagtttttgggggaatagcacaggaggcaccactgggacagggattaacccggattacacgacagacagcagcgcgtttgctctcaagaactcaagcaaattgttcatctgccttctcttga

SEQ ID NO: 176751 - DNA, 99 bp, Arabidopsis thaliana landsberg
ggcaaggacgtggacgtgggcatggacttggatcgccttctcgaggactctgtcctttgcctccgcatgaacaagatggacctacagttagctctctaa

SEQ ID NO: 176752 - DNA, 501 bp, Arabidopsis thaliana landsberg
gttagaaaagagaaggaaagggacgagaaagagaaacggaaagacaaggataaggagagaagggaaaaggaaagagaacgtgaaaaggagaagggaaaagagaggagtaaacgggaagaatcagatggtgagactgctatggatgtgagcgaaggtcataaagacgagaaaagaaagggaaaagatcgtgacagaaaacatcgaagacggcatcacaacaattctgatgaagatgttagttctgatagggatgacagagatgagtcgaagaaatcatcccgtaaacatggtaatgatcgcaaaaaatcaagaaaggtaggtacaccctagacttgagttctgaaattcgttaaagatttaaaataaagagggatggttttttcttggtagcacgcaaactcgcctgaatcagagagtgaaaaccggcataaacgacagaagaaagagagtagtcgccgaagtggtaatgacgagctagaggatggagaagttggggagtga

SEQ ID NO: 176753 - DNA, 389 bp, Arabidopsis thaliana landsberg
atggatgacatatcagtgagcaaaagcaaccacggaaatgttgttgtgctcaacatcaaagcgtcttctcttgcagacacttctcttccttccaacaaacacgagtcatcgtccccgcctttgctctctgtccatttcttgcaaaaggtaagtttatctcagtccaaattgaggaagcactgctttattcactcttcaaagcttctttttaacccataggcttttcaagtttttgtgttaactgatacttacgatgagcacttttgatctgcagctcttagcggagctcgttggaacttactatctgatatttgctggctgtgccgccattgccgtgaatgctcaacacaaccatgtagtgactcttgtggggattgctgtggtttggg

SEQ ID NO: 176754 - DNA, 151 bp, Arabidopsis thaliana landsberg
atggcgaagctgattttttccctggatggtgcgttcctcggcgaatatgcgctggataaggatcgtatgacgatcggccggcgccctggcaacgatatccatatcgataatcttgcggtcagcggcgaacacgccatgatcgtcaccatcg

SEQ ID NO: 176755 - DNA, 291 bp, Arabidopsis thaliana landsberg
atcagcagaaactacactctgaatcgaaatccaacaggggacaataatgaaaatactaaacgtaaaatcgtaactaaaagaaaaaagaaatcaattagccagatcgaaacatacagagaagaatcgaacaacagaataatcaatggagaaagggggaacccttttctgatcaatgaaacttcgcgaaagagaaatgaagaaaaaacaaaaaaggctttgaaggcaatatgtaaaccaaacgtttcaatggcgtacctcatgagtcatgactcatcgattggttgtcgttaa

SEQ ID NO: 176756 - DNA, 459 bp, Arabidopsis thaliana landsberg
tgttatggtgaaatcttcctacaatggacatggactgaacgaggttgttcctcagaaaacatcgggatatataagtcaacatgatctgcacattgcagagatgactacaagggagacaattgacttctcagctcgttgtcaaggtgtcggtagccgaacaggtaggtgtcttcataaaccaatggtctatctgaagcattttttttaactatttttgtgacaaaaatatctctctgctgaaacagatattatgatggaggtcagtaaaagagaaaaggatggtggaatcattcctgacccagaaatagatgcttacatgaaggtatgcactcctgaagcttacgttgaaaactgatctttgaactatgtcaattagttataaccttttgtaatctcattgtgcaggcaatatcagtcaaaggacttaaaaggagtctgcaaacagactacattttgaag

SEQ ID NO: 176757 - DNA, 56 bp, Arabidopsis thaliana landsberg
atgcacttgatgatgactatagatgagctctttgtggatatgcgtgaccaccacag

SEQ ID NO: 176758 - DNA, 524 bp, Arabidopsis thaliana landsberg
atggaaggggaaggagatcgagatgcaaacctgaccaccaacgacggcgatcgcaggcaaggaatcccaaagagtaggtaaagcgctggagtctccatggtctcctaaagccgtgcaagctctctgtatcttgttaaccagagagatcagattttccatcgtcctctactcctcgtttccccaatatcaaatgagaagcccaaaatacagtagctgctacaacagatcggcgagatctgatacctccgccggtaaaatttattgcggaaggagtagatctgcgatgcgacggtgagctatggaaccagagaaatagagatagagagagatgagtttttgaatttgagtcgatgaagaatttttgcttgctactgtcgggaaaaagtaaaggggaagaaagcggtttatataaaagccaatacagggtcttttcttttccaaagaaaatttgaaacggcatggtgtttatttcgagaattcaaagacgacgaggagttgaccaaaaacaaaataaaaacgacgag

SEQ ID NO: 176759 - DNA, 5445 bp, Arabidopsis thaliana landsberg
atggacgtgaaagccaaggtgcgttgtgattctcatttatttgttgcatttcagcagtttataccaaacatgcgtaatgggaaatagttttctaatttaaacattctagaaattgtgagaaaatgcactatagaacatattttgccatgatagctcttagctggtatccaaaaaggtcaagggggcattccgagaatcgaactcgggacctctcgcacccaaagcgagaatcataccactagaccaaatgccctgttgttgatttagttctattcaaatatttcattgttctttgatcctttgtgtgagaaataatatatggttccatcttttacaggaaatttacccgccttacttttcctcttgaggatttattcttgacatcgctggcaacatatagttagtgtaagctcaaactcttctaactgattcatgaatctgatgagaaaatatttacttgtttagataatctaaaaataaagctacattttagatctagatcgttaagttgactgtcaaatactggaggcagattgtctataattcaaatattgttgaaatgtaaggcaatcattgctgaattgctgtattagagaaaattctatatggaaaaattcttagctgtcatttagtccacataccttgcaaaatttaaaaggggcattccgagaatcgaactcgggacctctcgcacccaaagcgagaatcataccactagaccaaatgccctgttgttgatgtaatttagttttaaaactatagataatggtgttgcctttggatctcttaataccaatcaatttctgctctctgactttattgtgcatgaaaagccaccggtgcaactgacgaactagtataggattgatttggttcgggataggtggctgttggttataggaacctaagctagtggatctgatgataaggataaactttgcatattgttatctgttactttgatcatgaagtcaatcttgaaagtcttattttcatgtctgaaaatttgatttttccttgttaaaatgcctaaactagtgaccgtaaggatgtcaccatggtcttgcttatcatagagtcctgatatgctctatgctctccacatcctgtattacttagatgtgtgaggttgtaggtctcctgaatgcccctgagacttaaaaaagaatgggggcattccgagaatcgaactcgggacctctcgcacccaaagcgagaatcataccactagaccaaatgccccgtttatatgttgttcagttaatgcctcctataagcattctagcctttcgttgagagatattttgttaccgtttgcattccgttatatgcttaatgatgactcctttattatttatgcagatcatactttgtgaaatcggcagcttacaaaatgtgaagggccgacctatatgtagttactcgttaaaacagtggtacgttcttatcttccttggcactaaagctgttaaataatgaaaccttatggggaggtgttactttgtttcctctcgctgagataaataaaaaatatttgtacatgcattgttttgttgaaaaattcaatggggatatgtagctggcatttagaacgaatgtttttggaaaaagtcaatggggcattccgagaatcgaactcgggacctctcgcacccaaagcgagaatcataccactagaccaaatgccctgttgttaatatagttacattgtagcactgtgatgttgttaatcatgtggaaaagagaattcatgcttcagtctattattacaggaaattcactcttgatggtttgtttatcttttgagggctctattcgggattaagcaggcaagatgcagtaagttcaaactattctttaattaattttgaatatggcgttcaaatggtttcttgtttagatcttctaagacagaaattactttttagatctgggatctatcagttgactttcagccatcagggcttaattgtaaaggtggatagtctggaaatttagtattgatgaaatgttagctggcgtttagaactttggtttccaaaaagtcaaaggggcattccgagaattgaactcgggacctctcgcaccctaagcgagaatcataccactagaccaaatgccctatttgatgtatcgtttgacataattaaatatatatagtaactaaaatatcgtttcacggaactgagcttttcaaaaccattcgacacagctctgtactcgtctctctcccgccaatcacctcgactaaagcaccaatggaacctctagggtttcttctctgattccaaccgtatacgaatcggaagcttctagcgattccatttcttcttggacagcattgaaattcgagtttcgatggtcaatcttatggaaaccgaagatttcgcctccgatttgcagtctccttctggttcttcggatcatagtgagttttgagattacgattcatttacattttctttttcttgctgataattgtagatttttgaggtgatagattcgtagtaccaatttcatttttggattctcttagggtttgaggttaatcggattctgggatgtggggaaattgaagatacagaggcgattgatgaagcattagtacttaatagctcgttacttgaaaccccatttcaagtgctctacgacgatacggagctagtagataacggaaattgtggtgacgaggaatcactgaaccaggaatgttacggtctcgaccaagtggtggtggatgatagtgatgatgaagatggaagtgtcgctgctggtgagccgatgtgtttgccggagctaagcccgaaagctggagatatacttttggagtctgatggatcaaatgatcacgaatgtcaaacaggtaaacatatccttgtgttgttatgttgcctctatcttcttctttgtattaactcagataaatcttactacatctctttcttcaaggcaagcaagaatcaaattgtgatacagtgaccggtttccaaggttcattgcggattactgctagtagccatggtccagggcttgattttttggattctcaagaaccaggagagtcaacacaagcagatgcccttggttttgttgaccactttttgatggacaaagatctaaatttgtctccagttgatctcccggttaatagttgcagaaggaagtcacctcctgtatcaggtgcaaaaggatgtcaatctctggccaaaagaattatgagcagaagtccaaccaggaaaatgagtgtctttgattggagtagtgatcagtgtgatgtgagtgaccctaaaacctctccagtcactcgtgcaagtattacatgctccaagataagagaagatcaggttgcaggtgatgattttggagtgaagaaacgatctagggatccgtgtgatattagaaaagtctcaagtcatcccacacaaagagttatgaagaacagttctgcaaagcatctcaagatggaacaagcatcgggtttgagtgagggcattatgtttatctcacagaaggatgctcagttggaggataaggcgccaaaggagcccttggaacccgaggaagactttattgacattggtattaacactcaaattgctgctgaagcaatgagtgctttagtgtatgctccctgtactacagaagaagcttgtgaatcagacccaattcctgggagtgtatcagaaatgagggatcaagttagtaatctttctagaaggaacaatgataccattgagggtgaacctgaaagagacaaattgaatggtctgtttagtgctgctccacacagggaaagaaactctaagaagaagagaaaattcaccaatgaagagagaaccagagctaacgtctctgttaaaacatgtcttctcaacttatgtgaatggaggcatcccagagccaaaagatcacgtcttatgcaaagacatcacatcccacctaggagatcttggggtgctagtttagttaaagacagaagtgaaaccaacactttgtcaagcagcttacgaggatcgttaagtgggacaagacaagcctcttcttgccaatcaggagtcattgacttgaatgttgcatatcatgcttctccaaggaaaatatatgacggaagtcatgaaagcccttgcaataaagatttccccaggttattccttcagaaggagcttactacgagccttggaggacctggtaaaataggtgacttcgtgtggaaagacttaaggaaacgaagaaacttggcacatgttcgagtcttattcagccagaatctggatgatgaaacagtcaagcagcagaagaaggttatagttctagcctcctttttatcaattttaacagtgtaagtatatactacgtcatcattggttataattgatcactcgtgtcttccatagataatggttcgactcggaatttctccggcatcttcatcagcagattcaacacatttcatagcagacagatttgctcggacaaggaatatgttggaagccatagctcttggtaaatttgttgttacgcctatatggctcgagagctgtgcacaaacaagatgcttgatagatgagaagagttacattttaagggatatcaaaaaggaaaaagacgggttctgcttgcttacatctttggcccgtgcgaagcagcatccccttcttaaggtcacaatctatctcatttgagcttttatcagagcttcaaaagatcctttgttcatgaatatctgaaatcatataacttcacatttattcataggggtttaaagtctgcatcacccccagcattaaaccaagcagaggtatgattactgatttagtaaagatgactcaagggcaggtacgaacaattcacttcagctgagagattttgtttcatagacttcttagcacttcttcaggatggttgtttatgagttcctttatcaggtagtggaggcaagtgagataattgctgcagaggatagaaactttccagaagatgtgttgattctttcttgcaaagaagatcgagatttctgtcttcctttcgttaatcaaggtaaccgtcaatgccaattttacactatgaaaattactaagaaagaacaattacaagttaattaatgtcatctttccattaacaactgtaatgtaggagctgtaattttcacctctgagcttttactgaatggaatcgtgattcagaaactggaatatgccaggtttgcaacgcattatcaccaaaatcagagattataattgtagtgtgtgtttgtgtaactacgaaccaatcaacgtaaatggatagaacataaattggtcaaacgcaaatctccttacaatttttggattctctcttgtttcaggcactgtctcttctcaatttcagagaaaaggaaccaaagaaacacataagtttacagcagcatgtctacttctttctactactgattggtacaagcaatga

SEQ ID NO: 176760 - DNA, 591 bp, Arabidopsis thaliana landsberg
aaacacccagaggttgaaaacaaaatcatctgcgagataagagaaatcttgagacagcgaggggattctccaaccagcaaaaacgagagcctcttcacagtcaaagaactaaacaacatggtatacctacaagcagcactatcagaaactctgagactgttccctccaattccaatggaaatgaaacaagccattgaagatgatgtgttaccagatgggacattcgtaagaaaaggttcacgggtttacttctcaatctatgccatgggaaggatggaatcaatctggggaaaagattgtgaaattttcagaccagagagatggatccaagcagggaagtttgtcagtgacgaccagttcaaatacgttgtattcaatgctggaccaaggctgtgcataggaaaaacatttgcttacctgcagatgaagatgatagctgcttcagttttgttgaggtactcaatcaaggttgtccaagatcatgtcatagccccgagagtcacaactaacttgtacatgaagtacggcctcaaagtaaccatcacaccaaggtcgctggaagagaagaaacttgagtcatgttccatgtag

SEQ ID NO: 176761 - DNA, 513 bp, Arabidopsis thaliana landsberg
atgtcacaatctgactcttctccgacgaagaaacagaagctggaggatggtttaggtatatatctggatccttttgtttattacacattgaagattatgtatgagggatctcgatttgttctaaggttaatgtatcaaagaaattctgagtgttttatgttgtaggtaaaggaaaatctcagaacgagattggtgctgtagggattcgagaagagaaagataatattgaagttgagaatgctaaggtaaatctgttttattgaaggtctaaaaccatcgatcctttacaggatacagagatgtgatcggaattaaagtctttgtcttgtttttggttggtgtctttctatgtccttttgtgtgaatgtctctcaatgtaatttttcattgttaatgtagaataaaagtccacactacgatccttgtgaaagtgaaagcggtgcgccgagtttcttagtttctcgattgcttcacttccttgactctcctgattatgaagttaagaatgataag

SEQ ID NO: 176762 - DNA, 134 bp, Arabidopsis thaliana landsberg
aatcgcagattccagtatcagattccagtgacaaacgctggacggaacctaaatacaatggaaacccccatttaagacgaatggaaatccttgatgggggattcatcgtcttaatcacgattaagcgctactgt

SEQ ID NO: 176763 - DNA, 130 bp, Arabidopsis thaliana landsberg
aaagtcaaaacgcgaaaatgttcgagaatattataaagccatttattcagtagatgtaatgtcttatacggcccgagaagcggatgcgttccgcgtagcaattgctcgggcttgcatggacgctacttaa

SEQ ID NO: 176764 - DNA, 60 bp, Arabidopsis thaliana landsberg
atgggtataaaagaatatgatggaagaaaatcaatcaacgacaaaaagtcattagctcta

SEQ ID NO: 176765 - DNA, 709 bp, Arabidopsis thaliana landsberg
gttggagctcctgctcgtgtaggtttagtcgctccaattgatgtggtcgtgcaaccaggcaacactggtcttgacccttcacagacctccttcttccaggtgcttaacattccaaccaaaatcaacaaaggtacggttgagatcataacccctgtggagctcatcaagaaaggcgacaaagtcggttcatccgaggctgcgcttcttgccaagcttggaatcaggcccttttcgtatggtctcgttgttgagtcagtctacgataatgggtcagtgtttaaccctgaagtgcttaacctcactgaagacgaccttgttgagaagtttgcagctggtgtctcgatgatcactgcgctttctcttgcaatctcttacccaaccgtagcagctgcgcctcacatgttcctcaatgcttacaagaacgttcttgctgttgccttagctactgagtactctttccctcaggctgagaatgtgaaggagttcctaaaggtttgtcctctttcattttgcgtttcagatattgggattagtagtcatgaaattgtttgttaactgtacatttatggatcaggatccaaccaagtttgcagttgcagtggctgcaccggtttcaggagagtctggtggagcagtggtggcagtagctgttgaggaagaagctgcagaagagtctgatggggacatgggatttgatctgttcggttaa

SEQ ID NO: 176766 - DNA, 64 bp, Arabidopsis thaliana landsberg
atggccgaagaagaatgttatgttaaggagcagcaagatgagaagagatcgcaaagctttcgag

SEQ ID NO: 176767 - DNA, 223 bp, Arabidopsis thaliana landsberg
cttcttcaaaacacgaagatctcacagagtggaagcagacggctcatgggacgacttcggttacactcgcaaggcaatggctagtgatgaagacaaacgttattgggtcgctgaaccaggcatcgaccgtaaagcgtctgccttcattgccaagtttcatgcaactcgtgtctctgagtctgagcgtcagactctctctccttaccgatccgaaaaggcatga

SEQ ID NO: 176768 - DNA, 348 bp, Arabidopsis thaliana landsberg
atggctttttcaattgtgaacgggagtgtcagtgaagagaaaaaaaagctggcagtcgaagctccaaaaacaaagaaacaggttttaggccgatgtttagcaaattttagcagacttttgagttttcgtaagaagcaagaaacgaacagaaaaagccctagatgtagcaaagccatgcctgatgctgtttttgttcatccaacatccagtactatacaggatgatcttgtacgtaagaaacaagaaaagagcagaaaaagccctagctgtagcgaaacaacgcttgttgtggagttaccggaggatctattagaagagattcttcaaagccttccggtgaaatatttg

SEQ ID NO: 176769 - DNA, 156 bp, Arabidopsis thaliana landsberg
gtggaatcccccatattcgtcttatcatcgaagatgatcattagaccaactatttccgatgttagtcgacccgccattgtccaccaattgaaaccactttatcgtgacaacatgaattcacaacttccggtaacatccaagatatcggatcgttga

SEQ ID NO: 176770 - DNA, 281 bp, Arabidopsis thaliana landsberg
atgggcctgaactatgttacctatcatttaaaactaaatgtagcccgtttggtaagttataaaataaatagactccaaaagaaccgatccgtttagtccttttgaaacatatgctgaaaaataaaatggattcaaaatcgacagctagaaatagaatctaatacacaaggccacaagctaacaaatgtcgacaaaatgaataaatacagaagctaacaagttgatgcaacttataattttctatcccaattattttgtagaaaacaaatgaaactcgctga

SEQ ID NO: 176771 - DNA, 67 bp, Arabidopsis thaliana landsberg
atgagcggctattccaccactaaaacattgatctccatcaatccttctcctgaagtaggaaactcgg

SEQ ID NO: 176772 - DNA, 496 bp, Arabidopsis thaliana landsberg
aggaagtgagaaatttactgtattggcaacaacagagcaagagaacaagtatctgaatttcatagatgtatggtccgatggagtaagatcatctgaaaaacagagtacaacttcaacacctgtttcttcttccaatggcaatctctctctttactcgcttgatctctcaatgggaggaaacaacttaatgggccaagacgaaatgggcctgatacaaatgggcttaggtgtaatcgggtcgggtagtgaggatcatcacgggtatggtccttatggtgtgacttcttcactagaggagatgtcaagctggcttgctccgatgtctaccacacctggtggaccattagcggagatactgaggccgagtacgaatttggcgatctctggtgatatcgaatcgtatagcttgatggagactcccactccaagctcgtccccgtctagagtgatgaagaagatgactagttcagtgtccgacgaaagcagccaggtttag

SEQ ID NO: 176773 - DNA, 509 bp, Arabidopsis thaliana landsberg
tgaactttgatctaccaaacgacattgatgactatgtccaccgtatcggacgaacaggacgtgcaggaaattcaggactagcaactgctttcttcaatgacaacaacacaacaatggccaagccactggctgagctaatgcaagaagctaaccaggaggtccctgactggctgactcgatacgcatctcgtgcttcatttggaggtggtaagaaccggcggtctggtggacggtttggtggtcgtgacttcaggagagaatcttttagtcgaggcggtggtggtgctgactactatggtggaggtggtggatatggaggcgttcctggtggtggctatggagcaatgcctggtgggtacggacccgtaccaggtggtggatatggaaatgttccgggtggtggttatgcaccttatggtagaggtggtggtgcttactatggtcctggaggatatggaaccgttcctaaccaagggtatggtcctggagtggctagtgcgtgggactaa

SEQ ID NO: 176774 - DNA, 447 bp, Arabidopsis thaliana landsberg
aattgattatttctgtttctgataacaacaaatcattcttccatgtgatctccaacgccagatcctttgtcatcaaccgagaaagagtactcttggtcacagcccaagtaagagtcacacataaagtatagtgtgtatgacttctctcctggttcactcggtactgtgaaatcaagttttaccttagctttctgttgcaatgagacacgtttgattgccagccactagtttgtcttggtgtcgcccacaaccagctcttggtcaagtcctttgtgaagtgaggaagctgctgaagcatggagtctagatcccacatgccttgagctaccatctggcttactttcataggtaaaagagcaagattcatacagccattgctcgatatcacatagaccattgcttgaagaagccttggtgctgataaaaggaccctacactgatccatga

SEQ ID NO: 176775 - DNA, 154 bp, Arabidopsis thaliana landsberg
agtcgaccgttgcgtgcagatagtcgttgctccgctggtgcaccggacagtcctgtggcacaccggacagtccgtgaattagagcgagcactcccagagaaacccgagggtggcgagtttgggttgtacggtcttggtcgacggacactgtccg

SEQ ID NO: 176776 - DNA, 182 bp, Arabidopsis thaliana landsberg
cttcggctttaagctcttgtgagaattgtcggaaccgattagatgaagttcgtttcatcgtcggagatctcgaaatcgaaaccggagtcattattccggtgttgtcgtcggagatatctccgatgacattaatggcggttgctggctcgacgcttcgaagaacgattgtgtcatcgtcttga

SEQ ID NO: 176777 - DNA, 71 bp, Arabidopsis thaliana landsberg
atggtggttaatttccttgaacgtctaagattcgatcctatctttgcttcacgggactataccatattaag

SEQ ID NO: 176778 - DNA, 158 bp, Arabidopsis thaliana landsberg
atgtgtgctgtcctggtggtgggggacctggtcgttgttgactctagcagtgttctcacagggagtatggatgcctattcaacctctgggttcctcgtaagtgtgtcatccgagttggtgtggatggaatcagcaactctcttcgtaccaaccattga

SEQ ID NO: 176779 - DNA, 418 bp, Arabidopsis thaliana landsberg
atggtgttttcgaaagcttccgaccaaaattgttttgacttgtcgagaaagatttggggaagtaacggtgtattgtattcgaaatcaaagaagatgcgacaaggacagcttggaggaagtgtcaaggttgatgaagatgatcaagagccacagaaacatcggtttgtcataagcactttatcttctggtcaagagttggtctcttacttgaaggttgagaatccgaattctttgggtgttgatgacacaaaatggagtgcaaaattggataagatcaaagacggaaaacaaaagagaaagatggaaaaaaccttgaagaagattcaggctaaggaagaggagctctctatgatgagaagtgaatttgttgctgccgtgacgaatgtgctgtctaagcaagacaacgcatcttattcct

SEQ ID NO: 176780 - DNA, 358 bp, Arabidopsis thaliana landsberg
atgcaccgccgccttgccgcaattggattcgtcgcgctccttgcgctcgccggaacggcgtgcagcaaggacaagaacaacgacgacgacacggcggcggacaccacgacgacggcagccgagccgacgaccaccacgccggtaacggcgcccaacgggcccgtcaccacacctgaggccgccgcgaagggcctcttcgcggcgtggcaacgcggtgatcagaacgacgcctcgcattacgcgcgtcaacgcgcgatcacggcaattttctcgcaccccaacacgggtgacgtgaagtaccagaaccagggttgctcacccgagggcggccagttcgtctgttcatggacctacgagg

SEQ ID NO: 176781 - DNA, 205 bp, Arabidopsis thaliana landsberg
gtcttggcttcagatgatgttcaagatgccttgaccacgaatcctgatgaagttattggttctgagaaaagtgaggaagacacattccgtaagtgatttcgtgtctctatcagtttctcgtctttgttgcgattagagatatagtttgctaatcttggctaattaacctaagaattttcctcatgcaggtcaggtcagtccgtga

SEQ ID NO: 176782 - DNA, 75 bp, Arabidopsis thaliana landsberg
atttgcatgaagcctagctcaacttctgctcggtccggaggagagagggacaaagttgttgattcaagaaagtga

SEQ ID NO: 176783 - DNA, 117 bp, Arabidopsis thaliana landsberg
atggtagcaatccaactagaagacagaatgaaactggttcatcacccattcaatatttgtgatttaggctactttcgaaaattgggcctattgggctattgtaaacttgaaatttaa

SEQ ID NO: 176784 - DNA, 430 bp, Arabidopsis thaliana landsberg
atgttagaaactaacgagcaaaagggttttgatttaaacgtgtgtgcttcaattgaagatttcagtgagtctgacattaaggctgagggtgaaactgatagtttggttgatggtaatgtggagaatgtgattgagattaaggataagaaaaaagtgattgagcgtgagattctcattacgcgtagggttcttcgctcaggctctgtggcaagggatttagtaaacagtgataaacattgtaaggctgtgaaaaggaaaggaaatgttgttagtggtggtagttctgttgatgaggtgaaagaagaagtgaaacaggagtgtgttaagtctttggtacctgaggagattcgtggagatgattttcgaagtgaagtgaaagtgcaatctatggatgatcgatcagatgatggaaaagaagagaaagttcaac

SEQ ID NO: 176785 - DNA, 371 bp, Arabidopsis thaliana landsberg
tcgtttttgatgttggctttgcttctgacttttttgtcggtttagatgtcggttttctaactggctttgctaccgactttgatattggttttgttgttgactttgatattggttttgccactggttttgttgtcggttttgatgatggctcaattgttggccttgttgttggtttacctgcttctttggatgatggtttagctattgattttgttgttgggttagatatcggttttgttacaggtttattcgttggtttagttgatggtttaactaccgatttagatgttggtttagttgatggtttagatgacggtttagatgatggtttagatgtcgatttagttgttgttggctttgttgttggttaa

SEQ ID NO: 176786 - DNA, 302 bp, Arabidopsis thaliana landsberg
aaaacaaaatcggaagcctcatatacaggtgttcagaggaaaatagtaagtggtgatgaaacttggagaacttgtgaagtgaaatatgggagctactgcctctggagggaggaaaataaggaaccaatgaaagatgccaaggtgaagcaaatgaaggaccagctgtttgtggctagagcatactatcccagtattgctaaaatgccttctcaaagcaagttgactcgggatatgaaacagaatatccaagagtttgagcgtattcttagtgaaagttctcaagatgctgaccttccaccaca

SEQ ID NO: 176787 - DNA, 781 bp, Arabidopsis thaliana landsberg
atggaaagaaataagattccagctgaggaggtcatccgcgggttgatcatcataatatatgggaagctcggacttttccatgatgcacagagtatgtttgaagagactgaacgcctgaatttactggctgatgagaaaacatatctggcaatgtctcaagttcatttgaattcgggaaatgttgtcaaagcattagatgtaattgaaatgatgaagacaagagatattcctctttccagatttgcctatattgtcatgttacagtgttatgctaagatacagaatgttgattgtgctgaggaagcatttcgtgctttatcgaagactggacttcctgatgccagttcttgtaacgacatgcttaatttgtataccagactcaatttaggagagaaagctaagggttttatcaagcagataatggttgatcaagtgcactttgatatagagctttacaagacggctatgagagtgtattgcaaggaaggaatggtagcagaagctcaagatttgatagtaaaaatgggtagagaggcaagggttaaggataacagatttgttcagacacttgcagagtctatgcatatcgttaacaagcacgataaacatgaagcagttttaaacgtgagtcaacttgatgtcatggctcttggactgatgctcaatttgcgactgaaagagggaaatttgaatgagactaaagcaatcttgaacttaatgttcaagactgatcttggttcatcggcagtaaatcgagtcataagtagctttgtgagagaag

SEQ ID NO: 176788 - DNA, 551 bp, Arabidopsis thaliana landsberg
tccaagtttaagaagccccttctcgtcatcggacagacacctttcgcctcctcaatcggtggtaattacttacggtgacgaggtggtggggaagcaagttagggtttattggcctttggataaaaaatggtatgatgggagcgtgacgttttatgataagggtgagggtaagcatgtggttgagtatgaagatggggaagaagagtctttggatttgggaaaggagaagattgagtgggtggttggggaaaaatcaggagataggtttaatcgattgaaacgaggcgcttcggctttgagaaaagttgtgacggatagtgatgatgatgtggagatgggtaatgtggaagaagataaaagtgacggtgatgattctagcgatgaggattggggaaagaatgttgggaaggaggtttgtgagagtgaagaagatgatgtggagttggttgatgagaatgaaatggatgaagaagagttggtggaagagaaagatgaagaaacttctaaagttaatagagtatccaaaactgactctagaaagcggaagacta

SEQ ID NO: 176789 - DNA, 732 bp, Arabidopsis thaliana landsberg
atgaagtcagtggagtccttctgggccttagcttatggaggacccatgtctttgcttcctctaaccgtaagcagtgtgcacaaagataatctagagccatgttctagaaatgttccatcttctttgacaacatattctctggctgcacctatttttagaatgatctcatttgctattcaacatcctgggaacaatgaagagttatctcgtactagggggcctgaaattctggccacagttctcggttaccttcttcattcacttgcatcctttgatatcaagcacgatagagtaggagatgaggagctagttgctgctattgtttctctttgccaatctcaaaagatcaatcatgctcttaaagtgcagctcttctgtacactattgttggatctgaagatatggagtgtgtgcagttacagactccaaaagaagctgttgtcatctcttcaagatatggttttcaccgaagcaacagctatgaggaatgctgatgccattcaggtacttctggatggatgtcgaagatatttctggacaattcaagagaaagactccgtgaacacgttttctttagatggggatgcacgtcaagtgggggaagttaatgcattggttgatgaacttttggtgattattgaacttctaatgggagcagcatctccttcgtttgctgctgatgacctccatcgattacttggcttcataattgagagtcaacaaccccatcag

SEQ ID NO: 176790 - DNA, 595 bp, Arabidopsis thaliana landsberg
aggtgcgtccaccactcgtgataggcggacgttcgtatggaagagtatcaaattctctgcctactgtttttgaaatacctccttctcctaatcttgggaatccccaagaaccaaacgatgaatcaagtgatcagatggaagaaattccacctatacaaaatcatgttcgagttctccacccatctcgaaggaatggagctaaatggtaatgatactcttagtttcaaactacttcatttcatgaaacagaattgtaaataatgaaaatacacatgtaacaggttcaaaaacaacaccgaagtatcaacacgtgttcgaaagatcattgaagggtgttttaaaggaccatggtatagctggaaaaaagtgccaattttttacaaagaagcttggttttcaacatttaaggttcggtttaagtgcatgtctctataatattttcagaatcgattgttatattaatacaattttcataatttttattttagatatggtttgagtgggatgcttcaattgagcatctggtgaaaacaaactttgaaacacttgctgctgctcggctcaaaggaatggataaaccttgcaaagtcaagag

SEQ ID NO: 176791 - DNA, 454 bp, Arabidopsis thaliana landsberg
atggaagtaagtaaagcccaaaaaaacgcagaactacaattagcattggaagaaatacaactccagttcgaggaaaccaaggtatcgctcttaaaggaagtggaagctgcaaaaaagactgcagcaattgttcctgtagtaaaggaggttcctgttgttgacaccgtgctaatggagaaactcactagtgaaaacgaaaaactcaaggtagggaatttgctctgttatgtatttgtttttttgcttcttactaaggatttcaaagctgtggaaaacaattaaaatatttaaattcatatctctttcatatgcagtccctggtaacttcgctggagctgaagattgatgaaacagagaaaaagtttgaggagacaaagaaaattagtgaagagaggctgaagaaggctttagacgctgaaagcaaaattgataatttgaagaccgccatgcacaa

SEQ ID NO: 176792 - DNA, 166 bp, Arabidopsis thaliana landsberg
atgtcgtttgcaccaagagacacacacgaagctcaggttcagttcgcacttgagagaggagtccctgccatcataggagtgttagcctctattaggctcccatttccggccagagccttcgacattgctcattgctctcgatgtctcattccttggggccaataca

SEQ ID NO: 176793 - DNA, 546 bp, Arabidopsis thaliana landsberg
agcgggaaatcaaagaagcacagaagaatgatgagaagatcaatgagatccggcgattgattctagatggcagaggcaaagattttcgggaagatgcagaaggtgtgatatggttcaaagaccgcttatgcgttcccaatgtccagtctattcgggggttgatcctcaaggaagctcatgagacagcctattcgattcaccctggcagtgagaagatgtatcaggatctggagaagaaattctggtggtacggaatgaagagagaaatcgcagagcatgtggctatgtgtgatagttgtcgacggatcaaggcaaagcaccagagacctgctggattgttgcaaccgttgcaaattcctcagtggaaatgggatgaaatcggtatggatttcatagtcggattgcctcgcactcgagccggctacgattccatttgggtagtagtggaccgcttgaccaagtcagcccacttcatacctgtcaagaccaactacagcagtgcagtattggcagagttgtatatgtctcagatcgtttgtcttcatg

SEQ ID NO: 176794 - DNA, 101 bp, Arabidopsis thaliana landsberg
atgcacctagttcggatagcctaccaagtagctctggaagcatgtgttcaagcttgtaatgatgatgctcagattctacatataagtgaaagtttaattat

SEQ ID NO: 176795 - DNA, 379 bp, Arabidopsis thaliana landsberg
atggcttggctgtcaaaggtaattgaagggtggctatttggatcattctgcaagaattgttatgcatgcatgacgtttctatgctaattgttgatgtttttgtaggactttgagtctgagaggaaatggaagctggcgcaggcgaagaaggttgctttgagagccagcaaaggaatgctagatcaggcatctagggaagaaaggaagctaaaggttctctcttcttcctttcttttctctttcagagtacttacacattccagcattagtttttaagtgaccttattgtcgatcacaggaagaagaacagcgacttcggaaagtagccctcaatatctcgaaagacatgaaaaagttttggatgaaagttgagaagctg

SEQ ID NO: 176796 - DNA, 219 bp, Arabidopsis thaliana landsberg
atgtcgactcttccgtattacaactgtcgacaaatttccatagttttaggagaacttcgcggatctaaggatcttcccttaatttatactaagatcttagccgtccaaaagaatattgaaactaccacactctcaaagtttgactattattggattttgtccgttgatgaccatgtaaatgtgtctctaacatattcaaacgcttttagactaatccaa

SEQ ID NO: 176797 - DNA, 441 bp, Arabidopsis thaliana landsberg
atggtaaaggtaaaagcccattttcctctttagaccaaacaaatcatgattcatgaaatcctttctttgccaaaacatggaaagttaacaaaatgttttacaaggtcgggagatcatgttgccaaaagtcccgagaagagagagcttcgtcgtcatggcagtgagaagattcataggagaagttctcatggttatggtgaaggcagaaaacgacacggagatgaacgttatactgaagacaaggcaggcaagtacgatggtagaagacaagagttcagagaactggagagggttttcaatgataagttgagtaaggagaagaaactacaaagagaagagaaagagatcgtaaggatgatgaacacagaagaaaaatatgccgccaagaaacgagagtggggattacatcatgtcccggctcatgagatagggcagacgtag

SEQ ID NO: 176798 - DNA, 433 bp, Arabidopsis thaliana landsberg
ggaagatctaaagaagttaaaggtgagatgactagattgatcagaatgtttttaaaattgaaatgacttgtttataggttagtacctaacttgtttatggcctacattgatgatgatagggtattggggacaagagagcagcttacatagttgagctccgcgaagaatctccatttaaaacggtaagtgccataaagtgttacaaatgagaagttgcatctctatcatgatggatttacaataaactgttgatttttgtagcatatattcactagcaaataagacttgaaatggaatgcttttagcatatagtcactagcaaattcagttttttcaatgtgaagttcaatattgttttggtttgtatgtaagctttttgtattttctactgcagcttgatgatttgcaaagtatcggactctcagcaaaacag

SEQ ID NO: 176799 - DNA, 342 bp, Arabidopsis thaliana landsberg
ccactacttgcctcttcataaacgccagttctatcattcccgaaccggtcaggtgattcatgttcctccttttgcatagtctttgaatttcacgttttaatatattatcagagtatactaattggtcctaattcacgatactctctggtttgattcttctcatttaaattcgtatttctgcttcggtttgtatatccacgtgaattttttattgtcactaaccaaaaactgcatgtttttgttgttacaaagccattgtcacttgagcaagttatgtctgaccgagatagcgaaaatgacgtcgacaaaaatgatgatgctgcacatctcgaagaaagccag

SEQ ID NO: 176800 - DNA, 663 bp, Arabidopsis thaliana landsberg
gttgcagaagctcccaacacttgtatccgttttgcagccaaagattttcttggtaagtattctcttccactctggtgaagaaatatttacatcctgcatctgtctatattcttctatctaataccatattatgaataggtccctgatgctgtcaatcagaggatcagtttggctgcgataaagaccatctcaatcctgaattactttgagaacaagacgctacatgtaccaagaattgtagacaatccaagcgtagagattacgacagactttgcctccaaattgagctggagaaaagtgaggcaacgtgaaagcttcggtattgcaagattgaaaggttggcttctgatggaagatgggaaacacagattagtttccgggttggagcaggaagaaagttcaggaaaggctcggccattgaggcattggggctcagtggctccggaattacttttagacgcattactgaaaatgggaataaaaggatccatcgaacagagtacaggtgataatggatcagaagacaagagtataatccatatagaaaatcctaacagtggcctgatagagttctcagagatgggtactgctattataacaggcgatgagaatgtagtctctcaggtcttccaggcgattgatggagttcttgacggtatatag

SEQ ID NO: 176801 - DNA, 1305 bp, Arabidopsis thaliana landsberg
atgaagaagaaaaaagatttgatattcgtgcgtttgattgttttgcagtgggaacatgagtttcagaatcagtttctctgtggcttcaaggtaatttatattttgtcttctctccaagtttaaggattcatatatacattttgaatcagattcttatagggcagtttacttatacacagactatcgcaatcattccactaggatccagcggccttgttcaactaggatctactcaaaaggtttgcatatataaatgtataacaatgttttcttgttgtgagtcatggtctaattacttactgtctttgaatgtatgtgcctatcaatctttagattcttgagagcacagagatattggaacaaacaacaagagctctccaggagacgtgtttaaagccacatgattccggtgatctcgatactctgtttgagtcactgggagattgtgagattttcccagctgaatcttttcaaggatttagctttgatgacatcttcgctgaggacaatcctccttctttgctcagccctgagatgatctcctctgaagcagcttcttcccaccaagatcttagcaatggagatgattatgggttcgacattctccagtcttactctctggacgatctataccagctgctcgctgatccaccagaacagaactgctcttccatggtgatccaaggagttgacaaggatcttttcgacattttggggatgaattctcaaacgcctacaacggctttgccgcctaaaggactcttctcagagctcataagcagcagtcttagcaacaacacttgtagtagttctctcacgaatgtgcaagagtactctggtgtgaaccagagcaaaagacggaaacttgatacatcatcagcgcatagctcaagcttgttcccacaggaggagacagtaacaggtcggagtttgtggattgatgatgatgagagatcaagcattggagggaactggaagaagcctcacgaagaaggtgttaagaagaaaagagcaaaggcaggagaaagcaggaggcctaggcctaaagaccgtcagatgatacaagaccgtatcaaggagctgcgagggatgattccaaatggagctaaggtaaattaaataataatatagtttagttttgggcatccaaattagagattaacaaatgcattctctaataaatttcgatatataattcaacagtgtagcatagatacgttgctggatctgaccataaaacacatggtgttcatgcaaagcctcgccaagtatgcagagagactcaaacaaccatacgagtctaag

SEQ ID NO: 176802 - DNA, 323 bp, Arabidopsis thaliana landsberg
atgacggtatttggtccgttgctaccgactgaatcggaaagatcccttatggaaagagtcagacaagaactcaaactagaactcaaacaggtataattaactaatatgttatgacttatgagtcacaataataatacgtttatgttactatttattttcttgttatgacgtttgtttatttttcggataagggttttaaatcgagaattgaagatgtgagagaagagataatgaggaaaagaagggctgggaagttgccaggagacacaactactgtcttgaaaaattggtggcaacaacattgcaagtggccttaccctacg

SEQ ID NO: 176803 - DNA, 975 bp, Arabidopsis thaliana landsberg
atggttctcaatacaaagaagcgaattgagtaccttgatcagtatggagactatcacaggttggtatctctgaacatttatgttgactgatcttctgttaccttgttatatgtcccaatctccgtgtgatattttgcttaaatggaaacctcagtcaaatcttaactgcgcttatagctaaactggaatttatactgattccttttgaccccaaacacttttttcgtttctaaatggagttaccaatcactctcttgcattcaatccccttcttgtattatcgttagtaagtttcttataactttccttgttgggcagcgttatgggtggtagattggaatgcacgatgcaaaacatagcagacaatttttttaataagtttccatctagatgccacggcagtctagaaggtaaagttttttgaataagttgcattgttttctgtatatctgtattaaggtgttacttcttcccatgatcttaccagacaaactggatacatatattgtgtacaacgaacgaagaaaggtcacttcatcagctaagaagaagaaaccacacgcaagtgctgcattacaccaggttgtctttctctagccacttgtttagtctttctttgcctattcctttgtcttcttgcattgatttggcattcaatggaacgaaaatctttattcagcttgatttaacttaactttcaaacttttctctctctttgcagactccagatggtgcattgttggatatactccggaatggatatgacctccttacggagtgtgatatcaaactccccatggttagttcatagatacacatcttttgcatgccagtgtgaccttaaaattgataattaacatttttattctactcctccagattgaagctaatgataaatatgttgattccccacctccgtatctcattcttctgcatcctgccctcggccctctttgggaagtttcgagacagaaa

SEQ ID NO: 176804 - DNA, 846 bp, Arabidopsis thaliana landsberg
atgtgcattgtacctaaggaaacggttgaggtaatagctcaaagtattgggattactaacttgttacctgaagctgctcttatgcttgctcctgatgttgagtatcgtgtccgagagatcatgcaggttaccttctttttctaatcatgtctttgtgttcttgaggtgagttttctggtatcagcatattgatctttctgtaccttctctttggatgtcctttcaggaagctatcaaatgcatgcgtcactcaaagagaacgactttaacagcttcggatgtagatggtgctctcaacttaaggaacgttgaggtacaaactcgatgacctatttcttacttcccattatctagagttttggttgtgtaagcttcctggtttttgtagttgagtgacaaagatatatggtttctagttttgaggtttggctttactggtgcatatgaataacaccatctgttacacattgctttcacatatttcactattgtagtcaactgaatcaaaggcatctttttgagagtgattatatctattgcagccgatatatggatttgcctcaggagggccatttcgttttagaaaagctattggacatcgcgatttgttctacactgatgacagagaagtggatttcaaagatgtaagatgttggaaaagctggcatgttttttttgtttcagttaaattcttcattttgggttccttatgttttcaagaaatgtcatgattctaggtgatcgaagccccgctgccaaaagctccccttgatactgaaattgtttgtcactggctggctattgaaggagtgcaaccagctataccagaaaatgctcctttagaag

SEQ ID NO: 176805 - DNA, 690 bp, Arabidopsis thaliana landsberg
ctggccaaaatttatgagaagtatcaggaggctgttgatgccatgaggcatgagcaattaggtagaaaggaagctgagatgatacttcaacgggtatgatctatttaacttgttatcaccaggtctttgtttaaaatttagattaacaatcttttccacttttggttttgtctatattctctatgtttcactagtgatttttcaactgcagttcactaatgacttgagaataatatttttcttctcctgttaacttactcttggtatcctgctttgtaggtgttatccgaattagaagagaaagccggatttatccaagaagaaagaggtatgatctacttctgtgcttctggagccatatgttttacgctcccaaagatttctttcactagtaatatatttgtatcttgttggagacacgcttaaatctgtttttgttcccaggggagtatgagagggtggttgaagcttattgtctagttaatcaaaaactccaggattctgtatctgaacaatcaaatatggagaagttcattatggagctaaaggtacctgatattgttatagtggttgttcaagatgcgttcttgtgctgttcttatacatttatcttattgataggctgacttgaggagacgggaacgtgaaaacacactattgcagaaagatatatctgacctacagaaacag

SEQ ID NO: 176806 - DNA, 1026 bp, Arabidopsis thaliana landsberg
atggcaggagttgatgatgcgattcaaactcaaaatatctttggaaggtaagattgctttacattttaaagtagatggagaatattgtagttggtaaagatttataacagaatatctatattaggaagatgcttaagtatgaatcaagtatattctaaaaatatatctaggtattccaaatttaagatcacatagtatattgtgtgtttgtttgaggtaaatggaattactgcatatctaagaaccgaattttatgcttttaattgatttttttttttggtgagctggggggagacattctttttattacttcaaaactaaaaattacaaccgcacattacgtattctcgacacaccgtttgcgtcctccagcaaaattggggttacacaatccggtgcagagtcaaataaatgaaaaccaagaggtaaagtaaacgcatagttagctaacccgtccgcaagacgattagcttccctatacacatgagaaacttggactatccaatcctttgataaaaagccatagcacaaacgtactaggaatgacagaggatgagaatcgctaatccctgtcgttaggaaaccaaccacgatctgagagtccacctccaactcaacccgtctagctcccctcccccaagcgatgaataacccatagtagacaccccacaacttagtcaagggtgcagaacaaacacctatattaaccgcaaaacctccaatccacgctccattatgatcccgtaaaaccccacccgccgttgcaaaccccggattaccccgcgaagccccatccgtgttcaactttacccaaccgtctcccggtgatacccaagacaccgaccgctccactctactcacccgcacctcattccccttcacagaagcattcgctatcgccacttcctccgccaaatccttaataaacttaacacggtccctacacttaccattcccgccaaagatgttgccacacctccatttccatccccaccatactgccattacaaacaccgtcggccatga

SEQ ID NO: 176807 - DNA, 1428 bp, Arabidopsis thaliana landsberg
ggttattgtgagaaaagagtggtggaattagttaataaccttatggaggaagaggtcgtgaagtctgagaatggtagtttagagtttcatgatgacactttatcatcatcactccaggttaatggtgttcttaaagagaacgagaatccggatgttgattttcttgaggatttagattcttactgggaggacataaatgataggttaactatctcacgagtggtgagtgattcgattataaggggaatggtaactgctattgagtctgatgctgctgagaagatagctcagaaagatcttgaattgtcaaagattagggagactttgcttctgtaccatgttggttctgaagagaatgaatcctctgagtcccgtttgattcatgatgaacttactcaaggatcttcgagcagtcttaaaaagaaagcgaggaaacagttgttgatgctcgttgaagaactcaccaatttgagagagtatattcacatcaatggatcaggtgccactgtggatgattcattgggtttagacagcagtccgcatgagaccaggtccaaaactgtcgataaaatgcttgattctttgaagagcattctagagactgtgttgaagcggaagaatgatatggaacttccctcctcgtggcagcaggagcatgattttcaaaaagaaattgagtctgcagtggttactagtgttcttcggagtctcaaggatgagtatgaacagagattgttggaccaaaaagctgaatttggtggtaatagaagtctcatacttggaaatatcaaagagattactggtctgcgccaggaactagaggcgattcgtaaatcgtttttggatcatgaaaacggggacgaggcaggagaggtaggggatcggaaaagagtggagcaattacaccgcaagatgtcaggaagccttaattcagtttcttcagtttgggaaaatggtaagcatgaagagagttctactggcttaatacctgagcataacgagaccttaagacacatgtctcctgatgagatgatcaatcactttaagatcgagatgaataaaatgaaaagagaccatgattataaaatacaagagttgacagagcaatgctttacctttaagcgcaagtatctgaatttaacggaaaggggttctttttcttttgtggggaaggataaggagctaggggcgctgaaaaagaagatcccatttgtcatctctaaattggataaaattttgatggaagatgaaaagttggtgtctgaaggcaagaatgatgctggtttaaagcgccaactggattctcttcttctggaaaatcgtcaactgaaagattcactttcagacgctgctgagaagatgtcacagctctctcaggctgaggcagaacatccagagttgattcgaaagcccgaaaccagatgttga

SEQ ID NO: 176808 - DNA, 1205 bp, Arabidopsis thaliana landsberg
atggcattcgatacaacgaaagtttcgaaaccttgtagcagctattttcaccaaagagctctgttctactttgatcgggaaactgtaacaatggtcggaattcttctggggttgcctgggaagtgggcagaagatgagcttgagccttctgatcactacacaaccaaaatcggtggtcttccggtaataactccttcctagctctctctgttccttcctttcatagaaagctcaattctttcgttctgatttttgatcaaagtgcgtttttaggattggccgccaatacccgatgatgcactgaaaccagaactactcaattgttgttcatgtggaagtaaactttctctcgtagctcaggtttttgttcaaatccaaagcttcactcttcttaggtttcaagagtttaagaagctgaataattagaacaatttggtctctttcgttctctgcatttaggtgtatgccccaatctcaactgaaattttagacatccaagagcgtaccctctatatatttggttgcttgatgcctaaatgtggaacctctgaacaaaggtattgtcttctttttttgttacttatgattctttgatcactctcaatcacttatatgagagaatgatctcacggtctgaaatttgctccttactgtgtcagttggagagcttttagcattcagaaagctatagcaaaagagaaaggatcaactaaaatagcggatttgcctgtggcctttcctaaaacacatcggttagacggtgatgatgatgatgatgatgatgaagattttgattttgcgagtttagctaaggcgctggcagaggcttcttctgctgcggcttccattacgaagaaacaaaagagtaaaccaagtggcaatgctagttcagggactaaagcaaagccttcacctttgaaatctgaaacaagagttgaggatcatattaaacttgagactggtgcggtggttccgtgcttctacatttatacaaaggaagagatcccctcaaaagaagttgatcgattctcacagaattattcgtctctgtctattaaggataaaagaaccggcaacaatgatgagagtgaatccgaagaaaagtgggaggatgagaaatatgaatatgacaaagccctgaatgcagataggacttatcttaagttcaaaaaacggctagatgcaaatccggaacaatgtttcag

SEQ ID NO: 176809 - DNA, 3135 bp, Arabidopsis thaliana landsberg
acagctagttctttggcttgtgctcagaaaggctgggttagtgttgatctggacaaacttcaatgtgaatactgtgggtccattctacaatactcccctccagaagattcgttgaatcctctcgaaggtcagttcttgttactgtaaccaaacttatcttcgttttcttcttggaatcaaggggtggggggatatcatttaagtattcgtctttttaacatttaagtattcatctttctcttatactgtacggaaaaagatagtatctgacactctttatgagtatcttcagagccaagagttttggtcagtttaccaacatctacaatgaaagattttaactttttcgctgtcatttaagcacgaaagatcattattcatgaatcagcctcgttatatgctgctaacattttatattcctcatccatctttgatgaacagctgataccaccggagaaaaattctctaagcagcttgatgatgcacatgagagctcttgtccttgggtaggaaaaagttgttcagaaagcttagttcagtttcctccaactcctccatcagccttgattggaggttacaaggatcgttgtgatgggctcctacaattctattctctaccaattgtttcgccatctgcaattgaccagatgcgtgcttcaagacgaccacaaattgaccgccttttggcacatgccaatgatgatctcagtttcagaatggacaatatctcagctgcagaaacgtccaaagaagaggctttgagtaattactctcgcgtaagaactcaggattcaggaatatcaaacttactagccataaactactattgtttcttaatttatgttttatcttgtaggctcaaaagctgataagcctatgtggatgggagcctagatggcttccaaatatccaagattgtgaagaacattctgcccaatcagctagaaatgggtgcccttctggaccggctagaaatcaaagtcgtctgcaagatcctggtccaagcaggaaacaattctcggcttcatcccgaaaagcctctggaaattatgaagttttgggtccagaatataagtcagaatccagaatacctttactggattgtagtttatgtggtgtaaccgtcagaatttgtgatttcatgaccacttctcggccggttccgtttgctgctataaatgccaatcttcctgaaacgagtaagaaaatgggagtgacacatggcactagcgcaacaagtggaatcaatggatggtttgccaatgaaggcatgggacagcagcaaaatgaagatgttgacgaggctgaaacttcagttaagagaagattagtatcaaatgtaggtctaagcttttatcaaaatgcagctggtgcatcatcctctgcgcagctgaacatgtctgtgacccgtgataattaccaatttagtgatagaggaaaggaagtgttgtggaggcagccttcaggaagtgaggttggtgatcgtgctgcttcatatgaatcacgagggcctagtactcgtaaacggagcctggatgatggtggaagcactgttgataggccttatctacgaatacaacgcgcagatagtgttgaaggcactgttgtcgaccgtgacggtgacgaggttaatgatgattcagcagggccttcaaagcgtacccgaggttctgatgtgcatgaagcttatcctttcttgtatgggcgagatttatcagtaggggggccaagtcactcactggatgctgaaaacgagagggaagtaaatagaagtgacccatttagtgaaggaaatgaacaagttatggcttttccaggtgccagagactccacacgtgcttcctctgtcattgcaatggatacaatttgccacagtgccaatgacgattctatggaaagtgtggaaaaccatccaggggattttgatgacataaattatccctctgtggcgacagctcaaagtgctgacttcaatgatccttcggaactgaatttcagcaatcaagctcagcagagtgcatgcttccaaccagctcctgttcggtttaatgctgaacaaggcattagcagcataaatgacggtgaggaagtactcaacacagagactgtcactgcccagggaagagatggaccaagtttaggtgtcagtgggggtagtgtgggaatgggtgcaagtcacgaggcagaaatacacggagctgacgtttcagtccataggggagatagcgttgtgggagacatggaaccagttgcagaagtcatagagaatctaggacaaagcggtgaattcgcaccagaccaaggccttactgatgattttgttcctgcagaaatggatcgagaaggtaggcttggggatagtcaagatagggtgtctcagtctgttgtaagggcggatagtggttctaaaatagttgattcattgaaggctgaatctgttgaaagtggtgaaaagatgagtaacataaatgtgttgatcaacgatgacagtgttcatccatctttgtcttgcaatgcgatagtgtgttctggttatgaagcatctaaagaagaagtgacccagacttgggagtctcccctcaacgctggctttgcactccccggatctagttacactgccaatgatcaaggtctgtagatttcttcttatggttgattaacctatccaaacttcatcacttataaaaagtgtaataaatatatgctggttcatttttcagggccacaaaacggagacagcaatgatgatattgcggagtttgatccaataaagtatcataactgttactgtccttgggttaatgaaaatgtggctgctgctggatgtagcagcaatagctcgggttcttcaggttgtgctgaggcagtttgtgggtggcaactaactcttgatgcccttgattcgttccagtcgcttgaaaaccctcaaaaccagacaatggaatcagaatcagctgcatctctgtgcaaggtttgttaccaacttatccgttactttattttcttccttctcaggatgatctgacactaacactaactttgtttcaactcttttgtttgtaggatgatcaccgaactccttcccagaagctcttgaaacgccactcttttatcagcagccatgggaaaaagtaa

SEQ ID NO: 176810 - DNA, 756 bp, Arabidopsis thaliana landsberg
atgaaagcttctgaactttacagtctcgaacactcccggtcagtaactgcacaagaattggatatcaaagaaagggatgtccacgtttatgctgacattgtcagttcgttgaagaaggaaaacgtatcccttaagaacaagttcatacattttggtgaagatcaatttaaagcactagatgtcacgaggttaagcattgccaaatgctcacatctaactgaagatagcaagaaactggagaaactaaccagagatggtatggctatttctgataaaatgttgcaactgatatgtgaaaacgtcgataaggcttcagtattcgcagacactgttcaatctttgcagattgatgtacaagagttgttgtctgagaatctgaatctccacgatgagcttttgagaaaggatgatgttctaaaggggttgtcttttgacctcagcctactacaagaatctgcttccaattccagggacaagaaagatgaaacaaaggaaatcatggttcatgttgaagctttagaaaagacactagctttgaaaacctttgaactagaagatgctgtttctcacgcccaaatgcttgaagttcgactgcaagagagcaaagaaataacccgcaaccttgaagtggatactgaaaaggcaaggaagtgccaagaaaagctgtcagcggaaaataaagacattagagcggaagctgaagatctcttggcagaaaaatgctccctagaggaggaaatgatccagacaaagaaa

SEQ ID NO: 176811 - DNA, 209 bp, Arabidopsis thaliana landsberg
actgcaatgagtttgtagagaacgaagaagagactattgagcctgaagaaaccgaagaatacgaggaggaggaggaagaggaagaagatgaagatgaagatgaagtgatgggcattgagaatgttcaagtatcaagaagatgtgtccacggcgatcgggataacaggggattgctcaattgggaatctttctgcgctgctacttcctaa

SEQ ID NO: 176812 - DNA, 392 bp, Arabidopsis thaliana landsberg
atgtcacaagttgttatcgatctgaaagaatgtcttgctactgaaaattcaacgagaagtgagaaagacatgagttctcatagttctgatcttgatcgtagcatgaacttttacaccgacatggttcctagagctaggtagcatgtgcaaagaagactcagtcactttgatgtatctatgcttgtttttattgtttttgccaatatttcaaagccataggctttatactctgtaacagccaaaaagtttcattattttctaatgataataacagtttagcaaagaaaaaaatgtatctatgtttgtgtgcatggacttggtcttgttttagtttcgatttttttatttttaggaactttgcacgttgtggtaatctcgcgtacaactattga

SEQ ID NO: 176813 - DNA, 523 bp, Arabidopsis thaliana landsberg
  unsure (1)..(523): unsure at all n locations
atgatgtatgtatctgctcgatccggttctgcgaagcgaagcatctcaagtctacctcatctctctcagagatttaaacaaacaggtaatctgcactatntgtttcctctccctcttcgtcgataagcgaaatgtcttgattgtttagggttttaggagtaatgggatttgcaaaaaaggtttaaagtcgattcctttgaagtaagaaaacgagaaaaggttttgatttgaacattttgttttatccatgaatttgcagagaatgagattgttcaaatgtttagtgttccgaatcatgaggaatctgagaagcctcaagagaagtggaaattatctagaaaggatccgtcagtgcggatgttggatgagagattcattaggatagtgaaaatcttcaaatggggacctgatgctgagaaagctcttgaggtgcttaaactgaaagttgatcatcgattagttcgttcgattcttgagatagacgttgagataaatgtcaagattcagtttttcaaatgggctg

SEQ ID NO: 176814 - DNA, 136 bp, Arabidopsis thaliana landsberg
gaagtgcttcgtcaaaccccctctcactgctgttatacagatgcctcgtggactagccctaaaagcaaagtggcaattggatggactttacacgactcaagtggaagatacatcctcaaaggctttgcctcggtag

SEQ ID NO: 176815 - DNA, 332 bp, Arabidopsis thaliana landsberg
atgttggagtttaaaaagaccactatttggtttcaaggagttgttgagaaagacgtaattaaggtaaagtgaaatcaccttgccagacttagcatcgcacttgacacctttccaataacaacaatcactgctcttgtcccataaacttactgatgcaaaataaggatctagctaggatagagggatcggcaacttgtgctcgaactctaaatgagcattcctttggacatggcggtgattgtgaagcgatcgacaagcaaatgtgggtagaacaactaaaacccaaaggaatgaatacaacggagcaccagacaagcaatatgagagcatga

SEQ ID NO: 176816 - DNA, 168 bp, Arabidopsis thaliana landsberg
atggcttcttatgaatcacaaagagatgtcgctgaattggcgacccttgaacaaactaaaaagaatgtggaggatgtcgaggaggttctaaagaaactcgaacaaacttatttggggaaggaaaaagtcacagatgatacgcttttgagtgacgaagaaatggaaaaa

SEQ ID NO: 176817 - DNA, 436 bp, Arabidopsis thaliana landsberg
atggcacttccagcgtggtgccgcgcattgtgggccggcttgcccagtccgaaggaattgtgcgccatcgctgacgtctccggcaagttctccatcccggcggtcaaggtcaccggcggccagcgcttcgccttgctgggggttaataagggagacctgcccgccgtctggaaagtgctggacgacgccggcatggtttccgcccgcgcttattccaagggcctgcgcccggtgaagacctgtgtcggcaccgaatggtgccgttttcggtacccaggattcctccggcctgggcgtcaagctggaaaagctcgcctgggggtcgtggacgccgctcaaggtcaagttggcggttttggcttgtccgtgcaaatgcccagaggcctccatcaaggacatgggtgtgaaaaaagaagagtccggctatggcgtcatg

SEQ ID NO: 176818 - DNA, 232 bp, Arabidopsis thaliana landsberg
ccatcaccttcggccaccacctccgtccaccaccacctccggtcactaccacctccggccaccaccacctccgatcaccaccacttccggccactacttccgaccaccaccacctccggccaccaccacttccggccaccacaacctccggcaactaccctcagccacaatcactcccggtcacaaccacctccggccatcaccttcaaccaccaccacgtccggccactga

SEQ ID NO: 176819 - DNA, 658 bp, Arabidopsis thaliana landsberg
atggaaagcctcaaagtgtgtgttgagaaaaagggaaacgaatgtttgaaattctggaatgctccaaatgcaaatggacaaaacaataatggtaacgagagtgatcaatccaaattggggaagtcttgtaagttgtaacagctcatgctgctacttcgttttaatcatctatcttaattatttagtcttcgcataagtctaaatttgggaaaacaagtaggaaaataaataactagatttagaaactcaaattcctttgataattctttttctttctatgtgtgattggatttttggactttgtggtcgcaatgcaaatgttatgatacattacggtcaaatgtatgtgtaaccactaagccaaggaggatgatgggcaagtggtctctggcgtgagggttcgacccatattctttactatgatgaaaaaggctcacgccatattctctcgatcaacataacaatatcattgaattataactattattgtcaactggatttgtagaatttgcggggcaatgtaaatatgatgttgcattacggtgaaatgtatatatgtctaaccaaaagaaaaacctctgaaagtcattagctaattcttttcttctctatatatgtagttggatttgtggaacttatggccacaatgcaaatgtga

SEQ ID NO: 176820 - DNA, 266 bp, Arabidopsis thaliana landsberg
actaatcagctgctcttctgcaatgaaaaagcactcaaaggagaacgctctcgctcttcagcaggagactctcgaccttgagaaccctgaatcctctcctcgttcctccggccggagctgttcctctgctttctcgcgtctggttggtctccgatgtctcatcgttttggtcctaagctgtgcgattcttctctctgcgatcttctggctattccctcgtcgatcggtgtctgaattcaaagctgatgggacagttaaactcaatg

SEQ ID NO: 176821 - DNA, 92 bp, Arabidopsis thaliana landsberg
gattcatcagtcccgatccccggtcattgccaaatgagcctccaaacaacaatccttcaaccggattaacatactcgacgtacaatggtttc

SEQ ID NO: 176822 - DNA, 518 bp, Arabidopsis thaliana landsberg
gaaagcaaggaaactgagattcccgtggcattttgtcgtggtcttgcaacggcacgtcttcatgggagagctcaagttattcatgatgtagtttcagatccgcaggactcatcagactcgatggaaactccatgcggtgatctgatcttttacttggatggtgctcacagtccagagagcatggaggcttgtggtcgatggttctcttctgcagtcagaggagacaaaagcttatccactgctgtcaatggttacatgagacatggggagtatggtacagacttaaacagagtctccaaacaggtattcaagaccaacaatgatcaatgcaatttctttgttaacacaactcttttgctttactattcaaggtattgcacattgatttgtgtttcaaacttttgatctgactttgtgaagctttcctatttgtcgacagattcttctgttcaactgcatggaagtgagagaccctcaagtcttactttcaaagctggtcaccacttgcgcttcctcag

SEQ ID NO: 176823 - DNA, 231 bp, Arabidopsis thaliana landsberg
ctaaaacaagaagagataagagagagagaagagttaggaagtggtgagacccatacggggaatggaatgttaggggaagaggaagaagaagaagaagaaaggaagcaaaatacgttggttgatgaagaagctttggttacttcttttcgttttttaggaaaaaaacaaattacaaagtcttctaattacgaaaacgacattctttttagattagagatattttctgtgtaa

SEQ ID NO: 176824 - DNA, 164 bp, Arabidopsis thaliana landsberg
atgatccatcccatcggggggtattatcgcgtgcgcgactatttcatcgactatctcgatactgcattccgcatcaaaaaccctcacctatcggctagtcgctcggcgctcctgaagaccgaagggcaattggcccgtagcgccttcttagaacccagtaccgg

SEQ ID NO: 176825 - DNA, 57 bp, Arabidopsis thaliana landsberg
atgggccatccgatcgacgctgggcggccaggattaaatcgtcacccacttgaaccg

SEQ ID NO: 176826 - DNA, 783 bp, Arabidopsis thaliana landsberg
atacagagactggatttataactccgggggatactcaagtgcgaattgaaagaggggaacttcttgccggaactctttgcaaaaagacccttggtacatctaatggaagtctcgtgcatgtcatttggtaagttgcacatcaagattttagagtgtttattccggtttgtcacatttgcttactggctaaattttggtaccttagttaacttcacatcacatgcagcattgttgggaatatctaaatgtagtaattagtttcatgagctcttttgttttaattcatttttacttggcttccagggaagaggttggtcctgatgcagctagaaaattcctcggtcatactcaatggcttgtcaattactggcttctgcagaatggttttaccatcggaattggtgacacaattgccgattcatcaacaatggagaaaattaatgaaactatttccaatgcaaaaactgctgtgaaagatcttatccggcagttccagggaaaggaattggaccctgagcctggccgaactatgagagatacatttgagaacagggttaaccaggtatattcaagacaataattatttgattttcgtttggttgtcagtgcagtttttatatgtgctgactcataaacttttcttgtaggttttgaataaagctcgtgatgatgctggaagtagtgctcaaaagagtttagcagaaaccaataaccttaaggccatggtgacagcaggatccaaaggaagtttcatcaatatttctcaaatgacagcgtgtgtcg

SEQ ID NO: 176827 - DNA, 113 bp, Arabidopsis thaliana landsberg
acgtatatgttcaagctcttgaatagtagcggtatcacagaatctggtgaaagtgagaaagttttgcttttaatggaaagtggtgttcgtttacataccacagcttatgtcag

SEQ ID NO: 176828 - DNA, 1580 bp, Arabidopsis thaliana landsberg
atggagaatccgcaagtgtgtgaatgttaccacggagatgtggaggaggagaagaaaaagaaacagaacaatacgacgtcgccggttcacgtcgttcttaagattgattttcactgtgacggctgtatcgctagaatcgttcgcttatctcgtcgtttagaaggtacaatctccgttcagaaccctagaaatctaaatcgatgaaccatggattcgttatgtttcttaacacaatctcgtttcgcatttatctcgggttcgatttctctgttttgtggattttcatggattcgttgctgaaatctcagtcgaatcatccgtgttaatcgtttgctttgtttcgtttcttctccgataatggtttcgagcatcgtgaaagcgattgagagtttttgttaaaccctaaaccctgacgaagttttgttctcttcctcgtttatttacgtttatcgatcttcttcttagatctagtttcaggatcataaatattctctgtttctgctattgaaaacacagcgattgtaaagaaattagtcaatttttgagtctttgattcatgatttttgttggtatacaagaaattgctatcgatgctcaatggctcattgacttgttctgattgttgtactgtatcaggagttgaaacagtgagagcagatcctgattcgaacaagctgactctgattgggtttatcatggatccagtgaagattgctgagaaacttcagaagaagagcaagaagaaagtggagctgatatctcctaaaccaaagaaagacaccaaagagaacaatgagaaaaaggctaatgataagactcagactgtggtaagctctacattcattgcatacgttctctgattaggacatttgtttctcacaaacacttaaaccatgactagaatgtgataactagtaaggaagtaagtagtatcaaaaggtagattttctcaggcttacttgatcctcaagtaacaatcttcttaactcgtaccattcctttgtagataatgtactatagccgttatcttctaggtgatcatatgggttaataagtactttagtctttcgaaattacttgctatgacattatattctctgttcttcttcttaggttgctgtgagcacagtggtgttgaaagtgaattgctcttgtgatggttgcatcaagagaattcaaaaggctgtctctacgaccaagggtaagaatttttcctgactattactttgtgtatttggtttgactcatacagaacttgtttgcggccattttaatctgtgtctaatggtattgagtatgtgattttgtcaataggagtgtatcaagtcaaaatggacaaagagaaggaaacggtaacagtcatgggaacaatggacatcaagtctgtgacagataatttgaaacgcaagctgaagaaaaccgtccaggtcgtgcctgagaagaagaagaagaagaaagacaaggacaatgcagagggaaaccaccaaagttgggtctccttgtcaacctggaaatggatgcactcatgggattgggccttacaggttcatggaaggcccaatgactgggtttttcagtga

SEQ ID NO: 176829 - DNA, 465 bp, Arabidopsis thaliana landsberg
ggccggtttgaaatcctagcgttatcaacatcttatatagtggcaactgatggaagcttccgtaaccgaactggaaacttatcggtttcgcttgctagccccgatgggcgtgtgattggcggtgccattggtgggcctttaatagctgcaagtcctgttcaggtttggtttcacttttctcttgagctctcatatttcttgggattgaataaagattcttgggtctatcaggttattgtagggagctttatatgggcagctccaaagatcaagagcaagaaacgagaagaagaagcttctgaagttgttcaagaaactgatgatcaccacgttctggacaataataacaacacgatttcgcctgtccctcagcagcagccaaaccaaaacctgatttggtcaacaggttcaaggcaaatggatatgcgtcatgctcatgctgatattgatttaatgcgcggttga

SEQ ID NO: 176830 - DNA, 152 bp, Arabidopsis thaliana landsberg
aacgcacaaaccaaaaccgaagacggctccagaaaagaactagtagatgcacctgcatcgatgtatcatccgagagacaaactccaaacacgaaactagtccaccagagtccacgcacaattgagaggaagcaaacagcgaagaagaactag

SEQ ID NO: 176831 - DNA, 71 bp, Arabidopsis thaliana landsberg
atgcagtattggtgtgtccgcttatctgattcagtagtgtcgaccgtgtgtagaccgtcaactgggtacac

SEQ ID NO: 176832 - DNA, 588 bp, Arabidopsis thaliana landsberg
atgagagagaaagcccacaagcatcctcgaggtaagggtatggatgagatgctggcctgcgaagtgagggaggagtcgaagtcaaggatacccggatcggagaggccgagtgggccgaaaggtgaagtcaagaaggcccgaagtggattcaaattcgtacgttcaaataattaattcgaagattagaaacggatgcgtttctaatagaatgattgaaattaaataagaattaaatgaattctttggatatatattgtgggtcaaagaccatgtaaagacacacgcattttttggtgcaaattagctatacatttttttttacaatactcatagttttctctataatcatctatttactttctagtgtatttgtcctcaagagtaatccttcccactaaacaaataaatacttgagtgtgaatccgacatctacaccgtctatcttgaatgacaccttctaataagaaagtccacgccaacacatttaaagaatgtaatgagttgactgacgtgaattcagagttctgtaggatcaaagcggatggacaagaacgagaaaggcgtaggactattgagcgaccgttctaa

SEQ ID NO: 176833 - DNA, 93 bp, Arabidopsis thaliana landsberg
tcttctgttctgcactccaacccaaaatcaacggggggaactccggcatatatagcaccggaagttttttgtcgatcggaatacgacggaaag

SEQ ID NO: 176834 - DNA, 350 bp, Arabidopsis thaliana landsberg
cagctctagcttggacagtgaaaggacgagacttgaagagaaacccaggattaattggagattttagagaaaacccattactcagattcgcgaaattcgatattccggtggagaatttcaaggaagggacgagaaaggttgctgaggaattaggtctagaactgttgaagactgtagagaatgttccgtacgaagaagatgaagtagtcatggaaaccatttttggttaccggagacgagtttatgttcgtcttctttcgaccagtgttacacgttcaatagtgaaaccgagagatgatatagtcgagacacgacgcactttatatcatgccaaaatacacattaactaa

SEQ ID NO: 176835 - DNA, 354 bp, Arabidopsis thaliana landsberg
atgcaagccgtccgcgacttgattcgcatatacccggaccgccgtgctgtcgacaacttcatcattggtcttgccggaagcggtcccagaacggcaataatattcccgccgattatcttcggcaccggcagtggaccggtgaaccagcggagcattcaagttccttcaatagctaaaaacgcgctacaggaaaagcaagctgtttatgttggccagggtctgagccggtggggcgcaatccatatcgcggaccttgcacagctgtttgtaaaacttgttgagaaggctgttaacggtggaaatgatgatttctgggatgaaaacggactatactttgccgagtctggggaagag

SEQ ID NO: 176836 - DNA, 100 bp, Arabidopsis thaliana landsberg
tttcggtctcgaccgccacggagacagcgataaacgccgagcccgcggcttcgatactgtcaaatcctcagctcgtgctgtactcacttcatcagcagag

SEQ ID NO: 176837 - DNA, 145 bp, Arabidopsis thaliana landsberg
atgggttccatggaaggcaagcttgtgacaacttcgatttcgatggcgctttctgatttctatcatgtcaacaatggctatagaacaagagtctctgtcttatccagagactctcatggtgaccctctccaagctctcgctgcag

SEQ ID NO: 176838 - DNA, 1170 bp, Arabidopsis thaliana landsberg
atgtctcttgattttcgtccacgtattcggcatgactttattctatcaaatagagatgctgttgatgaatattggctaactttagaatattgctatgctgctgccgatcacagagctgctaagctagcatttccgggatctgttgttcaagaggtataagcttgatccttttgttttatggcttattataaagataacagttgaactaaaatattataacctagtcaaactatttatatgtgttacgcttatatctctgtcaaaaactgttttgtccctgtgacaataatttcatctgcctattatgttaggtattcagaaaactgtttctaacagtcagttcttctaggtttttcgtttccgctcttgggcctcagatcgtgtcatgacaacggaacagcgtgctaagctcttaaagcgcattgcaatcgatgagaaggaaaagctctcattcaaagagtgtgagaagattgctaaggatctgaacctgaccttagagcaggtaaagatatgttttttatgtgctgtatatattgtctaagtcacctgcctaattaattaggggaaaaaatatttgagaccaggtgttactttgccaaataattttctttttgtccttgatcttagagataatgccaactctttatttctttgatgtttcagcttgatttcggttttaaagctttctcatatctggtccacaaacagagactgacctgaatgttctcttttttcctcttgttttactggggtgacgtagctaatagtttttggttgcgtactccaggttatgcatgtctatcatgcgaagcatggaagacgcgtgaaatccaaatcaaaagataaacatttagctatagataatagctcttcttcatcttctgggaaaagaaaaagaggaactctcgtaaagactacaggagaaggtgtcagatccataatagtagacggagaaaaggttctgaattccgatgccattgatgcctcaaatagtgagaagtttctaaattcattagaagagcatcaggagcataatctacaagaaaattcagagataagggatcttactgaagatgaaggccagtgctcttctattatcaaccagtacgcaagttcaaagaccacatcaactccttcacaaagattttcgtggacagatgaggcagacag

SEQ ID NO: 176839 - DNA, 282 bp, Arabidopsis thaliana landsberg
attgctactctaaccggtcacacataccgagtcctataccttgcggtttcacccgatggacagacgattgtaacaggagcaggagatgaaaccttaaggttctggaatgttttcccttccccaaaatctcaggtaaaaaccaactaactctacttgtgtaattacttaatgatcacaaaaatgctatttctcagaagagctgattcgatgtttttggctgtgtttcagaacacggatagtgaaatcgggtcgtctttctttggtagaacaacaattcggtga

SEQ ID NO: 176840 - DNA, 717 bp, Arabidopsis thaliana landsberg
atgtcagacgccgtaaccaaaaccgtcgcccctctccgtcgtaaagctaatcctattaacggaaaacacactaacggcgtcaccatcgacggaatcttcgacgaccacaatcgccaaataggaccaataaatagccaaatggaagatattgctcagaaaactgatgacggtggaggaggagaatggacaagcaaagcgtcgtttatgacgtggacgatgcatgacataatttacgtggcgagacaccattggataccgtgtttattcgcggccggagttatgttttttacggttgtggagtacacgttccagatgactcctgcgagttctcagccgtttgatctaggatttgtggccacacgttatctgcataacatcttggcatcttcacccaatcttaacaccgttttagccgctttaaacacggtaaacacatcttttatgacactatcctcaaattcctcgcattatgatattcacatgcaacaaagagagactagttaaattcgacttaattttgcattttttttaatcaattgttttggttgggggtggggacaggtgttcgtagggatgcaaacaacgtatattgtatggacatggttagtggaaggacgagcacgagccaccatcgcggctttattcatgttcacttgtcgcggcattctcggctactctactcagcttcctctccctcaggttccaatccacatctaa

SEQ ID NO: 176841 - DNA, 841 bp, Arabidopsis thaliana landsberg
ttatccaaatggcgatgagaactttgtggagaacaaagcactcttggactactcaaaactgagtgatggaactgaagcagtcaagcctggttcgatggcactctctgagtatcatttcttgcttcttattgggaataaggttaaggtatgtgtaaacacatgaggttgatatattcctcgtgtatgtatcatttgatgtggcttcatataagtgttttgtttcattactatgcttactttttggtttctgcattccttaattgtggggtaggttgtcaatcggataagtgaacaaatcattgaagagctccagtttgatctcacctcagattcagtttcaaggggcataattggactttgcagtgatgcctctgctaacgttttctatgcatatgatcaaaattcgatattccaggtgtgtattggcttactcatttatgtggttgtaaaacttcctcagtaaatttatctgatatcttctgctttcacttctcattttcggctttggatatattctttaggtttctgtgattgacgaaggacgagatatgtggaaggtttacctggacttgaaagtctatgctgcagctttagcaaactgtcgtgaccctctccagagagaccaagtttatttagttcaggtgatcccttgacaccatcggttaagttaataggcattgatttaggtgccaccgtgtcatattgctgtcacctgcccatagaaacttgacgggaagaatctctctggttttgattatgtgtgattgggctccttctgttgtaggcagaatctgcattcaccgacaaggaatatctgcgagcagcatcattctacgccaaa

SEQ ID NO: 176842 - DNA, 72 bp, Arabidopsis thaliana landsberg
aaattcaaagaagcaaaagaaccttccagaatcagcgaagaagaaaacagagattggatcacagaatcctag

SEQ ID NO: 176843 - DNA, 752 bp, Arabidopsis thaliana landsberg
atgcagatgagattagaaggtggagatacattgatggtaagaacagatcagtgctgaataagttggaggttgagatcgagacatttcttcagtagaagcggaatgaaataccgagaaaccgccggaattcacttgaatatgttccgtttaacaccttgagtgcaccaccgcgggatgtagactgtgaagaagactctggaggaagcgattctaattgctttgagctcaagaagcctgcagagtcttatggagacgaatctaagaaaccaaaccaacataacaaagacggttcgattgatgaaaagccgaaaagcccgtcgagtttccaagtgaactttgaggatcaaatggcgtgggcgttatcgagtaacggaaagaagaaaaccacccgagctattgaagacgaagaagaagaagaagatgtaaagcctgagaacagcaacaacaataagaaaccagaagataaggaaccagaagatgagtgtactacgaacaagaacgatgtaatgggggaaatgatacgaacacacagaaggttattgtccgaaactcgtgaaatcgatgaagcgtcttgcaatttcccatcttctcgaagacaagcaagtccagttcgacaatggatttcaagaaccatcgtacctgatcttataggctcgtcggatattgcgacagctcatggagtaaaagataatactttgaaaactaagctagcaaagagttcaaagtcgcgtcttcggttattcaaaggctaa

SEQ ID NO: 176844 - DNA, 512 bp, Arabidopsis thaliana landsberg
atgagaggcacaacggacgaagaagacggtgtcatgaacttctctgatgttcttatgatgtctgatgatgtccttagctccggtgaagtagaagaagacagctttggtttcagattcaccggaaacgatgctcctcaaatgctctgtttcggcggaggaaaccaaaacgacaccgatctgctcttctcacaaccctctttctctcccgcttcccctctctcttcacgcaataacgcctgtgtggtcaatgatcaatcttttagatccaatgtaagttatatatatgtaaaacattcctacagttaatattatttgaaattttagccaagctttaaggtcattaagtaaagtgacaagatcattaaaaagtatatgcatcagtgcatgcaacaagtcaaacacaagatcattataatgtataatttttattttgtttaatgtttgtctctttgttttgaagaagaaaaccgggtcggctgatgggcacgaccgggtttgcgatccaaaacccg

SEQ ID NO: 176845 - DNA, 372 bp, Arabidopsis thaliana landsberg
aaggttggctgcgatcatgctaatgctgtagctaagccggactttgccttcttagatgatgatattaggaacccttcagccgaagctactaccctaggtgggaaattttattctgaagtatggctcaagggtggacgagaaattgctgatgaagctattaaaagaaatgagaaagaatcttatgatgctttagaagaagcaaaaagagctaaagaagctgtcgaacgggctacacttataagtatgcactttttaactcattttcgtaagattttcaacttcgacactaacagatatttgtgtctcaatgaagttgagctttctccaccttccgaaccatataatcccgatgctgacccatccgtcaaagag

SEQ ID NO: 176846 - DNA, 42 bp, Arabidopsis thaliana landsberg
atggcttatactctgcaaaatctgacagccacaattgttctg

SEQ ID NO: 176847 - DNA, 99 bp, Arabidopsis thaliana landsberg
atggtagttagtccaaagacagtttcttgtatactagaaggagtcaaaaatggagactatgttgcgtatcgcgtagaagaggttgtcaacggtgaaggc

SEQ ID NO: 176848 - DNA, 114 bp, Arabidopsis thaliana landsberg
gttacaaattacatagaggtccacggtctaactttgggtaatttaaatgtggggcttatggataagacaacgcaaacgattaggcaccaattacggcgtttagtttctgcctaa

SEQ ID NO: 176849 - DNA, 485 bp, Arabidopsis thaliana landsberg
gtacccatctttacgtgttgcttatatcgatgaggttgagcaaacacatatatatagtaaggggacaagtgaaaaattttattactcagctcttgtcaaagctgctccacaaacctattctaccgattcctctgattctggtcatatgctagaccaggtatagatattacaagatcgaaactgcgaaaactcactacaacatcttaaactttggtgctcaatattcatgacccaattgcttgtgtattgagcttcctaaaatctattctttttttttgtgtccttcttctcacagtgatatacattttcaaaaaatcccactcaatcatcctctcagttattttactttatatatctttctccaggtcatttatcagattaaactaccaggacctcctataataggagaaggaaaaccggaaaatcagaacaatgctatcatttttacacgcggagaagcgttgcagacaatagacatgaaccag

SEQ ID NO: 176850 - DNA, 94 bp, Arabidopsis thaliana landsberg
ctatgcacatatgcggctaaagcggcagctcaaaccacttctaacgtaatagcaacttaccattactattatcccgagcggaagatgcttaagg

SEQ ID NO: 176851 - DNA, 76 bp, Arabidopsis thaliana landsberg
atgactgatgaggtagacggtgacgcatggctttcggatttagttgacgtgtcgtttctcgctactaaaacggcag

SEQ ID NO: 176852 - DNA, 81 bp, Arabidopsis thaliana landsberg
atggacaatttaaatcataaatgggatcgatgtacctcttctcatgaaactcctctagacttcaaaggcgatgatatgcag

SEQ ID NO: 176853 - DNA, 262 bp, Arabidopsis thaliana landsberg
atggggtaaggactatgttggtctgagacaacagactccctcttcacttcgacgtcatgtggttatctcccgatctttggcgtgcagaataaaagcttcatctttataccctattcttaaatctacattgtcgaatgagaaaaattacaaacagtgggctaagttaaccatgaataatattcgaaccaagcgaaaaacttggtttgatcgatggaaccttagacaatcttccagcagagtcctcattatcacatatggctag

SEQ ID NO: 176854 - DNA, 86 bp, Arabidopsis thaliana landsberg
atgcttcagcgagcctctcttgtggtccctgcactaagagtttccacacaagagttaattgtatcaacgtttcgattaagtgttac

SEQ ID NO: 176855 - DNA, 63 bp, Arabidopsis thaliana landsberg
atgatcgtcaattttggtgtttcaaattggatccgggaccaatggaaactgaagtttgaggaa

SEQ ID NO: 176856 - DNA, 2902 bp, Arabidopsis thaliana landsberg
  unsure (1)..(2902): unsure at all n locations
tggcgattgccagatggcttaccagtttctgttctccgtggacatactggagctgttactgctattgcctttagtcccagacctggatccccgtaccagcttctctcgtaagaattcttccttcttttttggcatcatgtacgctaaatgttgcattattttccctcttaataaatcattatgttttgtcacttgttttcacactattggtttggtgtttgcctatgttattgttttgtgattttgaatcaactaaccttgtggtcacaagctgcaaagttaaatgcactctgattcatacaccctcagatggaatttattatttaagctgtggattctatctctgctatttcataactcgtgtctttatgttgtctggagattctatttgtgtgtttggaaaaggtgctttatttcattggtatctttataagctgagcctttgttatatctctgcagatcgtctgatgatggtacatgtaggatatgggatgcccggggagcccaatttgctccccggataaatgtcataggcctcctagtcctgatggtgattgctttacgttcatagttaaattattttgcgttgacttattggaagctgtaggactgacttgggaatcctattccaggaaagaacagtggcccttcttctagtaatgctcagcagagtcaccaaatcttttgctgtgcattcaatgctagtggatctgtctttgtcactggcagttctgacactcttgctagagtatactcggtactgaaaaatgttttctgactgcatcttggtttgagtcaaatattgcaaatccacataaggtttttgccaaattaggattcacttaatttacaaaaggtgttttctttggttacaggtttggagtgctaataagaccaatactgatgatccagagcagccaaatcatgagatggnnnnnnnnnnnnnnnnnnnnnnnnnnnntaattatgttcagttcaggttggctattcacttttgaaattacttttctcatgagatcctaattgtcttgatcctattcatttgctgttgtgctttccagtggttgtgctgcggggtctaaattttctgtaactgactactcaaaagacgagaatgttccaaaatttaagaattcctggtgtgtgttctctgctgcaactagataatcatgcaactactattaacttttcacctttttctaatgtttttttttgtttttgacatggtgtcttttctaggttttgtcatgataacatagttacatgctctcgtgatggtagtgcaatcatttggatcccaagattacggagatctcatgtaacattcagttttgctaagataactgcgactttaatagtttatttacatattgtatattttcataggagcagaaaatcagatctttacttgtgcctttcagggaaaaagctgccgatggacacgagcatatcatctcaaggttccacctccgcccatgccccctcaacctcctagaggggggccacgtcaaaggatcctacctacaccccgtggggttaacatgattgcttggagtctggataatcgttttgtccttgccgctattatgggtaatactattttgacactcttaatggctatgagtttatccaggtcgatttctagaacgctgcactctttctaactagaatcaatttgtatgttaaagattgtagaatatgcgtgtggaatgcctctgatggtagcttggtacattctttgactggtcatacagcatctgtgagtgcttgatcccttctgtatatttctctttctctcttaaggcaggtttgggaattgcaaaaacttttgacctgtgtactttaaagaagaaaaagcaagaaatttctgcccatgcctaaaataacgaaaaatcataattctgttaagaagaccataatgctctgcattatttcaaccataagttaatttcttttcgttttctggaaacactcccaagtcccaactctacttaatgtcatttatgccttgttatagtctgtaaagtatgactagtaaagttagtctggtttctgttttagtgttccagatatgatttcctctttgttccttgtattaccgttatcaacatgttactttttgattgtagacatatgttatggacgtccatccattcaatcctcgtatagctatgagtgctggctatgatggaaaaacaatagtgtgggatgtaagttttaccttcctcactgtctaaacccttcttcttcagcatctatattactaaagcacttgttctcttcctctagatatgggaaggcatacctatacaaatatacgacatttcacactacaagttggttgatgggaagttttcaccgtaagcaaataggttttgggctgtactcgttatgctcctactccatcagattgctaatctgtatcttcataatgtagggatggaacttcaattatactttcagatgatgtgggccaattgtacatattaagtactggccaaggggattctcaaaaagacgctaaatatgatcaggtaccaatataacttcaattgtggagaaagcttcattactgtacttcaactaattccgttaatcggagaggacaatatctcctttctatcaaaacattcaataaacattaaagatctctgtgtatagggtttaaaccaataaaaccgtagagaagatataggaaacattcacatgcatacattcctactaaacattatagaaatattttagttctacttgccccagttacctcctctaagctagctggcttcatcaatatcatatgcaaaaatagaattttcttatatctgctctgtgcatcttgcagttcttcctgggggattatcgtccattaattcaggacacatatggtaatgtccttgaccag

SEQ ID NO: 176857 - DNA, 1932 bp, Arabidopsis thaliana landsberg
atgaaccaagaagctgaacaattccggcagtggaaagcttctcaagagaagatgttgttgcaggtactttatctctatcttcatcacctctttattgtccgttgaatttttttagttgaactgatctcatgttacactttttaattgttttttgggtagcttaagaaagaaggaagaaaaactgagcatgaaagactcaaactcgaagctctcaatcgacgtcagaaaatggtaaagattcttatgatataattgtcttttttcccgcttgagagaaacataagagtctcaagagaaaatgcatcttaatgtcttgcaggttcttcagagaaaaacagaagaagcagcaatggctaccaaaagacttaaagagctgctagaagcccgcaagtcttcacctcatgatatatcaggtaactagttttccgaaacacactttattttgttcttgtttcgatcataatcctttgctttcttttccagtgattgccaatggccaaccaccaagtcgacaggtgataagaattcctaattcagttatgaatttgcaacaagtatcaactgtaacaaattcttactctttgcagacgaatgaaaaatctcttcggaaatggctggataacgagctagaggttatggcaaaagtacatcaagttcgttttcaatatgaaaagcaaattcaagtgtgcgtcttcaaaaatctgtttcagtcatgtttgttatctgcaaatttctttctaatcaataagccactctgattgcatatagacgagctgcactggctgtagagttaacatcgttgagacaagagatggagtttccttcaaattcccatcaagagaaaaatggacagttcaggtacaacaatatactttaaacgactcagtagtgtaaactatgaagttgtttgggagtggactatttcactttatgacctgtttatttttgtgtatgcgtcagatttttatcaccaaacacaagattggagagaatagcttctcttgagagtatgttggatgtttcctcaaatgctctcacagccatgggctctcagctctcagaagcagaggaaagagagcatagcctacatgctaagcctcggtggaaccacattcagtccatgactgatgccaagtatttgcttcaatatgtgtttgattccactgctgaagcaaggtaacaactattacacccgaataaactcagtaaaaatacaaactttgggatgaaatggaagattgatttggtcttgctttaaacatcaaacaggtccaaaatctgggagaaagacagagacatcaaagagaagaaggaacagctcaatgacctcctctgcttattacaactaaccgaagtccagaaccgagaaatccttaaagagaaaaagacaagggagcaaacagtgtccattgcgctggcttcaacatcatcatcatactcggtttttaaatttaatccatatttccacactaagatccaaaattctttattgggaatttctccttaaaaacgtatgcaaaatttcacttgttgcagggaagttcaagaagctcatcaaagcactatggagataataacgctagtgacgacccatcatctccatcttctacttatcatcgagcaacaaagcatctcaaatacactgggccgggtatagtcaatatctcggtgagagaatcagaagctttattagaagagacgaggaagatgaaagcaatgaagaaaatgggacagagtggcaagctatggaagtggaaaagaagtcaccatcaatggctgcttcagtttaaatggaaatggcagaaaccatggaaactctctgagtggataaagcagaacgatgagaccactatgcacgtcatgtctaagagtcatcatgatgatgaggatgatcactcgtggaaccgacactcaatgtttcaaggtgcttaa

SEQ ID NO: 176858 - DNA, 613 bp, Arabidopsis thaliana landsberg
aacaaaatgtgacaaagttgttgaaaaagcttttaagcctactcgcagattctgtacgttcagagaaggatcttcttaaagaagtgaaaccggtgcttgaacatctaaaatctttggatgcttgtccaagcgaggagcttacacaagatcaagcaaattccatctttggtacattgatctcttgccttgtacattacagtttggttttattttcatggaaagctaagttattcgagtcgttatgctttcgagaatttgactgttagtttctttctaatggctaattacagaaatactcggagttagctacaacttagagatcactgaaactacaacagtgccacagacacctgctccttgctcaacaaaaccagctcggtcaagaagacgagcaaggattgaacaaacatcctctgatgatgaagaagaagtagcatctcctccaccttctgctcctaatactttggtgacccgatcacaccgagcaagtaaagctgctgccttagccaaaataatggcaagcaaagtgaaaatgagcaatgtagacgaggatgatgaggaagaagaaggttcttctgatgttacagcagatgattcagatgaattactatag

SEQ ID NO: 176859 - DNA, 182 bp, Arabidopsis thaliana landsberg
ctcttttaatggttgaatgtgatgaggggaagcgatgtcatacgacgattgacaagggaaatttttgtgatcttgtcgattgtcgtttaagctgcttttctggatacaatggagttggaaaatgctttgacgatcctaaagttcctggacgttctaattgtggctgtctatacaattggtag

SEQ ID NO: 176860 - DNA, 82 bp, Arabidopsis thaliana landsberg
atgggcctcgaccccaacatacccccacctagcagcggcgccatcaaggcagccaagcttaacccgggaaagatcattttcg

SEQ ID NO: 176861 - DNA, 486 bp, Arabidopsis thaliana landsberg
atgaagatcagagactgccggggacaattcgacaacgcgcgctggtgggcgcaggccttcggctttgcgctgatcgcgggcgcaggtctgggcgtgctggggccgttcggcagcttcctgaatggcgacatggcgctgcgcgtctttagctggaccggcaatctgctggccgggacggtgatcctgggcctgatcgtgccttttgtgacgcagattgcgctgcgcttccgtctgccgcgcctgttcggggtcgcggtgggcgtgctgatcgcaacaggcccggcggcgggtttttcctatgcgttcggccactggctctggccgcgtgagatcgaccgggtgcgcccgatcgactggttcacgcaggcgctgattatcgagatcgccatgatcgccctatgggtgctggtcatgctggcgcgcgaagccatgcggccagcgcccgccgaagcgaatgagaattcaacgcccgatctgagcgcgccg

SEQ ID NO: 176862 - DNA, 67 bp, Arabidopsis thaliana landsberg
atggcaaagaacctcaactccgttagcttcatcgttctcttgctggttcttttggtggcttccaccg

SEQ ID NO: 176863 - DNA, 406 bp, Arabidopsis thaliana landsberg
atggttacagaggagttaggcaaagaccttggggaaaatttgcagctgagatcagagatcctaaaagagccacacgtgtttggcttggtactttcgaaaccgccgaagatgcggctcgagcttatgatcgagcccgattggattccgtgggccaagggctaaactcaacttcccctttgtggattacacgtcttcagtttcatctcctgttgctgctgatgatataggagcaaatgcaagtgcaagcgccagtgtgagcgccacagattcagttgaagcagagcaatggaacggaggaggagaggattgcaatatggaggagtggatgaatatgatgatgatgatggattttgggaatggagattcttcagattcaggaaatacaattgctgatatgttccagtga

SEQ ID NO: 176864 - DNA, 42 bp, Arabidopsis thaliana landsberg
atgaattcaggctctacggatcctgtgttcattgtcttcaag

SEQ ID NO: 176865 - DNA, 381 bp, Arabidopsis thaliana landsberg
atgacagaagccccgtttcgagcaatggatgagtttgatgtgtttatggtattatgtccttttaagaattctctcttttacgagctttacgttgggatgagactaacatttttaactttctgattctgaaatataggatgcagtcagtcggaaaattagcttggacgcactggtggattttgcaattggagaaggatcgcagtggatgttcatcacccctcatgatatcaggtaaccaaccgatcaatttcaaaaaccatggaactcagtctgtgaagtgaataacttggatgaaactctttatctcttgtgctcttttacagcatggtgaagtcgcacgagaggataaagaaacagcaaatggctgctcctcgttcttga

SEQ ID NO: 176866 - DNA, 458 bp, Arabidopsis thaliana landsberg
atggcactctgctcagctttaatgggtgcccttctccctcaggtaaagtttctcaacacaaatcaagagtcaatgttagatactgatacagaggacaaaacgttttaatctcgagtcagtgatttacgattaaatgtcagaaaaaattatgtgtttttcattggtgtgttcttgttactgaatacaactatttcattttccagccacgaattctgatggcaatggctagggatggtctgctcccttctattttgtcagacattaatagacgcacacaggttccggttaaagcaacagtggcaactgggttgagtgctgcagccttagcgttctttatggatgtttcacagcttgcaaggatggtaagacagatcgttttgttttttcagcccattgaacacgggaaccttttcgccatatggactgttattaagtatttgaggctgctgatggtgcag

SEQ ID NO: 176867 - DNA, 439 bp, Arabidopsis thaliana landsberg
atgagatcatcgcaagaagagcttgtctccatttatggcccacaaaattggaaccccatagctgaaaaacttcaagaaagatctggtaataaaaaatcaaattttatagatcttcaaagttttttaaaaaaaacaatttgtttgattcaacttgctaagtcaaaattgttaagatccggtgataaaatcaaatatatatatatatatatatatatattttaacttttctttgtttaatttgacttaatcttgatggataaggtaaagattataatttgtttttgtgatagttgatggagaggtgaaatgtgagaggtggaagagagatgatgatgatggtagtaataacggttatggttttgatgaatcaaagaagaattggtggttaaataggttaatgggtcagaggaagaagattagcagagtgataggcggctag

SEQ ID NO: 176868 - DNA, 111 bp, Arabidopsis thaliana landsberg
gctacgacgacggcagagagcatggacatggattaatcatcatgtttacactagaagatacatatcacaaagcatttgcatataatacaacattttttaagcgcatcactg

SEQ ID NO: 176869 - DNA, 1498 bp, Arabidopsis thaliana landsberg
atggagaagcaagatcaaataagcagagaagagattctgaagaagataatggattcattgggacaagacggtgtaccttcaaaaaccgtcctcgttggtgaagctggtatagggaagacatggcttgcaaaagaagtcagccaacgtgttactcaagaaaagtacaatgtcctctggttacacctgaacaaaaagattgaagacgagaagtcgctttacgagattctagctgctcagttgtcgataatttacgagtttgaagaaggcgaagaacctgatgagcttgattatccattggagagcttgaaagagaagattaaagaagagatgatcaaatacaagaaggataatcttctgttgattttggatgatgaaggaagtatgacaactgaagaagatgtgatgcaagaattaaacctccaagattttcttaaggagtactcggctgtgaagattctagtcacaagaagagatgaaagagaggagaaagaatccacaacgatcaaagtcggtccgcttacagaaaaggagtcattggacttactccgcgatgccgaggacttacttacatcatttacctctgaagattggcctgttctgctaaagagactttgcgataacaaagagatcaaagaacctactttgatgtcttgcattttaagcaagagcaagggcttaccagctgcgatcgttgtcttaatcaagtctttaaacagcattaagtcgatgtctgcgaagcagaggaagatctttaaagaactgattctatcttccaagtcattagatgaagcagctgcttccaagaacgctatagatcgcagccgctacaatcctgtcttgcgattaagctacgagctgttaaagcctgacgagacggtcaaacgtccggtgattgcttgcttttggcatatcttggacttctacaagtactctggatgcgcttactaccgtgacctaatagtgcattggatgcttgaagggtattttgatccggttaagtcggttgacaaagcttaccaagaaggacattccattttaatggactttatgaacagaggaatcttgaaaatacaagaagacaacatggtggttccagagttctccatgagcaacctattagatcttcaagattgtggattctttggaagatcttctcttggatttgacagagtttacggtggagacaagagaaaggggctagggaaaatcatcttgatcgatgatatgatacagacaattcaatcgaagaagaagaatatcacgacgattatcgctagcggaaaccgtttacgtagagaggttcatgggaagttctttgagaaaccagagatgcaagatcttgaagttgtagtcctctttgagccaacgttccatgaacttgttctgtctttatctaagctaaagaaactccgagtacttgttatcagagactgtgatctaatcgataacatcgataagctcagtggtcttcaaggcctacatgttcttgaagtctctg

SEQ ID NO: 176870 - DNA, 244 bp, Arabidopsis thaliana landsberg
atgaagaacagtagagatggcaaaagctatagcacaaacttagcttatactccacctgagtttttacggacaggtaaaattcttgatcttgtgaatcgtagtcgaagacaaaccaattcattattgaagattaaagttctctggtttttcttttgcaggtagagtcattcctgaaagtgtgatattcagttatggaactattcttttagatcttttaagcggcaaacacattccacctagccat

SEQ ID NO: 176871 - DNA, 66 bp, Arabidopsis thaliana landsberg
atgaatgtatcttcttcttcactccaacgatcccggagctcgtcggatcttcaaggttttaacgga

SEQ ID NO: 176872 - DNA, 226 bp, Arabidopsis thaliana landsberg
attattccgagaatctttacacttggtgttactggtttttaagacaaacaaagggagcaaagggagatccgagaaacatttcctctacagttctgacagtgatcttgtgggagtgaagcagagtgttaaagatttgttcgacgccatttttatggatttgcatgggtctgtgtttatcaacagtttaccgaaagcatgtttggcaaatgatagttcaagatcttag

SEQ ID NO: 176873 - DNA, 205 bp, Arabidopsis thaliana landsberg
atgagtttggcatttcagagcctaggagtggtgtatggagatatcgggacatcgccattatatgtgtatgcaagtactttcactgatggcatcaatgacaaagatgatgtcgttggtgttctctcgctcataatctacactattactctcgtagcgctcctcaaatacgttttcattgttcttcaggctaacgataacggtgaag

SEQ ID NO: 176874 - DNA, 216 bp, Arabidopsis thaliana landsberg
atggtttcttggaaggtaattgtcctaaaacagagataagcatgtttcagatgtttttgtgagaaccttactgtcctataacagataatttattttgccacatgttatatagatttggcacgtaagagacgtagagaacaaacttgttggagcatcaaatgattcctccaaagaaattgatcagattgggaagactagtgtctcgcagctgaatag

SEQ ID NO: 176875 - DNA, 433 bp, Arabidopsis thaliana landsberg
atgaacattgtaaatcaggtaactttacagatatgaattttttttaacaaacacatataaatctaatgttgtgacttatatgtggtaatctgagcagcatcaaggtcaagtgttgagtggtggaaatcttgaatttgccaacgataatcaacttgaaaggaatgcaattcttgctggttattctattgaggatattaataatttgagcattaataacgtaagtcgtgtttcaattacatgtctttcgtatataaataattcatgtacagtatataaatctaatgttgtgacttatatgtggtaatctgagcagcatcaaggtcaagtgttgagtggtggaaatcttgaatttgccaacgataatcaattcgaaaggaatgcaattcttgctggttattctattgaggatattaataatttgagcattaataac

SEQ ID NO: 176876 - DNA, 600 bp, Arabidopsis thaliana landsberg
atggtgagattatattggtcatatgccatataaatagacacacctgtttggagtttgctttctagaatggattatgagttcatgtctggcctcttgatgttgttataggtcaatactcgataaaacagaactagtgtctttagaactggcttctcattcactatagaatttgcttaaactacatgtccctgcctccagaagaattttgtatcagtgctgctgctgatatatttggggatgtaaaatcttcattgtgttgttctttgactctgtgcaaaacaggttgcagtgttttacttccatgacgaatttacgtggctgaaaggtgtgggtctgatgatcattatggttggtgtcagtttgttcaactggtacaagtaagtaactcttgcttgtttaaacatctaatatgctgagaaatgaatacaatgtcaaatttgtatattggaaccgaacggtgtatgcttttgatgtcttgtcagatatgataaactacaaaaggggcacaaaacagaggaagagaagcagttacaagctccaagtcagactggaaaatatgtgattcttgatgagatggatgatcaagaaaatagtccctaa

SEQ ID NO: 176877 - DNA, 454 bp, Arabidopsis thaliana landsberg
atgaacgtaagtacaagtgaatcactactaatctactagtctcaagaattgtgctttgtatctatgctgcatctggctagcttaaagagattcagtgaaccatcattcttttcttcgtagaagccttcattttctatgttgatcactaattatatagctactcgttaagtaccacattagggattaaaacaacaaatgtaaaattagattaaaaattcgaaattcgatgaacatttaatcgtatcatgattgagattcagggtattgagatatagaaagatatataattaagctaattagtgatcttccttgcttgattacaccatagtttttggagagacttcttggtcagttatccacattctcgctccgccatcgcgtaccatatgatcctaagattccggcggacgttgttttaaactgtgttcatagaatcacagttagtgatatgtga

SEQ ID NO: 176878 - DNA, 117 bp, Arabidopsis thaliana landsberg
gaaccctttgatgaaatgtttgcagtaccatattaccctcggtatgagaaccgcaacattttagaaatataccgaatgcaaatcgggcataattactatgaagagcggcttccctga

SEQ ID NO: 176879 - DNA, 569 bp, Arabidopsis thaliana landsberg
atgggagaccgtgttctatttgctgaagcagctaaagccatggtaagtgtaaattgcacggtcaaaggccacctttgtgatcccattctctacgcaggatttttctataacttctccaactttcttagccatttcctaatcaattccaagaagaatcaaagttagacagtgtccaagagaaaaacaattgaagctaagggtctcatgctaaaacttgaaaggtttcggctagagaattttgtagatagattgtagttgaattcaaagcaggtggtagtgaagaactcacaatggtagaaccagtgagcaaaagatacagagccttggccatggtctgagaattgaaggagctttaagccaccgtactgaattggaatcggcgtcgaggctgttctcagcgagctcagacgctggattacatcaccctctatattttgtaggtttcgaatcttcggtggctctctcggttcaatcgccgcagtcggagaggagagtcttcctcctccatctccaccgcaagaagcgaccgtcgatcatctcccccgctatatacaaatgagaatcactaa

SEQ ID NO: 176880 - DNA, 343 bp, Arabidopsis thaliana landsberg
atggtggtacgtcttccttaaattaagtccacaacactcgctccacttcatatttctcccttccatcattcctcagctcctcaaatcagaatgaatcagctcgagcacacttctggtaattcttcatttattatctaaaatcatgatcaatgtccgacgtatattctttttggccacatataatcatgaacaattattctatacacaccgctagataattaactaatctttttggccgcagtgcaaaaacgttcacagaatgcatcaggaccggacacaagtccgccgattggttatccgaccagagatgatgtggtgggtgatcctccggcagcagcagtga

SEQ ID NO: 176881 - DNA, 170 bp, Arabidopsis thaliana landsberg
aaagcaaacgaagtcaagctcagaatgcaaaatctaaaattccgatcaagcagaagcaaagcacagaaagaataagcagatctctgaacaaaaagaaacagaaacttcaagagaatcggacagcattggtgataaaaccaaagcaatcaaaacctgaaggaacagactaa

SEQ ID NO: 176882 - DNA, 537 bp, Arabidopsis thaliana landsberg
atgcgcgccgcgcagcagctttatgaaggcatcgatctcggcggcgagacggtcggtctgatcacctacatgcgacccgactcggtcaatctcgcgcaggacgcattgaccgaaattcgccaggtcatcccgcagcagttcggcgccaaggcgttgccgccggaaccgcgtttctacaagaccaaatccaagaacgcgcaggaagcgcatgaagcggtgcgcccgacagcggccgcgcgcttgcccaaggacatcggcaaattcctcgcgccggatcaggccaagttgaacgaactgatctggaagcgcacggtggcgagccagatggaacaggcgctgttcgataccgtgacggtcgaactgcgggccggcgatgcgccggcgggcgggcgcggtgcgcattcgttccgcgccagcggttcgacgctgatcgaacccggtttcatggcggtctacgcgcagagcttcgacacgccgagcggcaaggacgacgacgacgacgacaagcgcctgccggcgctggaaaccaacgatcgc

SEQ ID NO: 176883 - DNA, 48 bp, Arabidopsis thaliana landsberg
atgcattggattcggcataagttagcgaaaaacacaaaattgcgaggc

SEQ ID NO: 176884 - DNA, 120 bp, Arabidopsis thaliana landsberg
gttctggtaacggcagcagtaattggtttgatcactcactatgttgctggtcaggctggtccagcggcaatagtaattggcaatggcctggcattgtcttccactgctgttgtcctacag

SEQ ID NO: 176885 - DNA, 103 bp, Arabidopsis thaliana landsberg
gctcacaaaagatggagttcttgtcgagggtttattctggaaagatgttgaagccctagtcaaagagtacacagaagcaggagaaccaaagaagaagagatga

SEQ ID NO: 176886 - DNA, 249 bp, Arabidopsis thaliana landsberg
agtcaacctaacgacacgattagcgggaatcgacatttaggagcttcgtccacagaacaagatagcgcgtggattttcgcagacagtacggaaatgaaaatgagagtgggaaattcgaaacctaacctcttcgtcttcttcgaggagcttgacaatggagagatccatggaggaatctcgcggtaccaaacgtcaatagctcaaaacgaagagggaattttcaaggaaacgatttgttgtatccaataa

SEQ ID NO: 176887 - DNA, 354 bp, Arabidopsis thaliana landsberg
accaatgccggctacgatccggtcgaggcggcgcgcaccgccagcgaatatggcgtgcgcgtctatacggtgggcttcggcacccagcgcggcaatatcgtgggctttggcggcttcaccatgcgcgcccaactggatgaaacctcgctgaagaagatcgccgacatgacccgcgccagatatttccacgccaagggcgcggaggatctgaaggccgtctatgacgtgctgtcgcgccaattggtggtggagacccgggagatggagatcaccgccttcttcgcggccctgtcggcgctgctgatgctggcggcggcgggcctgtccctgttctggttccaccgggtgttctga

SEQ ID NO: 176888 - DNA, 107 bp, Arabidopsis thaliana landsberg
gattggatatgatcaacatcactaacatattcgaaaaagaatatcaagtggacgagtacgaattctacaactttaccattcgaaagtttaccgtaaactctaaatga

SEQ ID NO: 176889 - DNA, 1352 bp, Arabidopsis thaliana landsberg
atggcagaactggatgctcaccgagcggaagttcttgggcattcagcaaggattatacagaggaaagtcattacgtatctgtctcgcaaaaaatatctgctgttgcagtccgcttcaactgaaatccaagccttttgtagaggtaatacatgttctatgcgattgctcgtcgggtagattattggcgtcaaatatagtttcatgtctaacaaggcttctcccaactcatttcaggacatattgcatgcgttcagtttaaggccacgagaagagaagctgcttctgtgagaattcagaagcaggcacggacatatatatgtcagacagcatttaaaaagttgtgtgcttcagctatttccattcagtctgggttgcgtgcaatggctgctcgagttgaatttcaatacaggacgaagagaaaagcagcgattattattcaagcaagtttaaaacctcatattgatgataaagatctctcctttttcgtatcttaaagatatcaaatacttgaatttgtttgtgtatcaataacatgtgtgttactgattccacagagtcaaatcagaagatgtttgtgtcgacggcggtatttgagaacgaagaaagcagcgattaccactcaatgtggctggagagtgaaagttgcacaccgagaattgcggaagcttaaaatggtgactttctctcttagctaacaataaaagctctttctttctctaaacctaatttatacgatccaccctaccatgagatgtacgtgaatattcagcatgattgtcatcaagatgttgaaaaattgtatacttgtggattggaagtttctctcagtattttttgaatcttttaaggttctcttttgagagctcaagttgatgatctatagtcaattttatgtacaaattcacagattcgaatgtatcctgagatttcctaagatatttttttgtcttccaggctgctaaggaaacaggtgccctccaagacgctaagactaagctagaaaaggaagtggaagaactcacttcatgcttagagcttgagaaacaaatgagggtacacatctcagaacttgcaatagtagatcttttgttgatgtttcccttttctatgtgaggcatctgatctgcctactgatgcagatggagcttgagcaagtcaaaactcaagaagtcgaagatttgcggtcagctttaaatgatatgaaacttcagctaggggaaactcaagtaaccaaaagtgaggagattttgaagttgcagtctgctttacaagatatgcaactagaatttgaagaacttgctaaggagttggagatgacaaatgatcttgctgccgaaaatgaacagctcaag

SEQ ID NO: 176890 - DNA, 138 bp, Arabidopsis thaliana landsberg
aggaaccacgaggaaccaaaggagctgttggacgcgctgttgcggcttctggatcttggaccggatagattttttggtgttgagacatttttggaaaatcttgatgacaccaagaagaagaagaagctttgtttgtag

SEQ ID NO: 176891 - DNA, 264 bp, Arabidopsis thaliana landsberg
taaggtataagcatgatagtcattttctcacaatttgcgatgtgaaggaggcaagtgatgaactagactggtgtgacatttgtgaaggcaaaatagaagaagagaaagaaaaggaatataattgggatgatagagaaagagagctacgattctataaatgcaatgattgtagcactgctcttcatgttgattgtttgcttggtgtagacatgtacatgaaacctattacagactacatttctgtcatcacgctcacatctaagg

SEQ ID NO: 176892 - DNA, 224 bp, Arabidopsis thaliana landsberg
aaacacttttttcggaattcgaacgcacagcgatcggataatggcgacggagcatataactcgtacgggagatgaatacaatgtcgagcttttacctagtgacgacgatgcgccgccgcttgaatcgtcttggcgtctcaacctcgacgcttttcaactcccttcttccaccggtggccgtcacgacggacgtactcgcttttctcgctattttcgtactccaa

SEQ ID NO: 176893 - DNA, 633 bp, Arabidopsis thaliana landsberg
atgaagaaaaacggagctccattgtccatttttgaacacaatgatattctgtctcaaataagagctgaagctaaagaagctcatgatggaatgatggaggcaaagggcataacatctggaagtaagtctaaatccttaattgactaataaacgttgtcttatatttttgtttgtttaacctgatgaaatccatttgcagtgacgcgtatatgtgatgcgcgtagaactgaaccaatcatggtggaagataatggtcttgttctctggaaattgaactgctatgatgaagaaccaaagtttttgctccaaggtttaaaattcactaaactctttgtttatgtttcttatgcatgtgtttactgtttagtaacttaatctgaatcttattaatgcacagatctaggaacatttgatggtttatgttcacatgaaaaatggttagcttttaagcctgagcagaaaccagatatagagaactatatctcttacaagaggtaagtcattcacataaagagggacattaacagtgtgatattccgattatgtaatgttataattaaacaaagctttctgcttctgttttgtaggaggaaggtgatgcaaacattgaagaacacaaatgtggtagcataa

SEQ ID NO: 176894 - DNA, 749 bp, Arabidopsis thaliana landsberg
atgccgcgaagcagagacgaagacgatgaattagacggtgactacgaagcattagatttagaggaagaagaggaagaagacgaagaagaagaagaagagagaggaagaggtggcggcggttctagacggaagagaggaagatcgaattttatcgatgattatgctgaggaagattctcaggaagaagatgatgacgatgaagattatggtagtagccgtggaggtaaaggagctgctagtaagagaaagaagccatctgcttccattttcttagaccgagaagctcatcaagttgatgatgaagacgaagaggaagaagatgaagcagaagatggtaagtactcttgaattttcggaattcgtttttgttctttccatcgattcatttccattaggttaagattcgtgttgttttgtgattgagattggttctcagaagtcaccattgataagaattggttacttagtcactggaaatgttcactagttgaaggatttttttatgaaatgcagattttattgtggataatggaacggaccttccggatgagcgtggtgatagacggtacgaacggaggtttcttcctcgagacgaaaatgatgaggatgtggaagatctcgagagaagaattcaagagcggttctcctctaggcatcatgaagaatatgatgaagaagctacagaagttgagcaacaagcgcttttgccatcagtccgtgatccgaaattgtggatggtgaaatgtgcg

SEQ ID NO: 176895 - DNA, 208 bp, Arabidopsis thaliana landsberg
gctgagacatcgaatgcgaaggcctgttatcgtgaatctcgtttattcgtttccgatcgaccacctccgacttcgatccaaccatacctctctccctatacatgatctaaaatctctccgaaattccgaatctccccgtcaccggagatccacgccggtgaaagccaaaaacgaaaaggccgtacctggagagagagatgagctctag

SEQ ID NO: 176896 - DNA, 5441 bp, Arabidopsis thaliana landsberg
  unsure (1)..(5441): unsure at all n locations
gatggtgttagtgattatcgccgtgaagtagagcgctataagacctcacagcataaccggtccaaagattctgtagacaagatttcttttgacaaggaactgaatgagcaaattgaagccatccagtgggcctcattgaatgcaatggcttcccttctttatggaccgtgttttgatgacaatgcaagaaaaatgagcggccgtgtgatatcttggataaatagtttnnnnnnnnnnnnnnnnnnnnnnnnnnnnnnnggttactcgcctgctgatccaagaactccatcttactccaaatacacgggagaaggtggacgagggacaacaggtcgtgataggcatagaggtggtcatcaacgtgttgcgttggcaaaattggccctgaagaatcttctacttacaaacttggatctctttcctgcctgcattgatcaggtaatgttctatctgactgaatgcatggaagttgtgtttaattatactgtcgtcttggtaattactaggtcagatgtttgataaatcttgaccaatgatgacaacttatccatgcagtgatggttccgtatcagatagttttgttttattagctccagtttaagcatctgaattctcttaataagcttttttcacttctatgctttgctcatctgtttgactacatccttgattagactcttctaaactgcatgacctaattcatctgtacttttcccagtgttactactctgatgcggctatagctgatgggtacttcagtgtgttggctgaggtttacatgcgacaagaaataccaaaatgtgaaatccagaggctcttaagtctaattctctacaaggtagtcgatccatctagacaaattcgcgatgatgctcttcaaatgcttgagacactttctatgcgtgagtgggctgaggatggtatagaaggttcaggaggctatagagcagcagttgtaggtaatcttccagattcatatcaacagttccaatacaagctctcctgcaaactcgccaaggatcatccggagttaagccagctgctttgtgaagaaattatgcagcgtcagcttgatgctgttgatataattgctcagcatcaggtcttgacctgtatggctccatggattgagaaccttaatttctggaaactcaaggattcgggttggagtgaaagattactaaaaagtctttactatgtgacatggcgacacggggatcaattccctgatgaaattgaaaaactttggagtaccattgctagtaagcccagaaacatcagccctgtattggatttcttgatcacaaagggaattgaggactgtgattcaaatgcatctgccgaaataactggtgcatttgctacatatttttcagttgctaagcgtgtaagtttgtacctcgcacgaatatgtcctcagcgtactattgatcacctggtttaccaactgtcacagcggatgctggaagacagtattgaacccattggttatagtgcaaaccggggtgattccaatggaaactttgtgctggagttctctcagggacctgccacagcacctcaagttgtttcagttgcagacagccaaccacatatgtcaccacttcttgtcagaggctcccttgatggtccccttaggaatacaagtggaagcctaagctggagaacagcagggatgactgggcgaagtgcttctgggcctttaagtccaatgcctcctgagttgaatattgttcctgtagctactggtcgttctggtcagctcctgccatcattggtgaatgcatcaggacctttaatgggagttcgtagctctacaggaagtttgaggagtcgccatgtctcacgtgatagcggagattacctcatagatacaccaaattctggagaagatgtgttgcattcagggatcgcaatgcacggcgtcaatgcaaaggaacttcaatcagccttgcagggacatcaacagcactcactcactcatgctgacatagctctgattcttcttgcagaaatcgcatatgagaatgatgaagattttagggaacatctgcctttgctcttccacgtcacttttgtttcgatggatagctctgaagacattgtgctagagcattgtcaacatttacttgtgaatttattgtactcactagcgggtcggcatttggagctatatgaggtggaaaacagcgatggagagaacaaacaacaggttgtgagtttaattaagtatgtgcaatcaaaacgaggaagcatgatgtgggagaatgaagatccaacggttgtgagaacagatcttcctagtgccgctcttttgtctgcacttgttcagagtatggttgatgctatattcttccaaggagatcttcgagaaacttggggaactgaagctctcaaatgggctatggaatgcacgtcaagacatctagcatgtcggtcacaccaaatataccgtgcgctacgcccaagtgtgacaagtgatgcatgtgtctcccttctacgctgtcttcatcgatgtcttagcaatcccattcctccagttttgggttttattatggaaatccttctgacgctacaggtcatggtagagaacatggagccagagaaagtcatactctacccacagctcttctggggctgtgtcgccatgatgcacacagacttcgtccatgtctattgccaggttcttgagctcttctcccgtattattgaccggctatcatttggtgacaaaacaactgacaatgtactctcggcaagtatgcctcgggatgaattcaacactaatgatttgggggaattccaaaggtcagaatctagagggtacgagatgccgccgtcaagtggaactcttccaaagttcgaaggtgtacaacctcttgtcctcaaaggactgatgtctactgttagccacgagttctctattgaggtcctatcaaggattacagtgccttcatgtgactctatatttggcgatgctgagacaagactccttatgcatatcacaggtctacttccttggctttgcttgcagctgacccaagaccaagtcatggtttctgcgttaccactccagcagcaatatcaaaaggcatgttctgtggcatctaacattgctgtctggtgtcgggcaaaatcactcgatgaattagcgactgtttttgtcgcatatgctcgtggcgagattaaaagagttgaaaatctccttgcatgtgtctctcctctgctctgcaacaaatggttcccgaaacactcagctttagctttcggtcacttgttaagactgctaaaaaaaggaccagtggattaccaacgagtcatattacttatgctcaaggcattgctccaacacactcccatggatgcttcgcagagtccccacatgtacacaattgtttcacagctagtcgaaagcactctgtgttgggaggcattgagtgttctcgaagctcttcttcagagctgcagcccggtacaagggggcaccggtggatcccaccctcaggattcgagttactctgaaaacgggactgatgagaaaacgcttgtacctcagacttcatttaaagcccgaagcggacctcttcagtacgcaatgatggcnnnnnnnnnnnnnnnnnnnnnnnctcttggtgcagctgcggcagagtcagggatacctccgagagatgtggctttacagaacacaaggctaatgttgggtcgggttcttgataattgcgctctaggaagaagagattacagaagattggtaccttttgtcacaacgatcgcaaacatgtaacattttcagtaaagttttgaatttatttttggtaatttgtatgctttccagaagttttaaagaagcaatgtgtctgtgtgtgaatagtttggtgtcgtagcaactaacttgtatgatcgcggttagtagagtccaatgtattccagacatgtaagaaggaaagttttatttgttactttattatgatcagagtttttttctgtgaaattgtgaaaacataaagaactaatagatagtgaagtcaaccaaaatcgtgaattgtaatgtgcacgtatagtcgtgaattgtaatcgtgaattgtaatgtacaattacatcctcgattttgtacattagagtcgtcgaatgaatactctctttataagtgctaaagttttataaagagagtattatacagcatgaaactgcctctcctacaacatcctaacactctctacgtaatccggaaaaaccattgctcttataaaaggaaacttgaacgctgcggatgcttcaaccttagtgcgtctaaaactattcgtgtcgggattgcaatgggagacataaatctcataattatagtgtggtgatgcaaaataaactcacacgtatgagtagtgtagcctatgaggcgtagattaacaaatgaattcttccaagctggttcaatactgaaagttaatttcttcaagcattcatgtttttcagaatcctgatctataacccacacaacatatgtatatgaagtagtttccgttggtatggctagtttcccctcgtagtttatcaaattctcaataattcacttggaggtcgaatctcttgaggcaaactagtaaaaagatccaatatttcagaactcaagtcaaatctcattatgcatagatgcaacattcccgcccccgttttagcaacataatacacaacactatctatgcacacaccgttagagcaaggacggtgaggaataatactagtatctatcattctgaatgatttctttttagctcccaatgtgaatacttgatgttgagatgactcatccctcagatcaccatacgcttttaccgtcatacacaacactttgtattgatcactaacagaatcatacccgaaaaaacttgttgctatcgttctcctggttttgactcttggtaaaggtatggttcgacctgtgctagggttagccacgacttgctctggaccatgtccaatgattatcaacccattaacatgatgatattagtgatgatcatagtaatatgggagcggacatgtcacactcacacgtgatacaagagacgttgatgaggaagactgcgagaagaagtatcattcgtggtgttccatattgagatctggttcactagaagcaactaaggtacgaggcttcgacgaagatccaagcgggtaagatttgatgaaatctagactgcggatactagttgcccataacttggatactgtgagaaacctagctacagatttggcaggcaatctcccaagaatctcgatcactaggtcatgagggatttcatcaaacttgtttctctcttccaacgtttctggattgctgatcacggttttggtctttttgttgcgtcttctcatcatgatcgatcgctctggtttcgaaaccctagatttctctgtcttttgtatgctttttttccagctga

SEQ ID NO: 176897 - DNA, 1052 bp, Arabidopsis thaliana landsberg
atgccttctcttgttcaggttctcaagaacttgtttataaaaacgaagcaggattttaaggaatttcaggtttatttgcaaagagatttgatggaactaggttagtttggtttctgagatttcatttgtattacctccggagaaaaatgtcaacatttcatctttaattacaatcacattttctactttcaaatgcaatttactgcgttacacagggaatcagatgcaagagatgtcatcagcagctcagggatattacaaagtggtggaagagaatcgaaaattatataacatggtgcaagatcttaaaggtagaaaacagttaacacaagttttgctcttttaatggaagtcgtaatgccatgtcttaaatctgcaggaaatataagagtgtactgcagagttagaccgatcttcaatagtgaaatgaacggagttatagattatataggaaaagatggctctttattcgttttggatccatcgaagccttataaagatgcaagaaaaacgtttcaatttaatcaagtatttggtccaacagcaactcaaggtataagcttgcaatgtctcagagggtgtataagcttaagtctcacacttgtttgttctagtaagatatcttttaaactcttcatcccatgtttacagatgatgtattcagagaaacacaaccattaatcagatcagtgatggatggttacaatgtctgcattttcgcttatggtcaaacgggatcagggaagacatacacaatggtgagaatttttctacagactagaccatcttcttgccttctacatttatagttacttatcattttattctttttgatgcagagtggtcctccaggcagatcagctactgaaatgggaataaactatctagctctcagtgatctctttctgatatgtgataaaagaaaggatatgatgacgtatgagatatatgtccaaatggtcgaaatctacaatgagcaagttcgagaccttcttgcagaaaattcctcctgcaccagatatcctttcatggctgctgaaactttaatttaa

SEQ ID NO: 176898 - DNA, 441 bp, Arabidopsis thaliana landsberg
ccaaatttcataccggaaactaaagcatctgtcggaaaaccaaagcccagctgataagtcgtcgttgttgaagtatctcaatacaaagtttccggtgtctagaagctctccagtcactagccctttcatcagatttgtgctggtcacattggtccaccagacacgggtaccgtgttgatcaaggagaacgaggttgttatccatgatttttagggttccaatgggctcggagagtgggttgcctctattcgcaacccataccacttcctgaggaaacctatggtgccatacgccgagataccaatgcgaagtggaggacggtttaaaaaaaccaagcacagagactttcgtcggggacaaaatgtttcttcgagtagttatcttaaacggctctgtcgatacaagtttcgattcatatttagaagaaagctgaagaactaa

SEQ ID NO: 176899 - DNA, 679 bp, Arabidopsis thaliana landsberg
gagttcttgatagacttcttgaaattcagaagctagacaaattagacattgaaggagcgattcattgttattacgatattatcaaccagccttgccctatatgtaaagaaggtaggccactggaggcggaattgtctctacatgctttacctttagatgaaagcttgaagatcgtgaaggagtatttgatagctgcaactgccaaagactgtagtattatgatcagttttcaatcaaggaatgcttgggattcagaaccctctggtgattacgtctctctaaaaccgaccaatcaaacgtttgattacaaggtatgatccattttaacacattcttgtcttatatggtgaaagaactattaataatatttgctgagatcattggtacaattctctaaaaataaaatgtgggatccgcgaatcattataagaacagaaatttccttagaaaacgttgagttctcaggaaccatataatcggtttcttcattttgttatatttgtttgatatttgatttatgtaactgtaggtacatttcattgatctaagcctgaaaccacttaagagaatggagtcatactacaaattggataagaagataattagcttttacaatcggaagcagaaagccgaatacactgcagaacaaatcggcaactcaaaaccttcccacagctaa

SEQ ID NO: 176900 - DNA, 107 bp, Arabidopsis thaliana landsberg
atcaaagcgtaaataatcgagaacacacagaattctttcaacaaatcggatcaaatacaaggaaacgacaagaaaataaacagatctgcgaaaaatacgaaccctaa

SEQ ID NO: 176901 - DNA, 781 bp, Arabidopsis thaliana landsberg
atgctaggtatatcgactttcggaatatccacgagcctgctcaagtggtttccagtgcaagtggtggaccggttcatgttacgtatgtctcggttagttcttggtgacacggatcggttagggttagttcgaccaaaacttggccctcttgaacgcaagatcaaatgcggaaagactcctgttttggacgttggcactcttgccaaaatccgaagtggacacatcaaggttcattaattataattaagtatttttaatacaatcttgattacaaaaccgtgagcttatggtatattgatttgtttttttttgttttttcttgacttttaggtgtatccggagttgaaacgggtaatgcattattcggcagagtttgttgatgggagagtagataacttcgacgccattatactcgccacgggttacaaaagcaacgtacccatgtggctaaaggtgtgtaccatgagcgatgatgcgtctacatcttcattattcttaattccttgatattgacacatcacaacccattttacgtttcaatagttgaattaacttggtttgactttgaactgtttttttttagggagtgaacatgttttctgagaaagatggatttccgcataaaccatttcctaacggttggaaaggcgaaagcggattgtatgcagtcggtttcacaaagcttggattgcttggtgcagccattgatgccaagaagatcgctgaggatattgaggttcaacgacatttcttaccattggctcgtcctcaacattgttaa

SEQ ID NO: 176902 - DNA, 161 bp, Arabidopsis thaliana landsberg
accctaatctagccgaaatcgaattgaaaacaaaaatggattcaaatcttcagagaaaatcaaaaattgaaaaccatcgaaccaaatcaagctacgaaaaaagaagagaaaaaccgaaacatgaaagaactactttgtggaataatcgatcattagaatga

SEQ ID NO: 176903 - DNA, 68 bp, Arabidopsis thaliana landsberg
cgtcgtatgaagagcgagctgcgaaactgaaaccaaggaaagaagaaactttggcatgtgtagtgtaa

SEQ ID NO: 176904 - DNA, 151 bp, Arabidopsis thaliana landsberg
cccaattccggggtcacactcatgggcaccacctgctgttgtctctgatggccccccgacgcacccagatctgtcactctcccaatgagtctgtgaacgaaatggagattgtcgaactgtgcatagagtcccgtccactgaacgggcggag

SEQ ID NO: 176905 - DNA, 571 bp, Arabidopsis thaliana landsberg
atggcgatgtcaggaaaatacgtggcggaagtaccgctgaaagggtcggcggagaaacactacaggcgatggaggagccaaaacaatctcttcccggacgccatcggccaccatgtccaaggcgtcaccgtccacgatggcgactgggactcccacggctccatcaaatcctggaactacacacttggtccatactttactctatctctttctgtgtttggtaacacgcgaggattggatgatatctatatattctaatgtggactaaaaatgtgtgtgtgtgtatgaagatgggaagccggaagtcatcaaggagaaaagagagatagacgacgagaagatggcgttgacgttcagaggactagagggtcatgtgatggagaagtacaagaagtatgaggttatcttacagttcattcccaagtcgaacgaaggctgcgtctgcaaagtcactctgatatgggagaatcgcaacgaagactcccccgaacccatcaactacatgaagtttgtcaagagcttagttgctgatatggatgaccacatcctcaagggccagaacaaagcttaa

SEQ ID NO: 176906 - DNA, 243 bp, Arabidopsis thaliana landsberg
atggagtcacaattatggaattggatcttacctcttttgatctcttctctcctcatctccttcgttgctttctatggattcttcgtcaaaccgaagcggaacggtctccgtcacgatcggaaaactgtttctaccgtcacctccgacgtcggatctgttaatattaccggagataccgttgctgatgtcattgttgttggagctggtgttgctggttctgctcttgcttatactcttggaaag

SEQ ID NO: 176907 - DNA, 84 bp, Arabidopsis thaliana landsberg
attctgcttcagtttttccacttccgctgtcgcaaagacaaagatactgacaagaagaagcatgaaaccgcagaagctgtctaa

SEQ ID NO: 176908 - DNA, 1060 bp, Arabidopsis thaliana landsberg
atggttggccgcgtcttagtgctgctaaatgaggtactatcatttatcgtcgctgaatgatttataacatcttccgtacttgagatcttacatatgaaatcagagttgaagttacctctatattttaaattttgtgttctttctaacttgatagggtctgcttccatcgaatatccttgctatgactttcactacagcagcaacttctgagatgagagaacgcataggaaaatctgctggaaagaaagcagcgaaagacataacaatcagtacattccattcattttccttgcaactttgtcggatgcatgcagacaagtgagaatatgatttgtgaatctcttggtattatggtggctaatctcaagtctaaatgtaggtagaagacattaaatgatttttcctcaccactggaaaatgtcacttatatgttgttaaattggagttacagtgccaaactgacaagaaatggaagtaattcttgaaaacaagattagtttctaaattctattcttgatagtataactcttaggtgattttacttttttttttttttctttcttgtttacatgtgttcgtttgaagttgttagttgcatatcacttgttaacatctttaaagttatagatttatgggattcatttaccctatacctttcctactgtcacaggttacaacgtacatctgagttctcagtgtatgggcatgggcaacaaagaagagcgataatagaagcagtgcgtttatatgaggaggaaaagaagaatggaagcaaaacttctgttccatgcgagtctggagaaggtctaaatggtgcaggagcaggagcagtaagtcctgaatatgccaaggatctatcaaaaaaatggcagaaatttgtgacccaggttgccaataatgatatagttttactttatgttctattaatagcgagtatatcctgtctttcacatataatctggctcttaaaagtagttgtttttaacttgtttccccattttagggaaaagcttccggtaagagtccagagcagtgtcgtaagatgggcaatgagatagga

SEQ ID NO: 176909 - DNA, 1108 bp, Arabidopsis thaliana landsberg
atggcgtacagtgcgtgtttcctacaccagagcgcattggcttcatcagccgcacgatcatcatcttcctcctcatcccagcgtcacgtgtcgctctccaaacctgttcagatcatctgtaaagctcaacagtctcatgaagacgataactccgccgtctcccgccgtcttgctctcactctcctcgtcggcgccgctgctgttggttccaaagtatctcctgctgatgccgcctacggtgaagctggtgcgtttataaaataaaataaccttggatcatttcattttcttgaagaagaatcttgaagaacatattgtgtttttttcatcctatttttattttttggtttgttgcagcaaacgtgtttgggaagccaaagacgaacacagacttcttgccatacaatggagatgggttcaaagtgcaggttccagcaaaatggaacccaagcaaagagattgagtatccaggacaagtccttaggttcgaagacaacttcgatgctactagcaatctcaatgtcatggtcactcctaccgacaagaagtccatcactgattacggttctcccgaagagttcctctctcaggtctttgctttactccatcatctgtaaaggtattgatgttacaaaatctaatgaagtgtgagactgagtggtgatttgggctttatgcaggttaattacctcctagggaaacaagcttacttcggtgagactgcctctgaggtaaacttcccattgttatttgttataagtaaaccagaagctgatagaatagaataagagaatcaaacactaaagagagaacacattgtctccctcgttgttaactgataaaacaaaactcaaaagcttttttcaactgataaccttcaaagacctctctagtagtcgatgattattacaagaaagattcttaccttaggtggagtgagttatcaagttctaactctgtgtgtgtgtgaatctgatgttcttacagggaggctttgacaacaatgcagtggcaacagcaaacattctggagtcatcatctcaggaagttggggggaaaccctactattacttgtctgtgttgacaagaacggctgatggagacgaag

SEQ ID NO: 176910 - DNA, 987 bp, Arabidopsis thaliana landsberg
cctcaatgccttcttggcttgagtggggattctggctttctccactgtcatatgctgagattggtctaacctcaaatgaatttttcgctccaaggtggaggaaggtaatgaattcttcagaaacctttcacattatagatttttttttagtttggtattgatccttgtcatctttttattaccattagatgacatctgaaaacagaactttgggggaacaagttctagatgctcgcgggttgaattttggaaatcaatcttactggaatgcatttggcgctttgattggcttcacactcttcttcaatactgtttttgcactggccttgacctttttgaagagtaagttcacaagagatataagaatgtgagttaatcatgttagtatatgcaatgacaattgatgtttttctgcaacttcagcttcacagaggtctcgtgtaattgtttctcatgaaaagaacactcaaagctcagagaatgattctaaaattgcttcccgtttcaaaaatgcattgcctttcgaacctctaactttcacatttcaagacgtacaatatattattgagactccccaggtaaagactaaagagtatgcaagatcagtgcaagttttcttgaatccttttaaacaagatagagaattataatgtgtggctatgatttatgtgttaaaagggaaagaagctgcagcttctctctggcgttacaggcgcattcaagcctggtgttctcactgctttaatgggtgtgagtggcgctggtaaaacgactctgctggatgttctttcgggaaggaaaaccttcggtgacattaaaggacagattgaagtaggcggatacgttaaggttcaagacacattttcgcgggtttcaggttattgcgaacagtttgatatccattctcccaacttaactgttcaagagtccctgaaatactctgcttggcttcgacttacttctaacatcagttcagaaactaagggt

SEQ ID NO: 176911 - DNA, 693 bp, Arabidopsis thaliana landsberg
atggaagagctcgaagacactgatcaagctactcaagaggaactccagaaagactcctacttcaaggaaccagccaggaaactagcacaagacgtgattccagaagtacctcaagaagtactacagaaagtgactcatgcaacatctattgggcctaaagcgcatgcaggtaaggtttattcaatttatactatctttgtaggttcacacagcccacacaatggctagacgcgtcatcaaacgtgctcctcaagagaatttaagtactttcatttttagtttatttttctctctaaaaacaatgatttttgtgttttgattttatttgtttccttgttgcgtttttttgcatttattttcggtcgtagggatagttgaaggactcttataaagtcccccggcagcagttgtacgatttttcacacttgattatcaataaagaaccaaattttcttacttcttctatttaagtgttcttgagagaataagattgttctttgtattctgtgtgcgattcaccaaggccaagtccgtgtactgtatcagagactcatcacatctctgtggtgtacttcaatccgccagcacttcccctccattcgatcccacacgagagaagcgatcaccatcgtgttagatcttcatcatcgaccatctttccttcacaagagagaagcgaccgccagcttgtga

SEQ ID NO: 176912 - DNA, 440 bp, Arabidopsis thaliana landsberg
atcgcggtacaacgaacgtccgcaatgtcgacagcgcgcattggcgccgctggctcgagccgcggtttcgatgtgtggtcccctttacaagcttctcggaattcaacccgaatgctggcggcgacgtatggttcgcattcgacgccgaccggccgctggcgtttttcgccggcatctgggcaccacagtggacctcggtgcgcaaggtcagggagggcgtcgtgacgaccgatctctttgcgtttctcaccacgacgcccaacgccgaggtaggcgcggtccatccaaaggccatgccggtgatcctgcgcacggccgaggaggtcgagacttggttgaccgccccatgggaggaagcgcgcaagctgcaacggccgttgcccgacggcgcgctgcaggtggtggcgcgcggggtcaagcaggacgggccggccgtatag

SEQ ID NO: 176913 - DNA, 126 bp, Arabidopsis thaliana landsberg
ccgttgaaacaaacacatcaatccccggaagatctgatttcccggtcgggttatccgggtttggcgtttcgaatgtcgcctttaaggcttcgatatcggttgcgtggttcacaggaaacaacttag

SEQ ID NO: 176914 - DNA, 81 bp, Arabidopsis thaliana landsberg
atgaatgctgcagggtcagaagggcagcttgtccggttgatctgcattcctaagttctgtgagaccggtattgctgttgcg

SEQ ID NO: 176915 - DNA, 2777 bp, Arabidopsis thaliana landsberg
gtacaaccaatgcaaacaagcacgagatctcctcttactgaacatatatcagcaaacacaaatatccaaaggcgtcaagctggtaaatattatttgttatatgtaacttctccatggaagttgcctctgagacaaactccttgtttttcttttcattgtgacttgtcaggaaatggtggatcttttattaagccttctgatgctacaccaacgaagctgacaaaccctggaggccggattttggagacgaagcaagccattgctgccattcatgggaagaaatttcctgtaaggggcaacaacagcaacctcgtgataaacttctcagatgatgatagtggtagtgaatctgattgtaaaggacgtacacagacatcaaagattcaaccaaagggaaccatatctgggaatagaaacccgtctacattttcacaaacaaaattgaaaggaccaagacagattgatataagagccataacaaagaaggcattgtccactagcacctttagtcatgctgcgacgtccaaagtctccaacctttcatttgccaaggaaatgaaatccaataaatatattcattcctctgaaaggacggttagcaaagatgcacagcgtcctgaacagattgtggagtccaatagcaacaaacttcaggatttaaagcagcagattgcgcttcgggaaagtgagctgaagcttaaggctgcacagccaaagaaggatgccgttaacccaaaaatcactccagcaaggagggtcagtattatttctgatgatactagacatctagaaccaaacgaacctcccaagaaacgtttaaaagttagtggaattgacacaagtcagcctgttattgattacagagtggcagcatctgcggctgcaccaatgaatgcgccagacatccgcaaaagtctactgccaggtgagtctagaggcaaacattgaatttgctactggctgtttcacttaaactctatcttggttatggaattcagtgttttgatttttaccacatctgatatcacctgactctgatgtttatttcaggtgtcaatgcaaattctagttgcaaacacctcggaagtaagagtgatgagattgttccacctgttattcctcagcatactgtggaaggaaatacaagctcaagtgtcttacaaaaaagcaccgtacgtgttaccatggttttgtgttttatgctttactagaattggaaaatttgacgcaaagattatttaatatgctacttatgggtcagtatttttctttatttgagcgtttttatttttattgcagggcaaagcgaatcattacgaaggtggaagagaactcgaaacaatgaaaaatgttgataggagcgtgtcaagtgaacagttacttaaaatagtcaatggaaaccatcaggttttttctagatcctcaaataacaactggaagcggctggtaggaatttgtgatccttacttttgattttttttttgtgtctgcttgcaatctagccttgttcgaataattctggcctctacaacatcccgggaagtacaacagttcctggacatagtcaactggatatgctatccttgacgaacctagaggaatcgcttgacaaagagttggaggaagcacaagaacgaaaacgcctttttgaaattgaagaaagaaatgctcttaaggtttatagaaaggcacagagatctttgatagaggcaaatgccagatgtgcagaactttacagtaagagagaaattttatctgctcattatggatctctcatcgttcgtgactccagattgttgtggccttctatacatggtgagaatcctgaaaccgggtttcacttcttgaataatggtactggaaacattgatctggcaaccaaaacggacattgctcagcatactcagctagaaagcaaccacaaatttaacagtgaatatgttggcagtcatcctccacctcattcccgtagtggacagaatttgggttcagaaccgtacagtgatcttggtgctagtacctctgatggattgccttgcggtaacaagcaaactgcaagtagactatgctccccatcaagtgatgcaaacattttgccagatgacgagtcatttccagttgaccatgaatctaccgaggggaaccctggacatcaaaaagaaaatcttgatcaaacactaggcaatcagaatgctttgcttcttgaagcatcattaagatcaaaattgtttgaccgtcttggcatgagggcagaatctagaggtggcacatgtttcaatgaagagactgtgatagatagaggggatgaaagagatttcggaagtgaaggaacccagagagatgacggtagtcctttctccgaaatatatctgcataatgattctctaggtaaggagtttatctttaagagattggcattttgtttagttattatatgatttttttatcttatgtgtggctgtgcattcccttcaaaaaggaaaaataatagcatggtcgttttgcaaccatattttacattgcggatagcaaatgcatgaactggggtcaaatgtgattgagttcccatagcattgtcccgagatggatgaaccaacgtggtccccatgtgcttcactttcctttatattttcagtaagatgtcttcctgttttcaatttcagagccaggggccaataaactgcaaggaagtccatccgaagcaccagttgaacgacgctcaatcgaggaaaattcgctaaattatcagttatctatagatatggagtcccatagga

SEQ ID NO: 176916 - DNA, 92 bp, Arabidopsis thaliana landsberg
atttcttggatggaaagtttataatgccggccaattctaagcgcacaaatgaaaagaaattatttgtacgtgacccacactctaactgctaa

SEQ ID NO: 176917 - DNA, 1555 bp, Arabidopsis thaliana landsberg
atggaaacagtagagcctggtcagacatcccatgaaagaagtctttccaaagaggaaacggtgaacttacaacccaacccctctgtggatgatactccaggagagtcctctgtggtaaagacagatgatggacaggagcaggttctggttaaagatgactcaccaacggctgtagaagaggcatctgtggaggaaaagaattccatcttgacttctaataccgcgacggtagaggctatagatactactgatcttggtaaaataggaactgagacgacggataatcttcttgaccaaacagaagagaaagccaatgtagaatcaaggatggaagatgattgtagcgatgggaatgtacagactattgttacttgtagcggtgagttgaataatcagagcactttacttccagagacttccaatgatgaaaatgttatcagcgaccacattcaaagtagttataaccgcaatgatctaactgcagatgcacggtcaattttggttgaaggtcattctgatagccatatagactcagcttccgaagttgaaaaagtggaagctaaaaatattggcaaaactgcaaagcctgatttgaaggagatagagctatctgatgtcacagtactagaaagaggggaccaagctccctctactcttgaggtaggtggacaagatgtttctgggaccgaatgccaagatctccttgtcagcactgttcatactagcgtagctgttgaagcgtctttggaacttgctggggaattgacaactataacaaacagtgtttccattgagaagcccgagttgcttagtcatcaacatatggaagttattacaagtgaacatgagtctacttttcagatagagactgagacacatccgcagatacacgtatttgaaacttcagagagtgtttatatttcaacgatggactcaatggttgaagctagagaaggtggtgtgtctaagaagagtgacaatgaaggtagtgctcgcacttctaatctcgagcaaagcatggaactgcctgtcaatgccaatgatagagatgaagatgtcaagaactctcagatcctatctgaaagcgttgtgtctggttctgttggctatgtttcaggaggctctacttcagagttggcggagtcagaatctcaatctgacagcattccaacagacaagtcaggtaaacatattttctaatccttttaatatactctattttcatactgtgtacttttacgttttgccttctcgttctctaagtagcccttgttcagcttttttttttgcttctgtcggggtcacctttccactgtaaatgtatatatcatgattacttcaagtaatttacttgtttccccctaaatgttttccacagagactatgattgacagttctctcaatctcgaagaattacaacctctaagtcaagatggagcacctgctgtcagtctcacatcttcaatagatttacatatggtaaagacatcctctgatgacagtgaccaaggcagttactctgaaaccaagaaggtttatggtgaacctgaaaatg

SEQ ID NO: 176918 - DNA, 138 bp, Arabidopsis thaliana landsberg
atggagttaagccagaaaagcgaaagagaggaaaacacagaaactgcccgcagaatagacggctgggagcacgagatcaatgaggcccaacagaggcatcatgaaatagtaaatgggcgatttgggcccacaaagaag

SEQ ID NO: 176919 - DNA, 74 bp, Arabidopsis thaliana landsberg
tgtttgagtcgaatattattgatgttcgcattgataacgtggttgatgattttgttatcatcttcgaatattag

SEQ ID NO: 176920 - DNA, 335 bp, Arabidopsis thaliana landsberg
gcatccattctccatcacttctgcaccaggagatgactatttaagtgttcacattagagccttaggagattggaccactgaacttagaagcagatttgcaaaggtaatccttgtcactttttttcttataactaaatttcattatagctgttttatcaaaggttaaagaacgtcattattactttaagcgtaagttttttttttttttttttttctgtttgtatgtagacatgcgagcccactcaagcagccgctaaacctaaaccaaacagtcttatgaggatggaaacaagagctgcgggtgtgaatcctcacattgaagaatcacaagtctt

SEQ ID NO: 176921 - DNA, 267 bp, Arabidopsis thaliana landsberg
atccagacgctctgggacggcgatcttaccgtgcgcgccagcgtcaccggcgagttcaccgggaccatcaccgactcgatcaaccagaccgatgacacgctgcgcgcgctcgttggcacgatcaacgaaaccgagggcgagaacaacgccgacggggcctccacgcaggagaccgcgacgctgatgctctcgggctcggacagccacgcgcaggaagctgtccagatcttcggcccaatgaaagcgagcaccgactcgataaatacg

SEQ ID NO: 176922 - DNA, 861 bp, Arabidopsis thaliana landsberg
atgcaggatgtgaaggaagattctgcaaaaattgatacagaagctcttccgcttatccgaagagcagaattcagttgttggctccaagaaagtgtcagtcaccgtgtacaagaagatgtgagtgatctaaatggttctagctaccttgagcacttattctttcttctaactggacgagagcttgattcagctgtggaacttgccatatctaagggagatgttagacttgcttgtttgttgagccaggctggtggatcaactgtaaaccgcaatgatatcttgcagcagcttcacctttggagaaggaatgggctggattttaatttcatcgagaaggagagaattaagctttacgaattgcttgctggtaatatccatgatgcgttacaagattttacaattgactggaagagattcctagggttgttaatgtggtatcatctacctcccgacagttcattacctatcatcttcagaagctatcagctcctactaaatcaggcaaaagctccgtggcccgtcccaatatatattgatgaaggacctgcagatgggtttgtaagcgacaacaagcattctgacatcttgtattatcttatgcttctacacagcaaagaagaggaagaatttggtttcctgcagactatgttcagtgccttctcttcaactgatgatccacttgactatcatatgatctggcaccaccgaggaattctagaagcagttggagctttcacttcagatgatcttcacactctagatatgggatttgttgcacagcttctctctcagggcctttgtcattgggctatctacgttgttcttcacatacccttccgtgaagatcatccatatctacac

SEQ ID NO: 176923 - DNA, 269 bp, Arabidopsis thaliana landsberg
gccttggcgtcttaaacccatctctacaagcctttggtgctgaccagctcgactacgaccttgaccatgacaatgaccacgagccatcctcagagaacaaagaagtcaaatcgaaccgcaagactcagtttttccaatggtggtattttggtgtctgcgccggtagtcttctaggagtcaccgcatggcttacatccaagacacgtttggatgggttatcggttttgcatcccaccagcttcgatgttgttgtagacatcatgtcttga

SEQ ID NO: 176924 - DNA, 142 bp, Arabidopsis thaliana landsberg
atggaggtggcaggcgacctggtgaccgttgccctggtcggtgaagggcggatccaccttcgagcagacctccatcgcgaacgggcaccgggtgcggaagcggcagcccgagggcgggttgaccgggctcggcacgtcgccg

SEQ ID NO: 176925 - DNA, 591 bp, Arabidopsis thaliana landsberg
gcacgcagattggccaatgctcgattcttctcatcatcaccttattgctttttgagcaacaagattcttggagagtcttcggatggtggcaaaatcgtaaactacagagttttcgaccctagtacagaacaagttgtgactagctgcgagaagaagattcccaagaagctgcttggtcaaacatgtgttggagcatcgcaaggatgggttgctactatggagtgtaaagatctgcccgtaaatctcactgacgtcttcaagccatgtgtctcacccacaagagtcacacctctgccttccctaggtttttatcctactccttattctactgaattgtcgctctcgtcttcgtctcttgaccaagactttagttacacggaagatattggagatctctgcatcttccttggcgcaagtgaagccttctgcctcacggcaagcatgtacccggggcttaaacctaactctatctattacattggccatggtcttggttcatacgatctaacctctggtacggtccattccttttaccctcctcatgcaccaatgctcaaccatgttccttactggatcccttctcatctctga

SEQ ID NO: 176926 - DNA, 1072 bp, Arabidopsis thaliana landsberg
atggctggaggaagtaaatcaccggcgtcatctttggaagatggaaaggcatacgtcaatgctgtgaaggtcgcattggaggaagcggaacctgcaaaatatcaagagtttctaagactctttcatgaggtgatagcgcgaaggtgtgtttggtttgctcttaaacagtctaaagaacaaagacacatgtgagaattgattctaatgttatttttatctttgtaggatgggtatggctactttcagtgcacgcatgcaggacctcttgaaagatcacccgagtctgtgtcttggtttaaatgtcatgcttgcacctgagtatcagagaaccatccctcccgaggctagcgaagagtttcataaggtggttggaagaagcgtaccacgtccggagcctaccatagatgatgcgacttcatacctcattgctgtgaaggaagcatttcatgatgaacctgcaaaatatgaggaaatgcttaagctcttgaatgattttaaagctcgcaggtatgtattagttcttttctccatgttatgtttgattttctcagtctacagaacaaatacattatgtaaattgattctgatgttactaagtctctttgtagagtcgatgccgctagtgtcattgctagggtggaggaactcatgaaagatcactcgaatctgctttttggtttctgtgtcttcctttcagctacaacgagttttaccacgaagcttaaggtatagagtgcttataggtaccatttgatgtttcctatatgttcacttgcggtttaagtaacaaaattgtccatgtgcaggcaaagtttcagggcgatggtagtcaagtagttgactctgttcttcagataatgagaatgtacggtgagggaaacaagtccaaacatgatgcgtatcaggaggtatggttcttggtaggatactttgtgttgtgtgttgcactttcttagttctttggtttgatttgctttgttatcgtttgcagatcgttgcacttgttcagggtcatgacgatttagtcatggagctttcacaaattttcactgatccatctactagagtctag

SEQ ID NO: 176927 - DNA, 259 bp, Arabidopsis thaliana landsberg
atgaatccgagaatcgaaagcgtttgtacgaaaagcttcggtaagaaaacttctgttgtaacctacgggaaagcccatggagaaagctagggtttttagagagataataatgagtgagctctgttttttttttgtttttttgaaaaagttgatttttttaatgtcatgaggagtttgatttatagaaatcaaaggaaggaagaagatgaaggaaggaaggaaggtacaggattcgtctaaacgacatcgtgtcgtgtaa

SEQ ID NO: 176928 - DNA, 673 bp, Arabidopsis thaliana landsberg
atgcaggctcttaacctcaacgaagatttgcatcggaagactgctcttcgaaaagtgtatcatagagctatattaactccgacccaccacgttgaacaactttggaaagattatgagaacttcgaaaatactgttaaccgtcaattggtaaacttctaagaaatttaaaattgtgtggcttcttattttcatgaaaagaagcaggtacaaacttcattctcttggctttgttgatggataatctaatctaatcatgtgagcaggcaaaaggacttgtaaatgagtatcaaccaaaatttaacagtgccagggctgtatatagggagcgcaagaagtacattgaagaaattgattggaacatgcttgctgtcccaccaacaggaacttcccaggtaaagaatttatcatccattgcttctttttggaactgctgagtgctgaatgtacaattattttcttatctttttgagttcgataagattggatatattgactcttaaattgcctaaaatacattatgagcataattcacgtcatgagatcatgttattaagataggaaatacatattgagtatcatctgcttactctgctactttacaccgtcttatgtttttttgcaggaagaaacccagtgggtggcctggaaaaagttcttgtcctttgaaaagtaa

SEQ ID NO: 176929 - DNA, 297 bp, Arabidopsis thaliana landsberg
atgctaatctttcctctccaacattcgtcatcgccgcgttcgtcgagaaccagtaaccacacggacgagacgagacaccggaaacgcgaagaagcgttgatgaaatgcgagacgcgacggtaagggaacgattagggttacggaagcgaaaaggagaaattagaaagagagattttgggagatttatgagagtgttaatcggaagagaagacagtctcatggtttttagtatcatcgtgctttttccgatgcagcgatttacggcagcgttctgaaccggcgatgtgtttgggctaa

SEQ ID NO: 176930 - DNA, 410 bp, Arabidopsis thaliana landsberg
aagagatggcatttgtaataaaccacctgtgcatcgaccagttactaggtaagcatagatctttactcttgtctactttgagtatctcacattgtctgattacttaacttttactactctctgttggttcaggaagtttgctgctcagttagcagatcataagccacatatccgtgatgaggtaccctattgttcaatgtatgtttcatttagagcaatgatgatatagaccggattttaaagttctgatctttaactcttaggaaactaagaaaccagactcagtttcaagtgaagaaccagagacgattatcattgatgtggatgaaagtgataaagaaggaggtgactttaatgagccaatgattgtacaacatactgaagcaatgctggaggagattgagcagatg

SEQ ID NO: 176931 - DNA, 75 bp, Arabidopsis thaliana landsberg
atggtacgatctgagccttgtgttctgttcgctcagacctttgttcatcctcaattggacgaatatgttgacgag

SEQ ID NO: 176932 - DNA, 1114 bp, Arabidopsis thaliana landsberg
atggcaccaatcaaagaattcatatccaaattctcagatttcaaaaacaacaagaaactcattctctcctccgccgcaatagccttgctattattggcctccatagtcggaatcgccgccacaacaacaaaccaaaacaaaaaccaaaaaatcacaactctatcttcgacatcacacgccgttctaaaatctgtttgcagctcaacactatacccggagctctgtttttccgccgtggcagccaccggaggaaaagagctgacgtcacagaaagaagtcatcgaagcgtcacttaacctaacaaccaaagccgtgaaacacaactacttcgctgtcaagaagctgatcgcgaagagaaaaggtttgacaccgcgtgaggtcacggcgcttcacgactgtttggagacaatcgacgagacgttagatgagctccacgtggcggtggaggatcttcatcagtatcctaagcaaaaatctctgaggaaacatgccgatgatctcaaaacactaatcagctcagccattactaatcaagggacttgccttgacggtttctcttacgacgacgccgataggaaagttcgtaaggcgttattgaagggtcaggtacgtaaatagttttactcttttaaaagtttagattatagtattatcttcgacatacgacttactcggtaaaataatgtagtgattatagttggtccataattagagcacttaactcttcaaatacgtacccaaaacatttgttttactaggaaatcttttaatatgtaacagctttataatattgaacggtatcaaaacaggtacacgtggagcacatgtgtagcaacgcattagcaatgatcaagaacatgacagaaaccgacatagccaactttgagctaagagataagtcttcaaccttcaccaacaacaacaaccgcaagctcaaggaggttaccggcgacttagacagtgatggatggccaaagtggttatccgttggagacagaaggcttcttcaagggtcaacaattaaagcagacgctacggtggcggatgacggaagcggtgactttacaacggtagccgcggctgtggctgcggcgccagagaagagtaacaagag

SEQ ID NO: 176933 - DNA, 306 bp, Arabidopsis thaliana landsberg
gaattcaacaaaatacccaaaagcctaacagttccaaaacccaccagagaagaagaagaaatcaaaatccacacacgaagaagaatcctaaaattgatgggagtcaaaaagagtccacgaaacagaaagacacaaatcaacagtaacaaaacaaaattagattacgaagaagagaaattaacacacttggagagaataatctatgtgccgcgtaaaggtaaaggaggaagcaaagacgcaattataagcaaagcagagaaagttggaggaaattacaaaggaagattccgcgaaattacctattag

SEQ ID NO: 176934 - DNA, 692 bp, Arabidopsis thaliana landsberg
atgcatgtgcatgtttctgagaacagcgttcacaaggttacgattcttatcattcctgaaatggctgaaacaagcggtctgcaagagggatctaccatagctccatctgttacttttggaacgagtatcgaaggtgaaacaaaggaatcaacttctgtgaagtcacaacctatggctatatttccatggataaacgcaaatggatcagtaaataaagttgtcttcgatggactagttcgtcgcgttcttggtaccgtaatgcaaaatcccggtataccagaggtaaatactttctaattccacacaataagctcgtagctctaagaaaatattaatcaaaacatttcattttgtggcaggaagaaatcataaaccaaatggacgtactaaatcctcaggtaatatacaatctttctcatatagtgaaactgatcataatctcttaatgctcatatatattatctgtgtttactctcgtataacattatgtaacttttcaatctcagagctgtagaaagcttttggagttgatgacactagatgggtacatgaaattgagggaaatggtgcaaaccaaatttagcggtcctccgtctttgttaaccggtcttctctttaccggtcatagaaaaacggaacttatcagccggaaacacttgtttgccaactccaagggactctttgccttgtaa

SEQ ID NO: 176935 - DNA, 168 bp, Arabidopsis thaliana landsberg
aaccaaaacgttaaaagtaaaattccttaccgagatagccagacgtcattggagactgttgccgacgacatttacttcggtgatgaacatgacgaacacggcaagaggaattcggtttttctcctgcggcaactgattcggcaagacatgctgaccaagaggacttag

SEQ ID NO: 176936 - DNA, 454 bp, Arabidopsis thaliana landsberg
  unsure (1)..(454): unsure at all n locations
atggccattgctgcaaaagctcaacctcgaaaaacaggtggtgggactctttatttcgggtcatcctttgaaccagtttgagcgcgacatcaaatattttgtgcggtacaatatcagcgatgtgaacaatgagcaattgaaatcgcccggcaaggaattatnnnnnnnnnnnnnnnnnnnnnaggcagagcacaggatctcgaaaaacgggaatggtttcggccagttcgaggtggaagatttcaacgggtcggccaggtttaccgtgtttggcgaagaatatttgaagttcaagcacctgatgaacgagaacatttatgtgctgatcaaagggcggtttgaaaaacgttttgaaggggccgatgtggagttcagggtcaaacacatggacatgctgcccaacccccggacactttccaccaagagcataaagctaatgatggacgcccaaatg

SEQ ID NO: 176937 - DNA, 1078 bp, Arabidopsis thaliana landsberg
atgggagtgtactctcagttcattgagagacaatcagttctgttctgtactgatgttcttgctagaggtcttgattttgataaggctgtggactgggttgttcaggtatgaatccacatccagaattacaaaactctatgatcttgtcgggctgaagtgtgatgtcatcatatttattttataggtggattgtcctgaagatgtagcttcttatattcaccgggttgggcgtacagctcgtttctatactcaagggaagtcgctcctctttctgacaccttcagaggaaaaaatgattgagaaattacaagaagctaaagtgcctataaaactcatcaaggtagtagctcccgtcctcaattttctttgagtttcgactgtggttggaaacatttgactgtaaaaaaatttgtcacacaggcaaacaaccaaaagttgcaggaggtttctaggctcttggctgctttgttagtcaagtatccagatcttcaaggtgttgctcagagagccatcatcacatatttgaggtccatccacaaaagaagggacaaagagatttttgatgtgtcaaagctgtcgattgaaaacttttctgcttcacttggtctgccaatgactcccagaatccgattcacaaaccttaaaacgaagaaaaagggggtatatgagagttctatcgctatggagactgagaatgcacaggaatatgaagcacctctggttgtcaaaaaagatcttcttggtgaagatttagaagaagaggattttgctctcaagccacgtaaagagggcaaagtagtagaaaaatcaaccaaggaagaagaagttctcatgtatggttttcgcattccgttaacattttttccattcattcgatccagtcttttcacgcttaattatgtgtataaattctgttgaattttcagaccaggaaatcgtgttttgaaaaacaagaagctgaagatcaatctacacagaccatttgggtcgagggttgtgcttgatgaggaaggcaattctttggctcccttagcaagtgtagctgctgaagcagggactgaagtagcccttgatgaag

SEQ ID NO: 176938 - DNA, 145 bp, Arabidopsis thaliana landsberg
atgataagagtggcgaagaagacgaagcttgttcggtttcaccgaggaatccatttgattttcccggttggaattcggttcaatctccggttaatgattcggttatgtttggttcattggtaggttcgccggaggaaaggattag

SEQ ID NO: 176939 - DNA, 214 bp, Arabidopsis thaliana landsberg
atgaggtcgcatgcgcatcagtttggtcaagttatactcgccgtgccgcaccccctttccgaccaacaacttcgtggtgtgtttggactatttgtggtgtgttgtgatggtgtggatgatcgatgtggaatgatttcaaaggccttgggcgtcctcccttatataaggggcaaatggatgtttccgaagcacacatccattccttgcaccttcc

SEQ ID NO: 176940 - DNA, 1206 bp, Arabidopsis thaliana landsberg
gagagggacttgctgaaggcagataatgagagtaataaagcatctgacaagcgaaaggaagaggcaaaaattaggaacaagttgcagcttgaaggaagggatccacatgttcttttagaagaaacccgagaagaactggattatgagaaggatctgaattcgaatctacggttacagcttcagaagacacaagaatcaaacactgagttgatccttgctgtgcaagatctagaagcaatggaggggcaaagaactaaaaaaacagttgatcatcctagaccaagaacctgcgagaggaacaccgaagaatcaaggagaatgtcctgcacaagtgagacagatgacgatgaggatcaaaaggcactagatgaacttgtgaagggacacatggatgcaaaagaagcacatgtcctggagcgaaggatcactgatctctacaatgagatagagatctataaacgagacaaagaggatcttgagatacaggtggagcagctttctctggattatgagatacttaagcaggaaaatcacgatatctcatacaagctagagcaaagccaagtgcaagaacagttgaagatgcaatatgaatgttcctcttctcttgtaaacgtaaatgagcttgaaaactatgtagagagcctagaagctaagctcaagaagcagcacgaagaattttctgagtccctgtgccgcattaaagaacttgaaacacagatcgagggaatggaagaagaattagagaaacaagctcacatctttgagggagatattgaagctgtcacacgtgctaaagtggagcaagagcaaagagctatcgaagccgaagaagccttgaggaagacgaggtggaaaaacgcaagtgtagccggcaaaatacaggacgagttcaagagaatctctgagcagatgtcttcaacgttagcagcaaatgagaaggtgacaatgaaagcaatggccgaaacccgcgaactccgcatgcagaagcgtcagctagaagaacttctcatgaacgctaacgatgaaattcgagtaaatagggtcaagtatgaaacaaagctcaacgagctctcgggaaagacagatcataaaacgaaagagatggagagaatgttagtggatctagagaatcaaaagaggcaaaaagaagatgttaatgcagatttaacacaggagatcacaaggatgaaggatgaggtctga

SEQ ID NO: 176941 - DNA, 256 bp, Arabidopsis thaliana landsberg
gaagggagattggaagattgtgcacttcgacaagacagagggtggtgcaggagagggtgatgagggctgggaactgttcaacgttgcacaagatccaggagaggtaacagatttggccaagactgagcccgagaagctaaaagaactcctgctacactgggacgagtatgtgattgagtgcggcattgtgcggggagaagtggctttgatttcaggcgtcagcagagatgatgccccagagttgtgggaggacaag

SEQ ID NO: 176942 - DNA, 67 bp, Arabidopsis thaliana landsberg
cgtgtacagtgatccaaaagatttaaattcggcagatgtaacgcccgtgaaccggataatcggttag

SEQ ID NO: 176943 - DNA, 869 bp, Arabidopsis thaliana landsberg
atggaggggcctttgttgactaagaatgagcacatcctcgacgacgttacaataatccatggcgattcttcctcaaacgaagagcacatcgtcaacattacaaccaatgtcgattcttcatcagatgatgagcaaacacaggatgattgtggtgatcatttgagacgtataatagctctttttgtggatgaagggtgtgatggatttacatctagtcatgtttgggttatggtcgagtttgttttgactttgctccaggttgttgcagccattgctgtcctgactctgacaaaagatgaaacagatccacagaaagtgtttcgtacactgatcatctgttataccggtggctgtattggcgtgctccttattctaggtttggacttctgggattattgcggaaggtataaactataatttgtttattctttgtttttaaggcattagaaaccgaaatcgatagataacagtttcttattgatttgcagattctacgaggtgatggagaatttgaaaaagatgcttgactatttcttcgtgggttgggttgtggtgttttcatggcatcttataaacaactcatcatctccagataatgctacacaacagtactggtgcgcaacaatactaaattttataactatttagtatgtctcgaaaacagagtaaatctctctaatgatgataatccaccatgcattttcctgttgcaggttatgtatggctttccttgttgtcagttgcattctacatgtgcttcctaatctcccctgcgcggcggcttgttttctatatcctatgatacttcgtcttacccagtctatagacttctttgatgacattactgaaaagatagaggacattaactg

SEQ ID NO: 176944 - DNA, 151 bp, Arabidopsis thaliana landsberg
gtcctgcaagtccccctctccaatgcacgtcccagacgtcgatgaaagtactcacgctgagcaccccgatccaatcgcagaccaccccgaagacgagacctttccatacccattcggcgacgtcttctcccactttgtgacgactcactga

SEQ ID NO: 176945 - DNA, 108 bp, Arabidopsis thaliana landsberg
ccatgtggactcggaggcatcatcgcccttcgtcttcgtctccgctgcttgctagttcagccccgcagctgcggctgtgctcctcaggtttttggaaaaacactgtga

SEQ ID NO: 176946 - DNA, 75 bp, Arabidopsis thaliana landsberg
gcgactttcaataagaggttgcagttagggctggatatcgagccagttcgtccgagttcgagctggcttggctcg

SEQ ID NO: 176947 - DNA, 558 bp, Arabidopsis thaliana landsberg
atgcatgcgaatagcagcggccgttttttacgtcgcaactctcgtcagtttctccgtgccgagggccgcccgcccgccctgcaatggcatccctatctcgttttccgagatatgtttgaagagcaagcaggattattatgagctgcaaacgtggtgggatccgcctaaagcaaccatcaagcatgagtaggaagactcatgaggcagctctacatatacgtcattatttgtcgttccatgtaatatccatctatatcgttgggttaatattagaatgtggtagttttctagaaaaagttttaagtacgtatgtgtttcttgaaacgctagtagtagtttagttttaaaattcttagctgggtgacggttgtgtttgaaaaaaagaagaacaaacacaataggaatcctcaagatccccgtcggctaaattaattctcgtcggtttattccacaacagcggtgattaaattaggaataaaattctatgcaccgctgacgcacgacgtcaatctgcggcaccgtttcgatgcacgacacgcgtccaaaatcaacaactaa

SEQ ID NO: 176948 - DNA, 132 bp, Arabidopsis thaliana landsberg
tgtgtggatcacgaaattcggcggtcgactattcgacataaaatatataaaaagcttcattctcgtttggatcggcttagacgtgtaatagacatcgattcaactttgctaaacgctcttaaacccacttga

SEQ ID NO: 176949 - DNA, 324 bp, Arabidopsis thaliana landsberg
acgccaaaagaaaaacacagaaacagtatcataatggaaaatatttatgttcttcttataaccatcccttgtgttgttgcgcttctcgcatgttgtgtcgtctacgccgtcaacggttgcaccgatcacgatgagatgcagaccaaactagttgacgtggaaaagggtataaccgtcacacaagatgttttagagtcgaagaagtctcatgtcgccggcgccaattatggcacttttcttcttcttcatcatcatcgtcctcccatagcctctattccttaccatcatcatcatcatcatcacagtgccggcttttcacgttga

SEQ ID NO: 176950 - DNA, 15 bp, Arabidopsis thaliana landsberg
atggcgcggattccg

SEQ ID NO: 176951 - DNA, 141 bp, Arabidopsis thaliana landsberg
ggcccaaagattcatcgaaatataattggttcgggtcctttgatgcgtaccattgatgataccttgggccttttgcgctctcacaaaatcagtttttctaaactctattgcttaacttatgcaccattcactgattattaa

SEQ ID NO: 176952 - DNA, 425 bp, Arabidopsis thaliana landsberg
atgaccaaggaagagcggcttcgtaacgtccattctcgggcgctgaagcagttcgacaatgtcacgcaggctacccaggaagagcgcgcgcttgcgcttcaggatcgccgcttcgtctcgatctcaggcgcgcagtgggaagacgagtggtacgaccagtttgagaattcgatcagggtcgagatcaacaagaccgcagccggtcttgagaagatcgtcaacgactatcgctcgaaccgcgtcacggtcaatttccgagcgaccaccgacagcaagtcgagcgaggccacggccgaattgctcgacggcctgttccgcgccgatgtgtaccgctgcaaggggcagcaggcgttcgacaatgcgttcgaggagggctctgccggcggctatggcgcgtggcgcctcatcaacgagttcgaggacgc

SEQ ID NO: 176953 - DNA, 340 bp, Arabidopsis thaliana landsberg
atggctcgttcacatggtctttgcccttttaccgttcatggggttgttcggatttactgggcctcaatgcatgaaatctcccaggtattatttttgttttttgttttatcgaagattttaaagcggtacgtatattatatgtggcctaaaatagtccactagtgggccctatgaaaaagtcaacgactttaaagtagtcactctgaatggagcagcttccataccaaggaatgcggtcaaatttatcattttgggtcttcgtatggcatacaagtgtagtgtagatatcgctattaattttgttgcaccgaaaagaaaattatcgaatcacgcattttaa

SEQ ID NO: 176954 - DNA, 154 bp, Arabidopsis thaliana landsberg
atggcgcgcgacatatttccgagcgaccactttcgcagattattgacattccaaaatgatctctcgagtttgtttgatcccaagtcttttaagtcaagagagaaacagtcctcccggacaagacaagaaatttcggttttatttaaaccggccg

SEQ ID NO: 176955 - DNA, 1125 bp, Arabidopsis thaliana landsberg
ggcaggaaatggtcgtttaagtgcatctggaggtgatgggtatgctggtggaggtggtggacgggtatccgtcgatatatacagccgccattctgatccaaaaatctttttcaatggttagctccagtttgttctttcaatcattccctaaatttgtgctttcaattgattagatattgtgatgataacaactcatcttgatagttcccttttttgtttaagtatttgtggttgtgacagttcaattcgaatttactctttgtaggaggtcctagttttggttgtccagaaaatgctggagctgctgggactctgtatgatgttatttcagagagcttaaccattgacaaccacaataagacaacatatacagacactcttctcctggagttccctaaccaccgccttttcactaatttgtatatccggaatatggcaaaggttgctgttcccttgcgttggagtcgtgttcaggtttgtgaaagtaaatataggttcttgatactgtaagcatcatcttttggccactgaagccaagtgtaatcagtgtgaacaagttattcattttcccggttgtgtaggttcaaggattgataagtttgtcaaatggtggagagttgaactttggtcttccacgttatgcttcctctgaatttgaattatttgctgaggaactcttgatgagtaattctgctatcaaggtattcgattaatttgaaaaggtatattttttcttccttctgcatactatgttaacctctgtgctatgtatcaggtttacggggctttacgtatgacagtcaaggtgttcttgatgttaaagtcaagaatgtttatagatggcggtggtgtgacaatattgggaacttcaatgcttgaaattagtaatctgatggagctcaaggtatccaatccaatatactgtaacttgttcctcgtcgggctgagaaattatagtcaactttgaagttcgctcatatgctcgttactttaatgtaggagtcatctgccatacaatcctatggcaacctgggagtacatgggcagggcctgttgaatctaacaggcacaggagattcaattgaagcacagcgtctgattttgtctctattttatagcatccag

SEQ ID NO: 176956 - DNA, 245 bp, Arabidopsis thaliana landsberg
atgaagtagtgacgaggaagaaggatatggaagagaggaatctagagtcagaaagagttactaagccagcttcgaaatgggacgcctacttaatcgatgacgaaggagaacaccaagcaccaccgcgatttggtgttaaaaaggccttgaaggatgacgaagtaggaggatgggacagagcagtaatggagataaatacggaatatcagatagtagacgacgaggtacatccagatttcatgtga

SEQ ID NO: 176957 - DNA, 932 bp, Arabidopsis thaliana landsberg
atggagtctctccaagagagctctacctctaaggattatagttccgagcacatccaagtaattcctctaaagatctttttcgttttcttgcttttttagatgatttgctgtttttatgtttgtgtactcgatcattggaacgatgttttcttctatagttattgaaaattcctactatgaatctcttagtttcacttttttgggttattgtatcttaaattctctatggtgtattaggtgttggaaggcttagaccctgtcaggaaaagacctgggatgtatattggtagcactggatctcgtggtttgcaccatctggtaaatgcctttttcttttgacgttcttggtcgtgactggctcctatcaactggttatatccttcccaatacatgttgtttcttaggtttatgagatccttgacaacgcaattgacgaggcccaagctggttttgcttcaaagatcgacgttgttttacattcagatgattcagtcagcatttcagacaatggacgtggggtatgtgatttgttccacttactcatcttcgcgtgtatttgtaactgaaaacatggatattgctttcttatgccgagatgcaagagaaaggttaagtggcacccaatggcattctgtactctgtagttatgtgtaggagccaattttggtattcctagctgatttttctcaaagcttccggttttatatctaatgtgcaccaagagtaaacaatatatgtcaatcatgctctatcttattcatttacgttttttttttattttgtatatagctttctttcatcccagaagtaaaatttgttgctaatatcaaaatgcatttggtcacttttattcatacatagctttctgtctgcagatacccacagatttgcatcctgcaacgggaaaatcgtctttggaaactgtccttacg

SEQ ID NO: 176958 - DNA, 440 bp, Arabidopsis thaliana landsberg
atggttcgatccttggtgcggtccatcttatccactctggcactgccagcgctggcgctgctgctggctgccaccgcgccgccgaccgatacatcgccaccaggggcccatccgccggcgcgtctacagcacccggccgtgcccgcggcccccgggcagaccacgcgcatcgtcgcggtggtgaatggcgacgtgatcagcaatgacgacgtcaataatcgcgcccggctgtatgctgtatccaccgggctgtcgctgtcgcccgacgtgttggcacgtctgaagccccaaatcctgcgcgagctgatcgacgagaagctgcgcttgcaggaaatcctccgtaacaagatcgtcgtgcatgatgcgcaaatcgccgatgccatcaaggaaatcgcggggcataacggccttcaggccgaggcactgcgggccaaactggc

SEQ ID NO: 176959 - DNA, 663 bp, Arabidopsis thaliana landsberg
atggagtctcagtctcagagaggtcaacacgaaaccccgaaacgttctaggttcaccggaatgttccataaactgaaaacgaatcttcttttccggtcgaagctagccgaaataaacggtgcaatgggtgatcttggtacttacataccaatcgtcctcgctttaactctagccaaggatttggatttaggcacaacactgacattcaccggcatatacaacgcgataaccggagcagtttacggtgtccccatgccggttcaaccgatgaaatcgatagcagccgtggcgatttcgtctaccgcggaagatttcggtataccggagattatggctgccggaatatgtaccggagggatcttgttcgtgttggggatctctggtttgatgcagcttgtgttcaatataatccctttatcggttgttagagggattcagttgtcacaaggcttagcttttgccatgtctgcggttaagtatataaggaaagagcagaatttttcgaagtcaaagagtgttggtgataggccatggttagggcttgatggtttggttttggctttggtttgtgttctgtttatagttcttgtgaatggagatggtgaagaagaagaggaagaggaagaaggagatggttcgagaggaagaggaagatggggttcg

SEQ ID NO: 176960 - DNA, 154 bp, Arabidopsis thaliana landsberg
gcggagcgctatgagtttgggtggaaccaacgattgccactgcagacagcgtactatatgaaggagcggataccagttgggatacatatcaacatgccggatgatcaacgcagttattcctacagcgatttaagcaaccattcaacctatcact

SEQ ID NO: 176961 - DNA, 280 bp, Arabidopsis thaliana landsberg
atgtttgttccttactcgagcaacaacatcagcgtcaacaacgggaatgccactagccttgaagaggttagacactgtactcttcccagacgctatgcctcccgttaacccgactattctcattctctttttcccctcttttactcctcaggaacacttatattttcccacgtgtacaagttacaattggtttcttcaggattttccttcaagagtagtagacaaaaccagaaatacacaagttaaggatctgacaacgtatttgaatcacacaaaataa

SEQ ID NO: 176962 - DNA, 198 bp, Arabidopsis thaliana landsberg
atgaaaaaagcaattgttttgcattttctaaaccttttccagtcgaaacaacttggccatgatcatctggttcaggcaatgcaaatgcttattcttccaatgcttgcccatgccttccaaaacggccaaacttgggaagttattgaccctgatatagtcaagaccattgttgagaggcttcttgatccacctgaagag

SEQ ID NO: 176963 - DNA, 171 bp, Arabidopsis thaliana landsberg
ccaccctgacggctgtggcggcgaacggagcagctgggagcaacaccaggaagctagctgatcactctcttttggcggacccactggtagagctgtgcgcggaggtgtgctgcagacggcaatcaatcgcggagtgctcagtgagctgggtgtacgtgctgaatagcctgg

SEQ ID NO: 176964 - DNA, 184 bp, Arabidopsis thaliana landsberg
cctctcactcgccgccgcaccaaatcgactcgattccagatctcctttaagcctcctcaccgacgacgacgacgacgcactctgtggagacgagaccgattctttgacggcagatcttaaagtcgtatctccgccgcttacaccggtaacactcttctccttcatcaacttaccggaaaactga

SEQ ID NO: 176965 - DNA, 386 bp, Arabidopsis thaliana landsberg
tacgcggcgcgcgagttcctgcagagccgcgaagcctggatccgccagaagatcgccagaactacgccagcgccacggcgacatgccgctggatccgacaacggctcaactgggataaccgcgaacgccattcccttgcgtggccgcgatctgccggtgcgcgtggtcagcgccagcctgcgcaatatcagcgtgcgggtcgacaacgaggccatcacggtgttctgtccctcggcgcagctgggtgagcggccgaagcttgagcgtgtattgcgccaggagttgcagaagctggcgcggcaggaggcgcagcggctgatgaacgaggaagcggcccgtctcggcctgcgcgtgggcgagccgcgcatcgccgatcagaaaacaat

SEQ ID NO: 176966 - DNA, 1079 bp, Arabidopsis thaliana landsberg
gctacacagcaagaaagatctacatttgtatcatacttgttacctcttttatcagagtattctttgcaaccacaggtgtctgatgctcagtctattgttagcaatgtgaaggtaagatccaaaatctgaagtgctgtctctcgctatctttttttatttatttataacttgtgttggaatcttacgtttcttgttttattttttttgttgtaagttcggaccatctctagctcctatctttgactttactgtatactgtagcctattaatttgagaggttttgttgcactgcatcttatatcgatgattaatggagctgggttgacataattttgagcttcatggataaggatgcataagcatttgttgtcttatctgtgaaatttatgtggagtcatggagaaccagagaacatagaaatttggataggaagttaaatgactggttatatattacactctgcttcattatatatgaaagtgaagtttttcttgcagtttttatgttaaaactagtgattggcttttacagctactcagcactctttttttattttatttaggttttgtttaagcatctacaagaaaagctccttcttactgaggtatgttatccgggtatgggcttatctggtgttaaatctagtttctgcttcattttcgacttctgttttttcctagcgttgaattggctgtatttgttacagacatatgatagatgattgtttctgatctttttcttgtactagacaaagttgaaggagtcggaatatcagttagcaccttggcagtcagatgtgaaccactcaaatgattcccctttggctccatcgcgttcagctggtgtggcattaacccactacgtatgttcatattcctcagtgttatatcataagcttgagtgaatagaatcttaaattacttcttgtgtttccaccagacaaaagattccatgtattctcatgatcacacagccatagactggaatttggagcgccagcagcaggatgagccaagtagctcagctgtgaggaattaccatcttgatgattctagtacgttttcacctcttgaaaacag

SEQ ID NO: 176967 - DNA, 105 bp, Arabidopsis thaliana landsberg
atgtaccggaattgggagatagacggcggcgaaacagactcgcggcgaggagagcggagagacgagaagaggcgacgaaatcgggaaatcgagtttgttggagaa

SEQ ID NO: 176968 - DNA, 1864 bp, Arabidopsis thaliana landsberg
  unsure (1)..(1864): unsure at all n locations
atggccatgaaagctcccgatcccggcggatctggggaaattctcccgagcactccctctctttccgaaactacgtctggaggcgccgcagcagcttctaagtcggctcaattgccgtcttcttcttccgatatcgataatattcacgtacctagctactccagtaagtctgcaacgccgagaaaactttgatttattctactttcttcactgtttcttacggattttgtacttgtaccgtctatttaaccaattaggttggttttcatggaccgacattaacgattgcgaggtccggtcactgccggaatttttcgattcgagatcttcatccaaaaaccctaagttttatctctacttgaggaactcgattattaagcagtacagagacgaccatcctcggaagattagtttcactgacgttcggagaactctcgtcagtgatgttgtctctattcgtcgcgtctttgatttcctcgattcatggggacttatcaactataatagctccgcctctgctaagccgctcaagtgggaagaaaaagaggccggaaaatccgccggagatgctgcttctgagccagccacaactgtcaaagaaactgccaagagaaactgcaatggctgcaaagcaatttgcagcatagcttgtttcgcctgtgataaggtttgatttcataatttgtagccatagtaataatttcattcactgagtttgtcacttagaatgattatgtacatttttgttttcagtatgacttgacattgtgtgcgaggtgctatgttcgtagtaattatcgtgttggtattaactcctcggagtttaaacgagttgagattagtgaggagtcaaagccagagtggtctgataaggaaattctgctgctgctggaagctgttatgcactatggagatgattggaagaaggttgcatcgcatgttattggtagaacggagaaggattgtgtttctcagtttgtcaagcttccgtttggggaacagtttgtaaaagagtctgactctgaggatggtttagagatgtttgatcagatcaaggactctgatattcctgaatctgaaggaatagataaagacggttcttctcccaacaagcggatcaaattaacacctcttgcagatgcaagcaacccaataatggctcaggttagaaagacactacaatttgagtagttgcgttctctctctatgttaatcttatttgtataagtcttcaacatgcgtggaaatgcttttacattgttaggctactgaagaatagtccagtgtctgcactaggctgttccacgacttgcgtttttgtctccttaaagaacctaaatctagaataccttgtggggcttgctttgaaatctagtaataacaaaccctagttgacatatataaggcatttaagaatcaaatatgtgttagataattctgtactgtgttatcacacctcaattgttatgcttcattggctgtctctgaataagatttatcctatcatgtcctcttcaggctgcttttctttcagctttggctggcacaaatgttgcagaagcagcagctcgagcggcagtgagagctttatctgatgtagactacgaggctgacaaaaacgccagtagagacccaaatcgacaaggtatcaaagaccaagctgtctctatttgcagtccatttctgtcttaagccaaacncaatagtgacagttttgttttcctgatacacagatgccaatgctgcatcgagtggtgaaaccactagaaacgaatctgaaagagcttgggcagatgcaaagtctttaattgagaaggaagagcatgaggtagaaggagcaatcaaagagactgttgaagttgag

SEQ ID NO: 176969 - DNA, 299 bp, Arabidopsis thaliana landsberg
tcaccgaaccgtccacggtggtcgcaacgcacaaggcgcggcacacgatcgtcaaccccggcgcggtgccggctacggtgcagctgctcaactatcccggcctcggcactgggcgaaagcacacgatggcgctggcgtcgccgcgcggcccgctcctgcacttcagaatcgccgccggcgccgacacgatggcgctcgacacgattcccttcacggtgcagcacgccgaaagccccccgcccctcacgtccgccgcgccggcgataaacatcaaaaatacgccggacgacgcctaccgc

SEQ ID NO: 176970 - DNA, 350 bp, Arabidopsis thaliana landsberg
atgaaggctttagagcagactgcagattggttcagaagagcgttggctgttgaacctgtgaaagggaatttacggttaagtggatactctgcttgtgggcaagatggtggtgtgcagcttcctcgtgaatatgtagagggtaatgccattactgttttactctctgattggcagtttcgtgccgttaaacttgttttgctaatttggtctaattcagtttctttcaaatcaaacagagggtattgctgatactgatttagttctattggtgaccacaagacctactactggtgggaccctcgcatgggctgtagaaagtgactgtgatcagtggggacgtgcaattgata

SEQ ID NO: 176971 - DNA, 130 bp, Arabidopsis thaliana landsberg
tgtgaatcacgactatggaggagatctgtcggaggaagcttatccaataggatttggtttgataaaagagcttttctcaggaagtgattcttcaaagaacaagaacttggtctcagatggagagctttga

SEQ ID NO: 176972 - DNA, 1066 bp, Arabidopsis thaliana landsberg
atgttctcgaccaagaataagacggttgaccagttagagattgaagagcatagtaaaccggagagccacgaacagaaaccatcaagttggttgattgagtctgagggtgattgaatttacaagttcccccaaatttacattgtccagttctcaaaaagtaagagcaatcatcttcgttctgcaaacagaactcatgagagaggcaaaattttacaaagcagtggtgagattagaaagttgaaatgtatacataccggacgtagaggatagcttaagacattaactgatacacttccatcaataccagctttgttcctaggatgatgaaacttgcaagtcactccgaatttgcaggtccctgtcttcagataaaactgcacagacacaacaacaaaaatagaagctttgagacaatgtgataactagaagacattactatgatagtaattcgaaacagagctacctcacattcaggctgaccaattctttcagggtattctcctttaatccttgcagttgctataacctagaaattggatacgagactattcatcagcttgtaatcacacacacacacagaccctcaaagctacaaactttgagtcaacaagatacagaggaaagaacaaacacagaaacagagtcagtaccagtttccggtcgtgaggatgattgaatcggcaagttgaaccaaacctacaaagtccagttcttatgtaataagcacaatcaggctctcctggtcgttcagggtaagaaccagtttccattgtttcatgtgaactcaaattcatttgccacattgcatctgatcataaatcccaacccaaaccaagaagaagaaactgagattaaacccaatccgtttaaaaacaaaaccaataaccaaaatttgccgatcaaaacagagaaaagaaagaagaaattgataggaccttgattcatcaaaggtgaaagagaagacatgggaactccggcattaaaatccatagacgtgaagaggaagaatgtctccgatgatgatgatgatgataataagcatcagacattatactgtcatcactaa

SEQ ID NO: 176973 - DNA, 139 bp, Arabidopsis thaliana landsberg
caagctatcaaatgacaccataggaattattgcattcttagcttttgcctttgatattgaacttcatgggagagggcggtcaacgaggctagacatggcgcagccccaaggctgtcgttctggctttaatctttactag

SEQ ID NO: 176974 - DNA, 146 bp, Arabidopsis thaliana landsberg
gtgcacctccattatcatcatcacgatcatcagctacaggagatacggttgcaaatgtcaatttgaggattcatgaaattgttagtaatgatgataagcgaattattcagagcattaataccaaaactggattatcatcacatcag

SEQ ID NO: 176975 - DNA, 159 bp, Arabidopsis thaliana landsberg
aaatctaatgagaatttactagagattctgaacttcaacaaaacgaacggagaggattcgaaattgatcactgattcttatagtggagccagattaagaaatgagattgagggacgtggacgtcaccaaacacactcctctatgaccaatctccactaa

SEQ ID NO: 176976 - DNA, 92 bp, Arabidopsis thaliana landsberg
atggctaaagcaggagaaaactcgagagacaaatctagatggagccttgaaggcatgaccgctcttgttaccggtggctccaaaggcctcgg

SEQ ID NO: 176977 - DNA, 88 bp, Arabidopsis thaliana landsberg
gatgaaaatcgcttcagtgctgtgagaggagcacacaaaaatctaaaacgggcagaaaaagctaggaaccttatcagcaaaattcctg

SEQ ID NO: 176978 - DNA, 648 bp, Arabidopsis thaliana landsberg
aggatactgatctccagagtgttcctgagcggtttgaatcaatggatgagtatgtcagagtttttgaacccttactttttgaggaatgccgggcacaactttacagtacatgggttgaactggctgaggctaatacatatgtgaaagttcgaataaaatccatcgaaagaagagagagaggtaactggccctagatcttgttcacatgtgtaagcatgcatagacactttgtgcattgttaaacagtttattggactttgtttcttctccttgtttctgaaagttttcttgtaaactcacagtttatctaggaaaatgattttgcccttgattcacgatcttataacttaagcagtttaccaggtctcttgattagggtcctcgttttgcttgtcattatgttctctattaggtttgagttgtggagactggtttcttatatctctttggattgacaaccttatttgatacctttttatgtctggccgtctgagaaacacttccaagtttctgttaagttacttgactgctagtctttgtttatgtatttaggatggtatgatgtaatacttaactccttaaatggctgtaaatgggctttcaaggagggagatgttgcagttctttcaactccactgcctgaatcag

SEQ ID NO: 176979 - DNA, 235 bp, Arabidopsis thaliana landsberg
ggtttgtcccaatgggtttaccaagaaaggttttgaacgaggcaacatcaagtcatcaaggataatttaccaaacagtggattcaaagatatcacaagttcatatagatgatgtacttattgacagactggctaaactactcgctgaactacttgctgaactacttggtgatctactcgttgaactacttgttgatctacttcttgaaataccttttgatgttccgcacaaatga

SEQ ID NO: 176980 - DNA, 158 bp, Arabidopsis thaliana landsberg
atggtgcatagagatgtcaaaagtataaatatattattggatgaagagttcaaggccaaaattgcggattttggactctctagatcgtttcaagttggaggcaatcaacctcaagtttcaacagttgttattggtactctaggataccttgatcccga

SEQ ID NO: 176981 - DNA, 372 bp, Arabidopsis thaliana landsberg
atggagggttcacgagttgaagaatacgatcgttccacatatgtcaatgtaagtatagttgattttctcctaatttttgctatcgatattaaatgatttattttatttcttatatgtgttgaaatatatttctttggttggtgagatgtgatgtgaatgctcataacactagcaacaattattttgcaaacagttgattttattatttttacattactacacagataaactgaatctggttaatgtattaatactgtgtaaatatatatatagatcggtctgaatcttctgaccgcgaatacgggaagcgatgagtcaacggtggatgatggactatcaatggatatggaagataaacgtgcaaagattgag

SEQ ID NO: 176982 - DNA, 109 bp, Arabidopsis thaliana landsberg
gcttcaggccaccacaggatctggctaccgattcaaacagcttctcaatctcaggcgcacatctgatgaaggcttgtttccagaagctatatcttgggttctttattag

SEQ ID NO: 176983 - DNA, 47 bp, Arabidopsis thaliana landsberg
atgcgaatgcgccgtgatgacctcaacgcttattactcccttgcact

SEQ ID NO: 176984 - DNA, 224 bp, Arabidopsis thaliana landsberg
gggaaattttatgagctgtatgagctagatgcggaattaggtcacaaggagcttgactggaagatgaccatgagtggtgtgggaaaatgcagacaggtaaattagttgaaacaactggcctgcttgaattattgtgtctataaattttgacaccaccttttgtttcaggttggtatctctgaaagtgggatagatgaggcagtgcaaaagctattagctcgtgg

SEQ ID NO: 176985 - DNA, 1025 bp, Arabidopsis thaliana landsberg
gactcgaataatctgaaagatgctctcaagtattcggctcagatgctaagcgagttacggacttcgaagctatcacctcacaagtactatgatctatgtgagttgtttccgtcttctgatctaccttgatcatatttatttcgctcaatcccctaattgacttaatagggttttgtttgtgatctgatttgatggtttttagatatgagagcttttgatgaattgaggaaacttgagattttctttatggaagaaactcgtcgtggctgctcagtcattgaactctatgagctggttcagcatgctggtaacatattaccgcgtttgtaagttactctcatacaattccctttcgctgtctgttcctatgttttggcaagttttttttttatcgatcgtatcttcgtaaagaatcattttggtctttcttagttcaaattcatgttatcttaaagatggtttatttgattactacttgatgttgctagcatttcttctgatatttagtctgttcacttctctagctaatgtaatatttgttcattttattttcccttccctaggtatctcctatgtacagcaggatccgtgtatatcaaaaccaaggaagctcctgccaaggaaattcttaaagatcttgttgagatgtgccgtgggattcagcatcctctacgtggtctcttcttaagaagttaccttgcgcagattagtcgagataaattacctgacattggttctgagtatgaagggtaagcatgtagacactattgttggatttcttcatagcagctgggactcccatggggttcttgcttgtgcttaaattatcttcttagacaaagatccctagtttcttttgacttcatatagaatgttggctattaattaaaatcattttgattcatctagttggtgactcgttttcaaatctctacagagatgctgatacagtcatagatgctgtggagtttgtactactgaactttactgagatgaataaactctgggtcagaatgcaacatcag

SEQ ID NO: 176986 - DNA, 841 bp, Arabidopsis thaliana landsberg
tttatagaagacttggagcagaagaacttttctctgctgattgagtgccagaaatatgctgaggcatcatcattttcagagaaactcattgctgagctcgaaagcgagaatcttgagcaacagatggaagcagaatttttggtgcatgagattgataacttcaggggtgcaatttgtcaagtgtttaaggcacttcaagttgaagcagattgtaagacagctgaccagaagattgcaaaagagagaattcctgtttcacgtgtcttgggtgagattaatgaactaaaatgttcactctctagcgctgaatacgagacacagcgacttgtaattgagaactctgtgctcttatctctacttggacaattccaatcagatggcatgaagttggaatcagagaaacgtgatgtagagaaagatctggagacgatagtacatcattatggaatgctgaaaaaggacagactcgagctattggaaatgaaccggcagttgaaatcagaactgattgacagagagcagcgggagctagagcttaaagctgaactacaaacagagcatttgaagtttgaaaatttgcatgagtcatacatggctttgcatcaagattactcagatgctcttggcaagaacaaaagtttgcatctgaaattctcagaacttaaaggtgaaatttgtatactcgaggaagaaaatggtgctattcttgaagaagctatcgccttgaacaacgtgtctgtggtttaccagtctcttgggtctgaaaaggccgagcaggctgaagcttttgctaaaaacctgaatagtttacaaaacattaatagtggcctgaagcagaagg

SEQ ID NO: 176987 - DNA, 326 bp, Arabidopsis thaliana landsberg
atgacacaggatttgagttgggataatgctgcagagaagtacgaagaagttcttgttgctgctaagtatcattggtgagttaaataaaagttaccttttttactgtctataaagaacatgtctttggaattgttaagaagcttagttgtgtagatttggtgataaagctacattggagcttggcaaattctcatgccatgtaagctccttgtggtaaaggatcaagcttgttaatctcttgctctctcactcttagtaattttaaagtgatattacgatttgacaaagtaaaacaatacttacaaatggtgaaaaccctaacttga

SEQ ID NO: 176988 - DNA, 64 bp, Arabidopsis thaliana landsberg
atgcttagggtggtgtttgaaatagttttgaagacttatgccctgtccaatggatattttgaag

SEQ ID NO: 176989 - DNA, 1918 bp, Arabidopsis thaliana landsberg
atggatgatggagctgttgagagacatgaagagcaacgtgagagacgtgaagagcttcgtcgaatggccgttcgtttcgtcgtcgcagtggcgctcgatcttttcactggagtctacaaacgagcagctggtttcgaaggttcagatccaaattcgggaacggagaagacggagaacgaacacagagcgttcttttgggcatcgggtttcaacaaaacagctcatttctcttttatgttggtgatttttcaaatccttgcatcggtggtggtattggcacgacgtatgcgaagtttccgagaagactgcgatatgaagcttttgctgggtttaatttgcgtaacgatctcgctctctcttatggcgtatcttcgctggtgggtgagttgttaatcgttctcatcgccgatggtttcaatctctagctctctctttcttgggttacctttctctggttcgtcgtggagttagaatcatcctctgttttttttttctatggaacggtgtcgttttagtgtgattatcctcttctcttttattcttttcttataatctgtttctttggcttgggattgaagtcattgaacatatgagtaccatttgataacatgaatgctcgtaacaagatttatctttttcattaatgatcgagctcattataacttgatccttaaatatttcacgtatcaaatttgaaaaaatgaagaaaacaagtatcttatgttacagggtatcaaaataaaactatcagttaattaaaaagctattttgcattttacatatgtaaatataactaaacgtagattggtcgctagaacgttatagtcgtaaactgtggaaaatgattgtgtagattgttgattgatcccacactttggaaggtaaagatagaattaatcccaataattaaaatcttgcatagagaaaccgagttttaagtttaagacaaaatagtcgtgtcttattttaaaccatccgataaaatttttcgttccacatgtcatgagatgaggcaattgctttaagttttgtttggtaaaaatgactaaatggggattatgggaaattctgaagcctatttgacctctaaatgttagaaatgtgataaaagacaatcagtaaaaacaaaagagtactaatattctaaaatcaattacaaatatagtctgaatttgtgatgtatagttactatatcaaacgatttactaaaccattccgatatctttttccaatttgtctaaccaaaagtattgatatccggttcagcaacgactgaaaattgtgtaccaaagaggtcaggtcctttccagccttccaggtcatcagtcatcaccactcacgtcccgattacaaaaacgtacgattactataaccatggtccccggtcaaactttaaccgtggttagtttaaataaaagaaacattttatgcttataaactccaaaaacccttattatatagattttctctcccgaatctgttctcattttcacaatcttcgtctcaaatcttgtttttcttttctcctgcaagaatctctcgccatggaaggagttgttgagccacgtgaagagaatcgtgacgagggacgtgaagagcttcgtagattgaacggtcgttttgtcgtcgcagtgttgcttgaactgtccacaagagtctgcaaaagagcagctgctggctcagatccaaacccgacgatgaccggacacgtggcgtattcttgggcgatagagttcaacttgtgggcgcatcttgcttttacgcttgtgattctcaaaatcattgttgctccgatggtggtggaactggaacggttgagaaaagtacgagaagagtgcgacgtgcagctgctcgtgggtttgatttttgtcgtcctcacgattgctttcttaacgtacctttgctgcttcggcacccg

SEQ ID NO: 176990 - DNA, 680 bp, Arabidopsis thaliana landsberg
atggttctgaactgcctagcccgcgtcccgagacgctactacgaaaacatctcttgcgtctccgtaaggctcaggtcccttgtgcgtacccctgagctctaccggatgcgatccctcctccacaagaattccatctacgtctgcttctgcgatagggagaattattcgactgatgccacctatctttggttcactctccgtcccacgacagcgacgatggagtatcaattggtcccgctctcgttccctagtcataatttcatgttccgagcttccaccgtcgcggtggattcagagatatactttgtgggcggacgtccaaacccgaccgagttgtggatccttgatacccggtctggcaagttacgtcagggcccgatcaagccggagttccaacgaattgcgtcgagcagcgccgtgggagtattcgacggaaagatacatgtgatccaagacttgaaacaagatgagaccgaagaacaggtttacgacctagaaacgcaaacttggaaagtcgtgggagtccctgtccctgacgagaaagcggatagtagaccgaatatggtgtcaagtgtgtcattggaggggaaggtttatgctaaggattttgaaagtatcagtgtctacaatctgagacaaggtacaagaaagcagaaactggagctgccaattgatgatag

SEQ ID NO: 176991 - DNA, 87 bp, Arabidopsis thaliana landsberg
agagcaccgtcgccggtacacatcgcagtgattggcgttcagatcggcgccaacaccatgttagagtcacttgagtccgcgaatttg

SEQ ID NO: 176992 - DNA, 323 bp, Arabidopsis thaliana landsberg
atggacctggatctccccctttcattcggcgcaagcctcaacgggctcgtcctttccgatgccgaaatgccctccatcgcgtcccgctttcgcatggcgcacgcggcaggctgcttcgactatcttgaatattcgccgaaacagggggaggtcgaagaggtgctccgatggagcagggtattgggccttccggtgcgcgtcggctcgcacgcctacacgatgggacgcgacgaaaaacttgcggaatggcacatccagctttgccactggctcggctcgaagttgcacaacatgcagcttcgcgccaggaacgccgacggcag

SEQ ID NO: 176993 - DNA, 585 bp, Arabidopsis thaliana landsberg
gaaaatactaaagagactatccctgcaacagaaaactgtgactttttctgtgacatgaactatttcttgccttacgatacatttgaagctatacaacaaggttagtgcttttaacaattgatcttcaagtttagcatttcttttcactgccaactggattagataaaatgctgcagtttttgaagataactaagcatttacagatctttcaattgtgcagagaccatgatggctattagtgaaagttcaacaatatccagtgatactgatataagagaaggagctgctgccatatcagagattggagaatgttctcaagaaacagaaggtcaaaaagaggcaactttgcttgacctttactccggctgtggagctatgtcgacagggttgtgcatgggtgcacaactgtctggtttgaacctcgtcactgtgagtcatttttgcttgctaataatcttctcagatttgtttaatctctcaatgcttaacttttgctttttttttaaaatgattctcaagaaatgggctgttgacatgaatgcacatgcatgtaaaagcttgcagcataaccacccagagacaaac

SEQ ID NO: 176994 - DNA, 178 bp, Arabidopsis thaliana landsberg
agcgagtgggacgttgatcatcgagatgaagcagagaacccaatcttcgattctgtgtttagcttcttcactaccacacagaaacagagtttccgtctttcatcttcctccatatgcgtcgctcttaaaaacctaattcacaatgtccgtcgttctcaacaccggcttcagttctccg

SEQ ID NO: 176995 - DNA, 363 bp, Arabidopsis thaliana landsberg
  unsure (1)..(363): unsure at all n locations
gtcgccgccaatctcagccgcttgcacaccggccagaccgccgaaatggccgccgccaccgtgctggtggacagcaaggcggtgaccggcatgacgctgggcgaaataggcgattatctggcgctgatgacgctggcccaggccagccagtatggcgcctgccagcccatggccaccnnnnnnnnnnnnnnnnnnnnnggctgcgatggcgcggacgtgacgcgcgacctcagccatgtcgatatcgccctgctcaccgcgctgtatcaggtgccggatattcccgaaaagctgcagaagcagcgcatcgtgggagccatccgaaaacagtttggaaaagagcacactcgcgaaaagacctga

SEQ ID NO: 176996 - DNA, 54 bp, Arabidopsis thaliana landsberg
atgatcaatcaccaaagcgaaagcctgaaaccaagactcagtcattcgctcgag

SEQ ID NO: 176997 - DNA, 1208 bp, Arabidopsis thaliana landsberg
agaggtgtgacttttataccaggttttgtggcgtctccaattcttgtgtgaagcgcaatatagagggagccactgaaaatgttaccgccccgcgaactgaaagtgtgagaactacaggacaatctaaaagtagttcaaattttcaaaagagtacagtgccgtcaaaccagggaaagaatttccagcactcaagctctaatgttggccatcaggctaagagtgaatctattgctgctccagctaaaaatcagtctgcgaaatcctctttggataaagaaaaagcttttcatgtgcccgctaataaaaagaatggacagggcgagaagagcgtgactggaactggtggtttgttgaaaaatatgtggggccgtgtgcctgtgaaaacagaagatgattctccaacagtagatgtgaaaaatcatattactaatcattcgggtatgttttctaatctatccacctttggtactatcaatggcttgggtttacttggtgcctgtttgagctagttttgttcctctatataatgttatgtaattggtgcagaaccccaaaaaccttctcatgatgctgacaagaagggaggcagcgatgatgagactcgagacaccaatttcatgagagcgcctaaagataacagaaaaagaaaggtgatatttgatttttcagatgacgagtatgaagatgtaatcagcttagcatctcctagtagtccaaaggttaattcacgtccagatgtcgaactcagttcggaagattcaggtccagagaagcctgacgcagatgtttctccagagataaaatctgaggaaccagaggccagcaaagaagacaggcaaaacactgcttctgttgatgcttctacgactttgtcaacggagaagatccaggccattggttctgaagctgaagtgaatccctcaaagagaagaactactgcagttcctagttcgccgaaaaggaaaaaggtgttgaagtcacggattgatgatcgtgggagagaaggtatgctaagcatccatatcgttctaaatagtaacaaaaataaacaaacgtatgtcaatgtctcttacttaaacaattctcttttggctggatatagtaactgaggtagtgtgggaggagacagaaacgaacgcaaagaagaaagaggacactaatacaagtaagaagttagatgatggcaaaaccgcaaatgctgttaacag

SEQ ID NO: 176998 - DNA, 313 bp, Arabidopsis thaliana landsberg
atggataatgagccagaaatttggaagggaacgcacgacgatgttgctagttctgccattactgcagagctgtatatgcagaaatattttgctgttgccaaagcagtacgtgcaaagtatccagatataaaacttgttggccccgtttctacaaatgagtggcaatggtatacttggaacagctcaaaagttacagacccgaatgatggaaaacaatatccttggatgcagtattttataaaacgtattgctgaagaagaagctgcttctgggatacgtctattagatgtgttggatgttcatttttatcccg

SEQ ID NO: 176999 - DNA, 1438 bp, Arabidopsis thaliana landsberg
  unsure (1)..(1438): unsure at all n locations
atgggaaactgtgccatcaagccaaaggttctcaaagattctgacgaggatcttgttccggtggagcgagagacgacggttccgactgatcttgacaaagatccggcgcagaagaacgagaacatcatttctcctaacgctgcggaggaagctgcggctgcggcacgacggagcgagaagggaaaagagattttgattgaagatgacattgaagatcaacccaagcgcccatctcttagtcacttgtttcatgaggtacattttctttcaaataatcgtttatttcattttacgtagtttatattaaaacacagtccatagtatattagaaaatactttaaattatataaaaatatgaatattaagttttgtttgaatcgttgttatttaattatttaacgaaattacgtaaagagtagtataattttcataaccacatatatttaaatgtttgtatatatatgtaagtggttatataatcagcaattgatagctttaagacaaattgtttatttgatttcttattacaatcggaaccataagtcattttttaaggataaatcaaaagacaaaaaaaagcttatcttgccttctaagttttaagtatcttttatctttttaaaaaagtaaaaactttgtaataattaatgcatatgttttacattttatatgttgaagtggaacctaaagggacaataatttatgccgattttttctggttttattcacattttttaaaaatcaatttgtggatgacttttgattacaggacaagacagtagtggaaaaagaagtaaccgatctaactccgacaaaaccagacaccaataacaaaaccggtccttcttcaaaggtttcaatgtttgatactactgctttagtggcttctaatgccaaagatccagaagatatctttgacgttcagactcgaaatgacctcgaagttaagattccaaaagattctgatgttaagactcctgaaactcctaaagctaatgaagctgaagataacttttcagagagttgggaagttaagtttccagaggaattggaagctaagaagacatctgaagttgttaaggttgcagaagagtcgaaagttccagaagtttctgctcctgaattgtctgaaattaaggttacaaaagaatcagatgttcctgaagtcttggaggacaagaatatcccagaagttgttgaagtgaagactgatgaagttaaagtcgcagagtcagaacttctaaaggtttcagaagttgaagcaacagaggatttagagattaaagttccaaaagtctttgaagccaagactcctgaaacatcgaacgttaaggttacaggtgaagcagaggtaaagactgatcaacgagtggaagttgaggtcgcagatgacaaaaaggttccagagtttgtggatgctaaagaaaagatcgnctaa

SEQ ID NO: 177000 - DNA, 120 bp, Arabidopsis thaliana landsberg
atcgcttacaagccttgtcagtccggccgtcagagacaaggacggctgccagcccgaggcagttctcagcttctgacaattaagcacattataatcgagatcgaacggacgtcccggcag

SEQ ID NO: 177001 - DNA, 215 bp, Arabidopsis thaliana landsberg
atgaagcccaatcatagcatagaggatgaagagtcacttcaacaatcccaatcttcgaagtcgaatgtcgccaatccattaatactgtatagtaagggaataccttctatatcgaatcgaatccttcgtagtttgacactcgatgccaatgtccatatattacacttgacaactagtattaactcgataatcgtggatgttagaactctcactag

SEQ ID NO: 177002 - DNA, 324 bp, Arabidopsis thaliana landsberg
atgccacgcatgcgcctgcttgtgattgccacttcgattgcccttgctgcctgttcgcagccgaccaacgacgccggaaagaccgtgccggcagctgccgccacggcaccggccaaagcttccactgcggctgcgccggtcgccgacgtgagtgccaccaacccgttcttcaccgccagcacgctgccgttccaggcgccgccattcgacaagatcaaggatggcgattaccagccggcgatcgaggaaggcatgaagcgccaactcgccgaagtggacaagatcgccaacgatcccgagccggccacctccgagaacacctac

SEQ ID NO: 177003 - DNA, 102 bp, Arabidopsis thaliana landsberg
aatccgaaatggaaaccagcgagcttagacgaagtagatgaaaccgaagtggacgcgctctttatgccattaagtcctgaatttgaagagctaaacgtatga

SEQ ID NO: 177004 - DNA, 95 bp, Arabidopsis thaliana landsberg
atgagcggaggagccaccggagccaatgaaacaatcatgttctgccctgcggatcccggcgacgttttcctcattccctccccgtactatgccgc

SEQ ID NO: 177005 - DNA, 114 bp, Arabidopsis thaliana landsberg
gtcagtgtggttgaggaattgggcattcccgtaaagtttatcggtgtaggagaagctgtagaagatctccaaccttttgatccggaggcttttgtgaatgctatattctcttaa

SEQ ID NO: 177006 - DNA, 888 bp, Arabidopsis thaliana landsberg
atggtggtcgatgtagagaagatggcggcgcgtggctgtgatgcgtgcatgaagagatcacgtgctagttggtactgtccagccgatgacgctttcctatgccacaactgcgacgcctcgatccactcggctaaccatttagcgaaacggcacgaacgtgtccggttacaatcatcttcgtcgccagagacggcagacaaaacgacgtcggtatggtacgaaggattcaggagaaaggcgagaacgcccaggagcaagggtttggcgtttgagaagttgttgcaaatcgagtcaaacgatcctcttgttccggagcttggtggagacgaagatgatggctttttctcgttctcctccgtagaagaaaccgaggagagtctgaattgttgcgtgcctgttttcgatcctttctcagaaatggtgattgatgatataaacggcttttgcttagttcctgatgaagtcaataacactactactaatggagaagaattaggagaactcgagaaggcaatcatggacgatgaaggttttatggggttcgtgccattggatatggatcttgaggatctcactatggacgtagagagtttacttgaggaagaacaactttgcttgggattcaaggaaccaaactatgttggagtcatcagagaagagaataaagtagggtttgagattaattgtaaggatttgaagagggttaaagatgaagatgaagaagaagccaagtgtgaaaatggaggatcaaaggatagtgatagagaagcatcaaatgataaagatagaaagacaagtttgtttctgagattagattatggagctgtgattagtgcttgggataatcatggttcgccgtggaaaaccgaaatcaaaccggagtgcatg

SEQ ID NO: 177007 - DNA, 367 bp, Arabidopsis thaliana landsberg
atgagtctcatgcgttatctttgcaaggtaaaatacaatgcgaaataaagaaacatgcagcgtctttgctttagaaatcatgaaatcctcctctttgcttttcccaggtccttgcttccaaggcatcagatctactggacttccataaggatcttcaaagtcttgaatcagcttcaaaggttttcctttctacttactttttccgtcctgctgtaagtggctcatcatttgattgtcctgtctattgcagatacagttgaagtctttggctgaggaaatacaagctataaccaaaggattggaaaaactgaagcaggagcttaccgcatccgaaactgatggtcctgtttctcaagttttccgtaaa

SEQ ID NO: 177008 - DNA, 142 bp, Arabidopsis thaliana landsberg
atggagtggatcagaactacgttcttcggctttctgcgccacaccgctatcagcagtgcctggcagaccagatcagcggtctgccgactttgtatctgccaaccaaccaccgtcgtgaatagagatcgatcaccactgagag

SEQ ID NO: 177009 - DNA, 1199 bp, Arabidopsis thaliana landsberg
atggcatacaagcgttacaagtaagctttaaaattaactttaatgtttactaaatcaggaggggaagaacaacttctgtattaatgtctaaaatccgtttgtctttccctaaagtgcttcttggagataaatgaccatgctagttaaaactaaactacttcatcacattttcctattatcacagagatgctcccttgtatctggagtgggctcctggaaatattcttgagccaaaaaatcttcctgacaccaatgaagagagaagtgacattgaagaaaatggcgtgagaagagtcaacttggagcagcaggttgaaatcgatccagatgtaactgaggtatgtccagttatggtagctgtgaacgttttgaaatcatatgttttttttctgtttgagtggatactagctatcagaactgaaaggtagttgagaaaatcttgattagcttaggaaactaaattggatattagtcttacctcgtggggctatatgcgggtttagtagtatctatataatttctgttcattaaatttatgtatatagattttttttttttttctgatccattttgtagacaaagaaagttgcatatgtatctttgaattggtatgttcgtaacatatcctttaaataatgcgttatatttcagtcaaatgtccttaatgttaagaatctgagcttcaagacaactgatgagggtttgaagaagcatttcactaaactggtgaagcagggaaagattctcagtgtcacggtaagttgttgttcattactgacatatggtcttaactgtgagagtctgttttaataatctattattttccattctaaacagataataaagcataaaaagaatgagaagtatctttcaagcggttatggttttgtagaattcgactctgtagagacagccaccagtgtctacagagatctacaggtatataatagttaagtctctttgcatatgtatattttaaagttgattggacttgatggagtagagtggcctttcttctttggcaggggactgttctggatgggcatgctttgatcttgagattctgtgaaaacaagcggagtgacaaggttggaaaagattcaaacaaggacaaaccttgtacaaagttacatgtgaaaaatatagcttttgaggcaaccaagagagaactaagacagctattcagtccatttggacag

SEQ ID NO: 177010 - DNA, 193 bp, Arabidopsis thaliana landsberg
atggctcgccttggggcggacggcggcctgcccgtgtcggcgtctgctgtacagttcgcacacggttctgtccagctccgcaggccacggcggccgccggtcccagtcagcgtgccgcggcctgaccggagcagcgacttgatgtacacttcctcccagcattgctgcgagagatttatgcgcgagagaagac

SEQ ID NO: 177011 - DNA, 430 bp, Arabidopsis thaliana landsberg
atggccgaacacggtgagactcaagctgatgaagaagaagaagaacaagtatggagctggggtgctggtacggacggacagttagggacgacaaagctgcaagacgagcttcttccgcagcttctctctctgacatcacttccttccatatcaatgctcgcttgtggcggcgctcacgtcatcgctttgacttctggtaaacctcccaaaatctctctgatcaaaggaatgttgttggttttagtccaagtaaacatttaaattatgctttttgcaggtggtaaggtcttcacatggggaagaggaagctctggtcagttaggacatggagacatcctcaacattactttgccaaagcttgtatctttctttgacgactctgttattactcaagctgctgctggatggagtcattctggttttgtttcag

SEQ ID NO: 177012 - DNA, 499 bp, Arabidopsis thaliana landsberg
  unsure (1)..(499): unsure at all n locations
atgggtttacttcgtcgacttttggagcaagatcttaaattagagaagtattctcttgacccctacaagaaattcattaatggagaactagatgaagtgagtaattataattgactatgtatcttataagttataactgtaaggcacagtcttcttataacttttcttggctaattagatactacaagctcatgaagctacacaatcttcaactaaggctcagaggaaaccagtatctaagaaggtcaagagcacaccagctaaaanctcagacagtgaagaaatgtttgattcagatggtgaagacgaggagaaggacaaggaagtagctgtaaaaaagaagatggcggaggaaagaaaattatcaaagtcagagggaaccggaaagcggaaacgtgaaaaggagaaacctgcctctgcaaagaagacaaaacaaacagattcacagagcgacagtgacgcaggagaaaaggcaccatcttcagaaaaatcagtaaag

SEQ ID NO: 177013 - DNA, 73 bp, Arabidopsis thaliana landsberg
atggcggatgctgctggaaaatccaaggctcgagctgccggcccgaccggacgatcgcgcgtccgctcgatag

SEQ ID NO: 177014 - DNA, 204 bp, Arabidopsis thaliana landsberg
atgtggaaactgataattggatctaaggcgggagatgatattcatttgttcagcaccaacaactatgttggaagacagatttgggagtttgatgccaaggcaggctctccggaggaactagccgaagtcgaggaggctcgtcagaatttcacagacaacaggtcacatttcaaggccagtgccgatctcctatggaggatgcag

SEQ ID NO: 177015 - DNA, 192 bp, Arabidopsis thaliana landsberg
gtgtgtaatcggatcgaatacggacgaacatcactaaaatcatatttgttttcgtatttttattcggattcaaattcaaatactgatagcttcggattcgaatacaaatacaggtattctcggatgcaaatacgaatatatgtgtgtcgaatacggaacttatcggacacggataatatcggtagcgaataa

SEQ ID NO: 177016 - DNA, 102 bp, Arabidopsis thaliana landsberg
ataatggatcttcggagacctcaaattcatcgcaaacatcgtcgagaccgccttgtgatcgacctcctcctgctcctccggttgttcagggaagctttataa

SEQ ID NO: 177017 - DNA, 890 bp, Arabidopsis thaliana landsberg
atgcccaaagaaggcgcatttgtagaccgttgccttatgtctgaaggtcctcttacaacacggcctagtaaaaccttgtcgatagatcttgatgaagacagtaacctgcctattgttacttttagcgacaattcaggatccaggtgtattgaggttagacgcgcaaagagagggaatttctttgtcctcaagggtgaagaaaacgatgagcagtctgtgtccttaattcttcgtatagtagatgagaatggtcagttctttattctgctccagctaagattcattactttcttcgatatttttgcattctgaaacttaatataactgtgtcttgttgcacagggcgtgtgaggaacattcatttcctgttctatcaagaaggggacactgcttctaaggtgtcgagtgagatggttgagcaactcgagttaactgaccagaacgtcacgtttatagccgagctgattgatatactacttgtcaacatgatacccacctggaaaaccgatgtcacagtcgatcatctcatccattcgcaactgaatcagaactcaagaagtcatcataacgaagcaaagccacagaaacaagaggagactgtttttcatgatacttgtgagttggttagtcactcgtgtaactcagattgcccacgatcagatgaggaagataagcaatgcgtcgatgccaccaaaggagaagacaagagctccaatcaagaagtagaagaagcaaccgaaccagtaagtttggaggaagaagaaaggttaagacaagagctggaggagatagaagctaagtatcaggaagatatgaaagagatagcaacgaaaagagaagaggccattatggagacgaagaaaaagttgtctctgatgaagttaaagtaa

SEQ ID NO: 177018 - DNA, 93 bp, Arabidopsis thaliana landsberg
gtccctttgtccacgaacaccgaaacggtgaccatagaggatgacgatgattcagaaccaagggtctccaccgaacaacctattgctgattag

SEQ ID NO: 177019 - DNA, 63 bp, Arabidopsis thaliana landsberg
atggcttttggtgtccctgcttatgctaataaacatttggacgtcctttgcatgtttgttagt

SEQ ID NO: 177020 - DNA, 116 bp, Arabidopsis thaliana landsberg
aatctgagcatgaatgtttttcccgtggagaagagcagcgacacgtgaacaagctggtaatattgccgtctacggcgaccaacttaacccgatcatctttttctgcgtcttcctga

SEQ ID NO: 177021 - DNA, 54 bp, Arabidopsis thaliana landsberg
atgaagctgcagctctttcctttggatgctcatacccgtgaaggattggaaaag

SEQ ID NO: 177022 - DNA, 182 bp, Arabidopsis thaliana landsberg
ggttttggccgcgcaacgagctgatcgagtgaaagagcttccgggacagccgccagtgaaattccggcaatacgccggtaatgtgacggttaatgaaacacatggaagagcattgttctattggttctttgaagccactcagaatccaagcaaaaaacctgtcctcctttggctcaatggag

SEQ ID NO: 177023 - DNA, 2864 bp, Arabidopsis thaliana landsberg
gtgatagtggacaatgggataatcagagtcagtttctcgaatcctcaaggacttataactgggatcaaatacaaaggaattgataatgttcttcatccacatctccgagatagagggtgagtaattttcagtaaactaatattgtagtaatcaattattatttctcaaaaagcttatgtaatgtaagtacataaaattgtcctgatttattactttgattttatgtaggtactgggacataacatggcaaggaacaaacattcgccaaggcggcttagatcggtaattaaactagcttagttacttaatacttcgtctgatttgtcagtttaaattatttaataaaacatacacacgttcacatttatagagcaagtatctaacttatcttagggtttataattttaatgaatcttttctaatttataaactcatatttatttttcggttcagaatcgaaggaacaaattttagaatcatcactcaaacccaagaacaagtggagatatcgttctctagaacatgggaggatggtcatattccattaaacgtagacaagaggtatatcatacgtagaaatacttcatgaatctacatgtacggaatcttcgagagacttcccgaatggccagaactcgacatgggtttaattcgaatcgctttcaaactcaaccctgagaggtatcttatacgattccaatgttttgttaattatttgtttttataaaaaaaaaaaaaagagtttatctaaactatcacaaaatatgtttgtagatttcattacatggcggtggcggataatcgacaaagagaaatgccaacggaagatgaccgtgacatcaaacgtggtcatgccaaggctcttggttataaagaggctgtacaattgactcatcctcataactccatgttcaaaaaccaggtacctagtcttttgcatacggttttggatgcaatatttaattgttcttgcatccgaagtctcgaattttgatcgttaatttgaatgatatatattaggtggatgataagtaccagtacacatgtgagatcaaagacaacaaagtgcacggttggatctcaaccaagtcccgtgtcggcttttggatcatctcaccaagcggtgaatatcgctccggtggaccgatcaaacaagagctcacgtctcacgtcggacccacggccatcacggtaaagacatcgtccaaagctattaagcatagattacatttttggtactatatatagtagtattaatgttttcgttacttaactgatttgcatatgcagacttttataagcggacattatgttggtgcggacatggaggctcattacagaactggtgaagcgtggaaaaaggtcttgggacctgtttttatttacttaaactctgattctaccagcaacaataagcctcaagatttgttatgggaagatgctaaacaacaggttatttttttaaatgtcttttactttattaatttaaagtaatttacaaagataagtcattaattttagttatatcaattttcagtccgaaaaagaagtcaaagcctggccgtacgattttgtagcatcctctgactatctttctcgtcgagaaagaggaagcgtcactggtcgtctactagtcaacgacaggtatatatttattttactcgtagttatttaatcaaaagttaattttgaccttttattacaacatcggcaaatatttttcagattcttgacgccgggaaaatctgcatatgtcggtttagcaccgccgggagaagctggttcgtggcagacaaatactaaggtttattattattacacatttacactttgatccatcttcttcaatgtaactgaattatcaataacatgtatcgatcgttgatttttttctttttttgcgtccagggatatcagttttggaccaagacgaacgaaaccggttacttcacgatagaaaacgttagaccgggaacttacaatctgtatggatgggttcctggttttatcggggactttcgataccaaaaccttgttaacgtagctgcaggttcagtgattagtctcggtagagtcgtgtacaagccacctaggaacggtccaacgttatgggagattggtgtaccggatcgaaccgctcgagaatactttataccggagccatacaaggatacaatgaatccgttatacctaaaccacaccgacaagtaagtcttcaaatcctcatagttccagttcacattgttccgaaaccggttttggttctgatgattccgatttggtttggtttgtttcacaggtttagacagtacggactgtggcaacgatacacagagttatatccaactcatgatctcgtctacacagttggagttagtaactatagccaagactggttctacgcccaagtcacaaggttagaagttacatgaaaacaaaaagtttgaaactttcagtgaattcttgaattaacattaacttcgattcgcttcttctgcaggaaaaccggtgatttaacgtacgtaccaacaatatggcagatcgtgtttcatcttccatacgtaaactcgcgaggcagctacacattgcaggtagctttagcctcggctgcatgggctaatctacaagttcggatcaataaccaaaactcgtggccgtttttctcaacgggtactatcggaaaagacaatgctatagcaagacatggaatccatggaatgtaccggctttataccatcgatgtgcctggaaggttgctaagaaccgggaccaacacgatttatcttcgacagcctaaagcacaaggaccatttgaaggtcttatgtatgattacattcgtctagaagagccttctagagcttag

SEQ ID NO: 177024 - DNA, 1513 bp, Arabidopsis thaliana landsberg
atgaatccgaggcggagactgcatgccgcaaaaacaatattccaaaatgttgcggatctggctcgtcgtggtaacggtcaacctcgtcgtgggaatcgtgttggcgctactattccttccaagctcgtgcttatatatatataaataaaataaaccttcgctatgttcactttttaaaagggtttgaactatctatacatacttttctatatataccaactataatcataagtccacgcattcatagcacatttttagtattgaaacgtgaaattttttaatattaggtaatagaatttatgaagtcttttaaattataatctagttaaactttcaaaattcaaattgaatttaagataagagtaactaatttattcaatttgttctaaatcaccaatctaaacttttctgatgcaatttcgtttttagtgactacacatctttcaatatttaataattactacgagaatttaaataattaagaaaaaacagattgataaaatataagcaaaaatcaaacaaaaaataagcaaaacataagtaatatattttttaaactcagaaagaataaatttgcggattcaaagttgacattctaaacaaatagaaacacaaatatataaggccataattttgtgtttggcataagttactacattaagctaataaattaatttcatatcaaaataacttaataatctacattggtttcttatagaattctgaaactgaagttgttgaacaagcggaggtggcaaaaactgtgttccttacctctaggaacaggcctcggtatccaccaaaggaggaaatcggatttcgaaagccgagagccgtgtggtggattcttgtgatcgctttggaagtgatcttcattgttggccccgttgtagtgacggcttgtgcggcaagcatctcaagttttcggcgtaagaccttgtggagctttcccatatgggaattggcactgacatgcgggataaccgtagcttcgaggctcatcgcttgctacttggtgaggatcatcgaagtggtgataaggtggatcttcagatccatgcagctgacggtttatgttctccatggccttcaacacgcggcatgggtgtggatgactatggtgtttatcatcacaccttggtttattatcctctcgaataaggcgacaaaggagcaaaaggtggtgcttctcgtgttgctccaggtcatcacggcggttctgataatctccaccttgtggttcacgaaggcaatcatcacaacgtgttgttcagcgtggttccacttgacgacctatcaagagcggatcgaggagtctcttttcagttggtacgtcatcgaagcactttcgggtcatccttggagcaaaatacgtcatctgtttgacccaaagaggacatcggcttgggacatgaagaagattatcatggaccaaaaacacattggcttaggcgtaaagatccgggatgaatccgaggcggagactgccgcaaaaacaatattccgaaagtag

SEQ ID NO: 177025 - DNA, 51 bp, Arabidopsis thaliana landsberg
atgattgagtttgaacgtctcgataaaaatccaatcgccaacagtgttcgt

SEQ ID NO: 177026 - DNA, 644 bp, Arabidopsis thaliana landsberg
aggaagcttgaggttaaagatttcaatatcgccaaggaggcaaaagatgttggaaacgttgttattaagacatttccggtcgagataaaagatggaaagttggagatacgattgtattgggccgggagaggaactacagtcattcccaaagaacgtgtttatggtcctctcatatcagctatatcagtggatccaagtaaacaatgtcacttttttttggtatttttcacattagagttgatttattatctcatttctaacgaaaatttaatacgttgatgaaaatagatgttaatccatctcctagaaatggtatgagtactggtactctccatacattggtagtgatcttatccattttcattgtgtttctcgtatttggaactctatggaaaaaaggttgcttgagatcgaaaagccaaatggaaaaaggtactcactaaataagttatgatatttcttagtgtttgtcatttttattttgtgtttcttgatacaattgttagagcttcgttcttctctcagatttcaaaaatttggaactcatgattgcttctttctcgttgaggcaaatcaagatcgctacaaacaactttgattctgcaaatagaattggagaaggcggctctggtcctgtatacaag

SEQ ID NO: 177027 - DNA, 534 bp, Arabidopsis thaliana landsberg
gacggaagagaagtttcaaagaaaaaagcctttgttccacctccacgtttcatgaacattgatgaagcgaggtactccttttagatactgtacgttgcactataatattataaagcctgttatggataagggtttaccacagtgctgaattttcaaaaattgtcacatgcctttagggaactgcacatacgtgttgagcgtcggcgtgatcacatgactggtgattactttgaaaatattggtggcatgcttttcaaagatgggtttcattacaaacaagtatcattgaagtccatcactgttcagaatgttacaccaacttttgacgaacttgaaaaattcaataaaccaagtgaaaatggagagggcgactttggtggtctgtcaacattatttgcaaacagaaagaaaggtcatttcatgaagggtgatgcagttattgttatcaagggggatctgaaaaacttgaagggttgggttgagaaagtagatgaagaaaatgtccttatcagatcagaagtgaaaggtctccct

SEQ ID NO: 177028 - DNA, 730 bp, Arabidopsis thaliana landsberg
atatggctcggcagatttctgttcttgaagaaaaacattctcaaggtcaggctgaactggtccggcggtgctctgattttgaggaaaagtattctcaaagccagactgagctggcccaggtctctgctgctctgaatgacgctaacatgctgaactctactcttcgcgctcagcttgattctgaaaaggtgacttatgaaactgtgccttgtattgtcgtgttcttattgcttgcttgatgtttgaagaagctgattcttgtttgcaggaagaaaaacgtgcccttgttacttctcgtgacaatctcgacaggttatattgtgactctagcaactcgttgaccatcttggagaggagtcatcgcttcaccatggaggagttagacaatcatcgttataagctgcaagaaaccttggacgacgtgattcgcctcaggcagttgatatcggctaaagatgttgtcatcaaggaactgcgtgcttccaagaagtccatcgcccaggagctagagatcgctcagttggctgtcaaggttgctgaagaaacttccgctactctgagggcccagcgcgacagagctatggataaagccattcgcgcagggcggatcttgatgaggagacctggtgtgattgtccccgacgacataagggctgatgtgaacactgctcctgattcctcgagtcgtccctcttcgtcggttgctcctgagaagaacattaccaaatag

SEQ ID NO: 177029 - DNA, 237 bp, Arabidopsis thaliana landsberg
aatcgctatggacaacctggcaaccaccgtgctaccacatactacgcaggatgcatattcaactggccagccatcaacgggcactctgacgagttctgtaccatcaacgaacccaacacccggccctacagatgccacgagaacagggggcggcccaggaccaagaactggtggcggggctacaaccgtagcacatacgacagcacaggccccctgctcctcatcagccgcacataa

SEQ ID NO: 177030 - DNA, 344 bp, Arabidopsis thaliana landsberg
  unsure (1)..(344): unsure at all n locations
atgcccaaaaaagtaagttggaatgggcgtcagcacaattcagaacgtacgttcaaattttacccggggccgatgccgcgcaggtagcaaccaggattaatcgcgtcgtnnnnnnnnnnnnnnnnnnnnnnnnnnnnnncaaaacgcaggttgggttacaacccgataaagaccaatacctgtacgcgacttttgtcgacggcaaacccactgccggaaggatcgaatatgtgcgcatctttacgggtgtagccgccttcatattgttgatcgcctgtatcaacttcatggaattgtccactgcccgctcggtcaagcgtgccaaagaagtgggcgtacggaag

SEQ ID NO: 177031 - DNA, 30 bp, Arabidopsis thaliana landsberg
atggatggaaaccgaacaccatcacgattg

SEQ ID NO: 177032 - DNA, 128 bp, Arabidopsis thaliana landsberg
tcctttgccatgaatcacttgtggccgatgttggggaagaggagtcccttgttaacggcgatgttggcggcagcttcgtcagaggaggagtcgatggagctctcatcggagtcccattcccgacacac

SEQ ID NO: 177033 - DNA, 309 bp, Arabidopsis thaliana landsberg
gtgagtcatcatcctatgattgttgcttgccattgtgagggacaagggtggaatttctggggagactcaaatatcaaaggaaaattttggggacggtcaatccagcttgacccagtgggtgtcttaacattaaaatttgatgatggtgagatatatcaatggagcaaggttaccacttctatatacaacatcatccttggtaaactttactgcgaccattatggaaccatgcgtatcaaaggcggtagcaattattcctgccagttgaagttcaaggagcagtcagtcatagatcgaaaccctcgtcag

SEQ ID NO: 177034 - DNA, 203 bp, Arabidopsis thaliana landsberg
ggtgcccccgagcggaagccgatggacggcctcgatgtctgccgcacacggaggcgcggggaacgcttccgtgaagcgttggaagaggtcaacgaaactacatcagtttctgtttctagcacatcacggaacgacaagcgagaggctatagaaccgaccgagaggaggaggaggaggaggaggccgtgggcgagcggatggtg

SEQ ID NO: 177035 - DNA, 359 bp, Arabidopsis thaliana landsberg
atgaattatcaagctacgagaattcaagacgtctgaccggccgaagagcgttttcagccctatacttcgaaaccaagcgcatcgaggaaggtgcatcccagtctaaggttatcgactataacacacaactagtcgccctttgtttttaaagacaccacctgtctagcctcagcaagcgtctaaatacggccaagtcgcaatcatgtatgtctctgaagacgagctcactaacaccgcggtaactgattggttatactataggaatcgaacactctcgggcagaagaaggagctctgtccacaccggccgtcatcggttcagtattggcaacttcaaaggcctccaacatcctcagctaa

SEQ ID NO: 177036 - DNA, 265 bp, Arabidopsis thaliana landsberg
gaccccgagtggaagccgtggtttggtgagagtttcttttgcggcaaaaaaaaaacaaacaaaacacaccgaatttaacactcgaaacactcatgcttcttgcatagcgctgttgtacgtgaagctcccgacagcggacccctactttgagaccttattcagtaagagctggatcgacgccttcacaatgtctatggacaactctctggccaccgtctttgctgctgttcggatcacattaacgacagaagttgtgcaagcatga

SEQ ID NO: 177037 - DNA, 359 bp, Arabidopsis thaliana landsberg
actttcttcgtgcggaaatctcgccagtatgaacgagtgagtcgtgtgatcctccattgtcgggtagttgggtacgccacctcctatcggaagcgcgtggaactggttaatctggttcatgtagcaaaaggaataagtcctccatcgggagatatagtagaggcatttgccttccatctcatgcagcagctccaaacatcggtctgttgctcgcgcgagctcatttagctcgtcctcctcattagcttacatgtttgttcgaatgctgtcgccatcttccacgacagggatttggcaaagatatttctgtccgtcaagagccagctcatcatacgagaatccggccccctctccactag

SEQ ID NO: 177038 - DNA, 290 bp, Arabidopsis thaliana landsberg
atgccatcaccatatcaaaattcatcaacgattcaccgtaagtcgtaacggtgctaaagaagacgttgcgggtcaacccgcaaatccgcggtcaaaaatgggtcgggtttctttcaaccgcgatccaaacggaccatgaccgtgaggcccgcatttttttgggctttattaaatgtgcccgtacccgccccgttgcatccctatacgggcctggcccgcgggcttcaagcccgattgacacccctagtcagcgctctgacgaagatggtgacataacagcttttggctga

SEQ ID NO: 177039 - DNA, 120 bp, Arabidopsis thaliana landsberg
atgaagggtgtggaaataaaccaaatggagcccaatttgaaacggactttacagagatgtggttgtaggagtaccgtcaatggtgttgtcttcaactttgggtctgccacaagtgcttac

SEQ ID NO: 177040 - DNA, 451 bp, Arabidopsis thaliana landsberg
cgcggcttatgggaaaggcgccgcgatgagattatccagtccgctgctgcaacctctgacctgcgaacaaaggctcgagttctcttggaaggcgtcaccagactgaagggccacccgaacgatgcatttgacaaggaggatctcgatgtcgacgctgagtcatttgaaacaccagttgaagctgggacggagcgagcagtccacgctaacatccgtcggttccttttgcaggggaagtatgacccatccgtgtctgagtcgagcttgagggaatgcattgagtcgcttgagaaggagatcatgtatatggagcgagcgcatgatcatgcctcattgtatagtgcgcttgtcacggaatggctggaggatttagaggcttctggcggcatttcagctatgaagggtgaagaggatgagagtgttgaagacgtcagcatggagaagctcggac

SEQ ID NO: 177041 - DNA, 230 bp, Arabidopsis thaliana landsberg
ctgctccagaaaggatatcttagagttcgagtaccggggttctttactgaacttgctcattgaggtgttcgcagttcgcatgcatcaatcagacgtatgttccgatgccggctgtacagacatctgcaaggcgtgccgcaaggccaagcggttgtttgacaagctgtgggacaaggcggggctgcccgccggcgacgacgctgcaacaacagtagccctgttgtccgccg

SEQ ID NO: 177042 - DNA, 207 bp, Arabidopsis thaliana landsberg
atggccaagatcgcgagcaaaccccgcaccgcctacgtctgcagcgactgcggcgccgattacgccaagtggcagggccaatgcgacgcgtgcacggcctggaacacgctctcgcaggtcgcgctgggcgcggtggacaagcccaccgcgccccgccccggctgggccggcaaggtcgacgcgaaaaagaacaccgcactgaaggac

SEQ ID NO: 177043 - DNA, 149 bp, Arabidopsis thaliana landsberg
atgataaaaaggtggcttcctgtggagaattcagaagttaggaaggatggaataaaaggaacatacagagtggatgttgacattcctgctaatgattggataaacgtcaccaagttctatgatgttctaattttcaacactggacactg

SEQ ID NO: 177044 - DNA, 87 bp, Arabidopsis thaliana landsberg
gttgaggagtacactggtatgcaatcgcagccccataaggctattgtaggagcaaacgcctttgcgcatgaaagtggtattcatcag

SEQ ID NO: 177045 - DNA, 866 bp, Arabidopsis thaliana landsberg
atgaagttcaccggaaaatcaaatttgacggctacattacccgcaactgtcccaaatatcagggctattcatagaaggagagcgcgaaaaccgagcttcactcgtcaacgaagatctggcgtgtctgtcaggaggctaagcaggccggagactcctcaattgaaatcgaaggtggaggatcaaaacattgagcgatgcggcggggttgaagatgatgataacgaggatgatgattgtaataagatgcgttgtcaggaacggagtaggagtgtacggcctgatactgttaggaaacttgttgccggagtgtggcgattgcgagtcccggatgcggtttctagcggcggagataagaggagcaaggatcggttacggtttcaggtacagctttgcttttgaaaaaatgagacatttataggatccgcattgtgatgaagtgaattgtatgaaagcaatcaaaagattataggattgctgattttgccttagctttgaatctaaagtatgagagcactggattggttttagctggttgttttaatagtaatgtcaaagtaatctgaaatagaaatgactgttgattccaggatcttcacactagttcataactgtttgctcatgtctctggaatctgtacactctgtttcttgtgtgatggatctgaattagttggctttagctactatctcagaggagtacatatgtcaaataaatttctctttattttctttgatgtttttctccaggaaactgctggtcctgctggaaacttgggtcctctgttttattatcaccaccatgatgacaaacattctggctttcaaagcaacaattcaagaaacaagcatagtggattcttgtgtaag

SEQ ID NO: 177046 - DNA, 302 bp, Arabidopsis thaliana landsberg
gtaaatctgatgcaacttcaagtgggaaggataccacatctcaatccctatcaactatttccccagtagttcatgtcaaagaaccagttgctgattcaaagcagcctcttcctttgaagaggaaaagatctagtagaagcccagtggatagtgcacgggcacctatggtcgacagtaaaagtaggcatggtaaccaaaccgcagatgtatctggtataacatctgccaaggatcctacgagcactaaaacatcattagataggttaaagcagccaatgccttacaaagggcgaaaagactaa

SEQ ID NO: 177047 - DNA, 192 bp, Arabidopsis thaliana landsberg
atgcccgctttcgatattattgcagacctgctttcgaacaactcttcggcaggcagtatagacaagctcctgaacgataaaaaaatactcatgggcggattggagtacatgccgtataacgatggcggaacggcctacctgtactttgttcccaaacccattatccaatccattaaaaaatcggagaagctg

SEQ ID NO: 177048 - DNA, 83 bp, Arabidopsis thaliana landsberg
atgaccggagcgcgcccagttcgtcacggcaaccgcgcgtttgcaattcgccgtgaaccgaccgaagcagctccgtacttagg

SEQ ID NO: 177049 - DNA, 40 bp, Arabidopsis thaliana landsberg
atggtgctctacgtggactctctgtttgacacgtgtcaag

SEQ ID NO: 177050 - DNA, 363 bp, Arabidopsis thaliana landsberg
caccgcttcgacgatatttttgaactcttggccatcgccattagccacgaagtcaaccagtgcggcttgtactggccccaaactagtgttatgcgccacactttccatgtaccctccactgtacactttacctcggtgatcaatcagcgccactcccgacggacacttgctatccggcgcgtacgatatggtcgccgcctttagagccctgcaattgagatggttacaatgctcggaataactgcagatatccatgtagagactgtgatttatgagttcgatgtagttaaagttccgctcgagaaggcgagggacgtttgccagagagataaatccttgcggaaggaaggtcgaaagattcat

SEQ ID NO: 177051 - DNA, 188 bp, Arabidopsis thaliana landsberg
atggtgttcgtggtgagattggtccctaggaatggaaaaactatgaaaacggctcgcaaatggatgggtttgcactaggagtccgactgcgtgacgaaaatgggtttgccaaagtggtaattatggcggtaaaagaaaagttagcgctgcgttatgaagacaatatcgagttaacatatcagtggcca

SEQ ID NO: 177052 - DNA, 136 bp, Arabidopsis thaliana landsberg
aataagactgatcgattatgatggacaaagaatgttggacgacgactatgccgcatatgcgctcttccgaaaaggctcatacaatacccactgcgccttgattcaagcccactggaccttcattcaagcccactga

SEQ ID NO: 177053 - DNA, 151 bp, Arabidopsis thaliana landsberg
atgaagagtttgaagaagaaattaaagaaaaaccagaggatttacgataaagatccgtcttcttcggaacctctataccagaaaagttccgagtggttgaaaatgatttggggttatgatgtggaatctgcccttgagaaaccaaggaaga

SEQ ID NO: 177054 - DNA, 72 bp, Arabidopsis thaliana landsberg
acccggcatgagcatctaacgtctagtcgaagtatagatgaccgcttaaaccgctttgtagaacatgcataa

SEQ ID NO: 177055 - DNA, 155 bp, Arabidopsis thaliana landsberg
gccggagaggcacagtttcggatgtcgaattcgatggagaagcagaggaggagaagagactgagtaagagaatgaaagtgaagaacaagcaagaagaagaagaagacattgcaatgactgaggagtcaggagtctcctctttttcacggtattga

SEQ ID NO: 177056 - DNA, 108 bp, Arabidopsis thaliana landsberg
attacactaagtatagattataccgacactgttttacttcatttgcatgacacgggtgataacgccaatgtattggtgtctcatataacgtatagaatggaaagctaa

SEQ ID NO: 177057 - DNA, 993 bp, Arabidopsis thaliana landsberg
ggtactgttgtcaagagggaggaagcagatgagccagatgctaagcgtgttaaactagacacagcctctgattcgggagctgcaattgcatcaccaaaaacagagtcatcgacagataagaaagtgcctatcctgaaaccactttccaccgccaaactaagcacagaaacgccatcacccgattcaaaaaactttaagcaaagaccatattcgtttaccacaagtttgaacgctcctatggtaaataggtataagttggataaccgcaccacgaccatcaaagtggttcctcctttgccaactgggttagctgatgtatgtcctctttccctttgtttaaataccacgctttatgaatgtgccaaactttctcactttctagattaaagactactaaattataggtttattttagtcactgactcacttactgagttttgaattattttttacctccaggttgctgtcgtaaaggaacatttttcatcttacggcgaagtctcaaaagtggaactggaagacaatgcatcgattgatagtggcaaggatcatgaaacacagaacgaaagccgtgcagcttgtgtcacatttgtgaaacgcagcgcagcagagaaagcgtttgctaatgcaaagtgttggcaagaacacacgttgcagctcgtgtgggtaacacgtcaaagcaacagagagagcaacaataacaataacaatagtaatagtctctctgtttctcgtgacaaccttagcagcaaaaacaagtgcgcttctgtctctaatgacccaaaaccagcagttgaagtcaagacctcctctacggaagaaccagagaatacaaatgtttctggagacaacgacagtactttggataaacaagagaccaaagaaagcgacaatgataacaataaaagtaaccacgagtccatcgaaggagcttctgaggtgattgcaactgcaggaactgatgaagaacaatctgaacaaattcatcagtga

SEQ ID NO: 177058 - DNA, 1042 bp, Arabidopsis thaliana landsberg
atgaacgatatgaagacggatttttctttcttccggtttggtcgtgtccacgtcattgggatagcgtccgatgtgattgcccgagaagtcgttcgagagaaagacgcagtttttgcggacaggccagattcttactctgccgagtacattagtggcgggtaatgttgattttttttttttttttttttggtaattgggtaattttgaatttgataacaaagctgaaatgttcacttgaaaattagttcaaattataaagcaattcctagaaaagcttatagttctcttagctcgactaaacaaaaatactgttatttgttaacatatatgtttcgtatatgttgcaaactgtgtataagagtttgtgtattaccatgtgtaaaaacgttacaaaactggtaggtacaatggggtagtgttcgacgagtacggagagagacaaatgaagatgaagaaagtgatgtcgtcggagttaatgtctacaaaggctttaaacttgttactcaaagttagaaacttagaatccgacaacctcctcgcgtatgttcataacctatacaacaaagatgagtccaagacaaaacacggcgccgtagtgaacgtgagagatattgtgtgcactcacacacacaatgtgaagatgagactcttgtttggtcggagacatttcaaggagacgacgatggacgggagtctcggacttatggagaaagaacattttgacgcaattttcgcggctcttgattgtttctttagcttttacgtagccgattactaccctttcttaagaggatggaacctccagggagaggaggctgagttaagagaagccgttgatgtgattgctaggtacaataagatgattatcgatgagaagatagagttgtggagggggcagaataaagactacaatcgtgcggagacgaagaatgatgttcctatgatcaaggattggctcgacattctcttcactcttaaagatgagaatgggaagccgttgcttaccccgcaagaaatcacacatttctttgtggtttcgtga

SEQ ID NO: 177059 - DNA, 696 bp, Arabidopsis thaliana landsberg
aggattacttgaaaatcgattcatctaatcacggagaagacaaagaaatcggagacgaattggggattgcagagaaacagagtcgagcgcagagaaagaggttaaggaagaagatgctcaaagaggaagcagctcgacggaagaaagtcatcggacctttacttccgactgaaatgcttcagacccatgatgaaagaagtgtcggagatgcttgtgggagcaatgttgaagaagaagattctgacggtggcgaagaagaggttgatgggagcattagcaacatatgctcacaacttgttcgaccaaatgcccaagagaagaaagaaggtacacacagcttttgacttttttgacgatatccatagtttcaaatcttttgggaaaaattcgtactttatctaactagatttcataacacatgtacgtattcagatcaagggtttgactttaatcaaaatctactagctcatcaagttgttgtctcattgttggtcctgtgcaaattactcaaacgttctcttttgtgtattaattacattacgcgtctgactctttattttttgtttggtaggactaatcggtgacaatgataagacgagaaaagtcaagaagagaagaaatgctaagaaactggccaaagagagttctaataatatccaggatggatccaatgcaatccctgaaattcctaattag

SEQ ID NO: 177060 - DNA, 216 bp, Arabidopsis thaliana landsberg
aaagtttcgatttttcgattatattacaacacagaaacgggatcaattagggtaacaaaatcaattgacttgaagatggtgtttgtttggtataacaaggaaataggagaagcttacttgagatggggtgaattcgagagagaagaagcggcgaagaagaagaagaagaagaagaagaagagagaagaacaattggaatcaaaaggtttttgttaa

SEQ ID NO: 177061 - DNA, 115 bp, Arabidopsis thaliana landsberg
atgaatccggtcacaggagaagggatttccggtgcggaggtgaagctgttgaagatcgtcggtggatatgattccaactataagactcttaaatcagtaactacagatgcttccg

SEQ ID NO: 177062 - DNA, 383 bp, Arabidopsis thaliana landsberg
cccggatcctgatcgctggcaagcccgcctatggctggaccaacacatacagcaatgcaccggttggcaccttagcggccacggtgaacactctggccggcatcaaggctgcgcagaatgatctcaaggcccacttcgcccgcaatggccgcaacgtgtccgatgaatgctggctggacaatctcctacccctcaaccgcgccgccgaaatggacttaatgcgcgcctatcagcgcatcggaacttggcgcaccccggaagagcttgccaagcgcaccgcacgatatctgcccgatggggaggcatacgcggcccctgtcaaccttcttgatgcaattcaaaaggccgggcttcggtctgttcctgctgtggcagcggagtga

SEQ ID NO: 177063 - DNA, 183 bp, Arabidopsis thaliana landsberg
gaacagttgaaagaattttatgacggtgacggcacaccccggttcagtccgtatttcatacctaagatgatcgtggacattgcggcgggagctatttctatccgtcataaattgcatgggcccaattatgctactgtttccgcgtgtgcttcttccaataccgccatcatcaacgaattataa

SEQ ID NO: 177064 - DNA, 306 bp, Arabidopsis thaliana landsberg
atggtgaagatgaaagaagtagagaaaggtaaaacagaggatgggactggatcttttgtacggataattttgctgtatagagcacgaccagtagcaaacgatgtttggtttgttaaagttaggatttttgactccattgttgcgatcccgaagagggagacattagatgaagagtcattgaagccgttgaagatgaaatcaatggctgagattgggtttaggaggatgaggaaaagggtaagaagaaagagaagagcaatcatggtagatgaaggagaacaagatgaagaagacactacgcgtgag

SEQ ID NO: 177065 - DNA, 108 bp, Arabidopsis thaliana landsberg
atggcgctgtcgatcaatcagatattgttcaaacaaggcacaaagatcgtcggcgttggactcaataacgcttctcacgccaaagaacttggcaatgccctcccaaag

SEQ ID NO: 177066 - DNA, 1216 bp, Arabidopsis thaliana landsberg
gttcagttccaccatgcgctgctgatgaaacgtttctatgtagacttctgcaagtagattccttagatactagtaagagtgatgaggtagtaagaaaggttgaagaagctcttgctttgcgtcattcctctacaatggagttgatgggactctttgagaacaccattgatacacagaagacgaaagctgaaagcatttcacaaagtttacatgctgtaaaatcgacagaaggttggttggtgtgccaattatcgattcattttaatttaacggctattgaaaattcacattcttttatttttagatgccaccatccagttatctagcattaatgatttgatgaaagaggagtccaaaaacttgcgtgagatgattgatgctttacatgtgaggcacaaagaacattccgagcagattcaggcgtacataagcagccattcaacagatcaatccgagcttaaacaccttaaaggttatatatttcatgattctagacaatatggaaaaatcagctgtttgtttctataagcgtagcaccttttccattatgcacgctggaaccaggatgtgagaatttaagtattagcatgatgccatttcataattgctcctgagtattgagtatatttggttattaaaggtcaattggaagagatcaaggctgagcttgaagaaaatagaagaaaattgataactctgaaaatgcagaaggatgctgcatgtgaaggtcatgtaacatcaccggcaatagcaaatggaagtctttctcctgagaagcctgtagataaaacgaagttgcgtgaattgaaggactccattgatgagataaaggtaactacatcgttaatagtgtggttcatcttttaatttttggtttttcttccaaacttgtaagcttagcatgtgtattgaataattattctagataatggcagaaggtcgtctgtctgagcttcaagcttcacaagagtataatctttccttgtcaagacaatgtcaagatattgaggtatggatatataatttagggatttttttccttttcttagagcagtagttgcagttgacagtgatatgttttgcttaatggatgtagaatgaactaaaggatgaccagtatatatactcgtctagactgtatagtttgatcaatgatcgaattcatcactggaatgctgaactggaccggtacaaaattctgactgaggccattcag

SEQ ID NO: 177067 - DNA, 448 bp, Arabidopsis thaliana landsberg
atggacgagttaccaccagagctctggatcaaaattctgagtcgaatcaacgattccgaatccctagcacgatgtagagtcgcttccaagacattgaactcgctttctcgagaggttcgcgccgtgaatctcatctgtacctggtctcggtacttaaaatcgcggtccatcgtcgttgtcacaccgttcaagacgatcttcagaagcctaatcgagaactctagcaaaattcgctcaatctcagtcggagtcgataaggcgcttaagggaatgtcgtttgacgacttcaatgaagaagattccaaggatttgtacctgaccgatgtcgaatttgtgaaggagtggttgcctagggttcgtgaagacctggagaatttgtcaatttcggatttctggattcaatcttgctggagaaaatcggatattttggcgctcatttcttcaaact

SEQ ID NO: 177068 - DNA, 424 bp, Arabidopsis thaliana landsberg
atgcctgatttcaagctatatcaaatggatgtcaagagcgcttttctaaatggaccactacaagaaagagtatatgtggagcaaccaccgggcttcgaagacccaaagaagccaaatcatgtttatcttcttcacaaggcactctacgggcttaaacaagcccctagagcttggtatgattgtcttaaagattttctaattaaaaatgggtttacaataggaaaagctgactctactttgtttactcgaaaagttgataatgaattatttgtgtgccaaatatatgttgatgacattatatttggtagtactaatgaaaaattttgtgaagagtttagcaaagtaatgacgaacaggtttgagatgtctatgatgggcgagcttaagtacttcctgggatttcaagtcaaacaactcaaggaag

SEQ ID NO: 177069 - DNA, 141 bp, Arabidopsis thaliana landsberg
gcggcgtttctgaaccggaaaacatgagccgtctccgagcattttctgcgccggatttagtcccttcagattctggatctattacatcatcaccaacaagaaccatagagcaccaatctcatgaagattctggtttggaag

SEQ ID NO: 177070 - DNA, 58 bp, Arabidopsis thaliana landsberg
atggccacaactttagcatcagtaactgtaatgacttccatgctcgaaggtggtgaag

SEQ ID NO: 177071 - DNA, 145 bp, Arabidopsis thaliana landsberg
atgccgccaaagaaaaaagaaatattgaaacggaggaagtaagtggatccaatctcattttgaattcataataattaccaagtttgattaaaactacatgcgcgtctttgtttcggacagcgcaaaagagattatgccggtgtga

SEQ ID NO: 177072 - DNA, 195 bp, Arabidopsis thaliana landsberg
gtacatgaatggagtttagagttttggaagcaaatagagcaaacaaaggagttaagagaatgtaaagtgaccaaagaagaaaagtgcaggacaatagaccaagcggccgattgcttggtctattggtcaggaccagagttacggaggaaatttgaatctagcaaagtggtcgattgcgtggtcgattggtcatga

SEQ ID NO: 177073 - DNA, 435 bp, Arabidopsis thaliana landsberg
tcagttcttgccgacgtttatccgcgacgccttgagtggcagcagcaactggcatgctgaactgccgatcgaggaacacggcggcactgcgctgacgctcagcagtgacctgcgcggtaccgagatccgtctgccggagccgctcgccaagccggcggacacaccactgccaacgcacgtgcggatcggcggcgacgccgatgtgccgctgcggatcagtgtcgactacggtcagcgcgcgtcagccgaaatcgcgatggccggcaacgacgatgtacgcgacgccggcttgcagctcgaaggactgcgcgtgcgcttcggcgacgtggcggcgcccaaagcgcagaagggtgactacatcgtcgatggtcatgccggcacgctggatcttgcggcttggaccgctctgatcggaagcgatgacggcagtaccgc

SEQ ID NO: 177074 - DNA, 70 bp, Arabidopsis thaliana landsberg
atgccgccaacaatcctggagcagaccatcgccgtaaacgtgaagctcggtcgcttcgactgtcggcccg

SEQ ID NO: 177075 - DNA, 554 bp, Arabidopsis thaliana landsberg
atgcagcaccttattgatcttgctgggtctgaaagttctaaaactgaaataactggacagcgaaggaaagagggctcttctatcaataaaagtttactcactcttggcactgtaaggaagttctttttcagtataacatttactcttctcgatatatgcgtgtgtaaacttctaatctccatcttcaggttatatctaaattgacagacaccaaggcagctcatataccctacagggattctaaacttacgcgtctcttgcagtcaacactaagtggtcatggacgagtgtcagtaagtgctctaagcttccctaattaatcaatctctagacgagcctgtcaataatgatttgtttgtgaagtttcttaaggccaggtttttgtttttgctttgtttttatgaactttcatttgatgacatagctctctcttgtaagtatgagaccgtgtctaatattggcgttctaacccctctgattttggttttttctagcttatttgcactatcacacctgcatccagcacaagtgaagagacgcacaacacactgtaa

SEQ ID NO: 177076 - DNA, 93 bp, Arabidopsis thaliana landsberg
gttctcaatcagattgtatatgaacttcctgcagaacatccgctggccgaaagcagacctttgcgggaacttcttggtcatacccctccgcag

SEQ ID NO: 177077 - DNA, 459 bp, Arabidopsis thaliana landsberg
aatagaccaggtggtagactcaaccgccaggtgttctgtgttgtccttcttggattgctacttcgggtaccatcaaatcagcttggcaaaagaagacgaggaaaaacaacattcattaccccgtttggagccttctgctatacctccatgtcgttcggcctcaagaacgctagagcaacctaccagagagccattcaaacatgcttagccaatcattggggcaagcgggtagaagcttatgttgatgatgtagtgatcaagacagaaaactcagaaaacttcattgaagatttgcagctggtcttcaacagtctgaggcgataccggtggaagctcaatccagaaaaatgtgtctttggagtgccagcaaggaaattgctcggattcattgtcagctgttggggcgaaggcaaagacgccacccttcgctcgaagtcttcgctgcagccgctggtctaa

SEQ ID NO: 177078 - DNA, 517 bp, Arabidopsis thaliana landsberg
atggcttcttattgctcagagcttcagttcctagcaaatcctgtgacgaaccatgtcgaaagcgcttctcaacacaatcaagatgttaactctcttgggctgatctcgagccgaactacagcagaagctgtggttatcctcaagctcatgtcaacgacttacttggtagctttgtgccaagcctttgatctgagacaccttgaagaaattctcaagaaagcggttaatgaggttgtgagccacactgccaaaagcgttctagcaatcgaaccattccgcaaacacgacgatattcttggagttgtcaaccgcgaatacgtcttctcctatgttgatgacccaagcagcctcactaaccctttaatgcagaagctgagacatgtcctcttcgacaaagctttagctgaaccggaaggcgagaccgacacggtttttcggaaaatcggagcgttcgaggccgagctgaaatttctcctccctaaagaagtggaacgagtcaggacagagtacgagaacg

SEQ ID NO: 177079 - DNA, 150 bp, Arabidopsis thaliana landsberg
atggagttgattgtgatttgcagccttgtgctcttcctgatggttaccctcgtcctcatggtcagttctatgctgtatccggattctttgtggtgtaccgttttttcaacttaagtgctgaagcatcccttgatgatgtcttggaaaagg

SEQ ID NO: 177080 - DNA, 233 bp, Arabidopsis thaliana landsberg
gtgatgctatagttggcaaagatgtgaaaccgcttgatcctagttctattgctagtgaggtttggtatgggaaggagaaaggaaactatatgctaaagaagaaaggaaacgcaacagtttacagtcagttatatccctttgatggtcttctcaattacacatcaggcatcatacatcatgtcctcattgacggtaataacgaaccgttgcgacttcattttgttttgagctga

SEQ ID NO: 177081 - DNA, 128 bp, Arabidopsis thaliana landsberg
tgtcctctcgtaccaagcagcctgatggattgcaatacattgagaatgtcaaaaaacatcgccagcctaaacctctgcattctcttcatgtccaacgatgcgatcatcgatccggcgacgtgacctga

SEQ ID NO: 177082 - DNA, 1330 bp, Arabidopsis thaliana landsberg
gtttctgtcattgatgagcaaatagaggataacttatttcagatgttggatgaagaaactgattctgagtaagaaattgttctttcagtaaatgttgttgttttatggaatgttaatttcttatgtaaggttttgattaacttgctttattgatgacctagagatgttgtgctcttgtaggattgggaacctgatccgtagtaccttgatacgcctgctttatgcaacatgcccatcacgcccatctcgatggatgttgatatgccgcaacatggtaatagcaatgagtttttcatactaaaatcttggttttctatggacttttcatgctgcagtatgaactatctgaaatgggaccatggcaatttatttgttttctcatgattgctgccgtttgttcaaaatgttactagcagttttgaattttcatctgctattatatctcgagatctgccttttattcccacaatcaatggagatttattacttactctgctgataggcccttgcagcatccgctggaaggagtgctgaaacgagcattgcagaaaatgatcctgcttacacaagagagaaccttggcgatgatgatgaagacatggtttctagctctagtgggaaatctatacgggccaatcctgataaagacaaaaccttgagatatcgaaccagagtttttgcagctgagtaagtgggagatgtttctttgttcttaccctacctctctagtgaatactgttgacataaatattttttaactaatgctctgaagtagtttgtgaccataactaaaatttgatggaaaataaaatttcaactgatatttcaaaaatgtatgttgacgcagaaccaaattttcacaagttcttcaagggtttcagcattgagccaatattaaatgaaatctgaacgtttagttaatcctgagcacttaataacttaatggttgcagctctcagtcaaactgcataagagtttatatttgttcgtgttctaaattagcccaattgattttcaactgtaggtgtttgagtcttttgccagaggctgtaggcaatgatgctgctcattttgatattttattggcgaggaatcttgcttctaatagacaaagctcaggtgacttgttagtccttcaactacaagagctaatatctcttgcttatcaggtaaacaaaaggaattactttgtaaagaaccatttcaagtattctggaaaatgccctgagagaattctaacaagatctaccaaattattcagataagcactattcagtttgaaaacatgaggccaattggagttggacttcttagtactattcttgagaag

SEQ ID NO: 177083 - DNA, 290 bp, Arabidopsis thaliana landsberg
ctctcggtctaaccatgccgtcggcgtaggcggcggcctccccgacgatgtcgagcgcatcgtcgagcagtgcggcggcggtgacttcagcgccggcgcccggcccctggctcagcatcggttgcagcggataacggtcggaatggatcgccacgcggttgtcggaaccggtgccgaccgccagcggatcgccggccgtcagcacttccagcccgacgcgcacggccacgccggcgtcgtcgcggcaatccagccgcgcgacgtagcgcagcgcgccgcccacggcgcgg

SEQ ID NO: 177084 - DNA, 51 bp, Arabidopsis thaliana landsberg
atggggatcgattatcaccggcacatcatcgatcatttaaacaagatgcag

SEQ ID NO: 177085 - DNA, 159 bp, Arabidopsis thaliana landsberg
gtcaccgtcattgttggctatacgtgcgctggtattcaggtggcttcactacccgccactgcaagcacctacgcggttgacagctacaagcctgccgtcggctctattttcgtcgcaatcacagtgaacaagaatctatgggggctacggctaagctga

SEQ ID NO: 177086 - DNA, 496 bp, Arabidopsis thaliana landsberg
gagctgtcgctttacttctccttcttggtgttgccttactatgtgcgtatgaactctgtgctgtctatgttacggctggtgcgcatgcatctcagcaatattctccttctggtttctttttcggtgtatcagcaatcgcgttggcaatcaacatgctatttatctgccgcatggtctttaatggtaaagtttacccagtccttaatcaacatgcaattgctgtgtattcaactttatcagtctacttaattctttgtattagctcaaagcaaatctttcgtatctattaacatgcatactttttaacctccaacctcaatttaagttgttgaaactttgcgaaattttccatcaccgcaggaaatggtttagatgtggacgaatatgtaaggagggcatataaatttgcttattcagattgtatagaagtgggtcctgtggcttgtttgcctgaacctcctgatcctaatgaattatatccccggcaaaccagcag

SEQ ID NO: 177087 - DNA, 203 bp, Arabidopsis thaliana landsberg
tcgccaagcgcgcgacggcatcagtcaagaccgacacggtcgtcgtcacattgcagaacaagcagtcggtagcggtctgctatatcgccttcgccaattgggcattcatgaaccgctcgtcgctcgatacaccgacgctttgcgaagttcgcgagggatcggccacggctgcaaatcctccgcctccagggacgacgccctaa

SEQ ID NO: 177088 - DNA, 574 bp, Arabidopsis thaliana landsberg
atgtttaagaaacatgatgctgctctcaacttcacatgtgtggagttacggacacttgatcaacatgaggatttcccagaggctctggcagatccagaaggtctagtttggcaggtcaaaacttcttcaacttatacaagtgattggctttaatttgtttaggccaaaatcttaacttgccaaatttttctttccattgttaatttttttcaggtgctgaatgctgcttgggatgctagtatacctgttgctagtgaaaatgctcttccttgttatgacagagaaggttacaacaagatacttgaaaacgcaaagccccttaccgatcctgatggtcgccacctttcatgtttcacttacctgaggcttaacccaactctgatggagtctcaaaacttcaaagagtttgagagattcctcaaacgaatgcatggtatagcttccgtttcatattctcctagtggaatttagtgtcttctcaaggttttataacctggggttactttcacttgcaggtgaagccgttccggatcttggtttggctccagggacacaagagaccaaccccgagtga

SEQ ID NO: 177089 - DNA, 108 bp, Arabidopsis thaliana landsberg
agaaggagttttggccaagggaagcgaagaatgaacaaaaggacaagcttggctcagaaggatgatgtaatcaggagaactgtatatgtctctgacatcgaccaacag

SEQ ID NO: 177090 - DNA, 2907 bp, Arabidopsis thaliana landsberg
atggctgatgtgagccggagttcaagtttatataccgaggaggatccccttcaagcttactcagggctttcgttgtttcctcgcacactaaaatccttgtcgaatcctcttcctccttcttatcaatcagaagatctacagcagactcatactctccttcaatctatggtaagctcttgatctgcttaaaccttcgattttgatgcattagctagggtttggtttcctcagtgagtaattaattacggagacgattcgagtttgtgattttgacggttacgaaatcaatttcaaatctggctgatttaatcgtatccgtgctttgtttcttctcatccgcttctgggtgttcccaaatgaccaagatggatgctttattttttgggtttcttcaattaggacgaaaagtctgtggtaaactgcaaatacttagctgttactttgaaattttaagcagcatgattatactggataactgtaaggtttaggcgttgtgtctcaaggaggcacaatatctccatgtttgctcagtatatagcctgctaatgtacattggcttcttcctattcttttgggttaatgcttttcttagggatttagttttgaagaattgcagaacgagagtttagtaaacaaactgcagatttttacattattctttgtcgcttgtgtatattttttctttactgacatatcaacttcagtatctcaaactaaataattgtcaaattcttggcttctatcttacagccttttgaaattcaaagtgagcatcaggagcaggcaaaagctatcttagaagatgtggatgtcgatgtccagctgaaccctattccaaataaacgagaaagaagaccgggattagaccgtaagcgaaaaagcttttctcttcaccttacgacaaggtaaagatcatagccactgatccattgattcagtataacaaatttctttatttgttactttatctgattcctttaccaagttagttgaagcctctatcaaatattcttgttgcagtcaaccacctccagttgcaccaagctttgatcctagtaaatatccaagatctgaggatttctttgctgcttatgataaatttgaacgtgagttatagaagtatgttttctgatgttcatagccttccacgtttattgtataactgtcattagctggatttgaaacagttgccaatcgagaatggcagaaacagactggctccagtgtaatagatatacaagagaacccaccatcaaggcgccctcgcagtccaggaattccagggtatgtactatgagcaactctgatagagcatgtttaagagttgttccatttgcatattttgctttctgtttcccttgatggttacatacttacattttcaatttccaggaggaaacgtcgtccattcaaggaaagttttacggatagttatttcactgatgttatcaacctggaagcttcagaaaaggaattccccattgcttctgaacaaagcttagagagggccacagctgcacatgttacgactgtggacagggaagtagatggtgagtgagcacttgttagatcattgtcgctaccattttgttaaatcatgctaccatctgatagggtcagacactgtgttttgcagattcaaccgtagacacggacaaagacttaaacaatgtgttgaaagatttgcttgcttgcagtcgagaggagcttgagggagatggtgccatcaagcttttggaggagcgcttgcaaatcaagccctttaatatagaaaaattctctatccctgagtttcaagatgttcgaaaagtgaacttgaaggcatctggaagtaacccaccaaaccgaaagagtctgtcagatatacagaatattctgaaaggaactaacagagttgcggttcgaaaaaatagccactcgccatcccctcagacgataaaacatttttcatcaccaaatccaccagtggatcagttttcatttcctgacatccataatttgcttccaggagatcaacagccttgtgagattaatgtacaacctatagcaaaagatatacctaatacatccccaactaatgtgggtactgtagacgttgctagccctttcaacgactcagtggagaagaggtccggtgaagatgattctcatattcattctggcatccatagatctcatttaagtccagatgggaatccagatatttgtgtgatggatagcatttcaaaccgaagttcagccatgctacagaaaaatgtagatatgcgaacaaaaggaaaagaggtagatgtgcccatgagtgaaagtggggcaaatagaaacactggcgacagggaaaatgatgctgatatcaatgaagaaactgataatttagaaaggctggttagtttctccttcactgtacgggactttgtactaacatatttggatctcttgttgattacatctcttgtgaatttgtttgttatataggcggaatgtgcatctaaagaggttacaagaccatttactgtagaagaggatagcatcccgtatcagcaaggtattaaaactttttgtatatgcatgttatagcaagatcttaaaaagtatagtatatcctaacttaacttgtccattagatgcttactagttgctaccattaacatttccagtcaccttaaaattgtggctcgaaggttttctttatgccgttatgttgcctacaggtgcatcctcaaaatctccaaacagagctccagaacaatacaacacaatagatggatcccttgaacatgcagagcacaatcagggactacatgaagaggaaaatgtcaacacgggctccgcttctggacttcaagtagaaaatgctccggttagttcctcatcattgtctcttcacctctgtagagtcttgataattaa

SEQ ID NO: 177091 - DNA, 687 bp, Arabidopsis thaliana landsberg
atggagggccaaactcatgtaccatatggatgtcagttcggccttgcattgatcagctgggtgcaagctaaggaggtacttatttttttgtgaggtaaacactagcagaggtgcaagtgaactctatttcaagaatgtacaagaaatcgccaagatcctttataaagaagataatgcttgtgatttcttttgttttttacttcgtaaatgatcatacataagatataaggatatgatgtttacaggagttaagccatacaatttcgagagaaaagcatattagattacatactagcattaacaccgtaacatgttatcttaggtaagcttcaaattatattgcttttaatacatagcagaccccaacacttggtagtgaccttattttaagtagcaaacacatatgtcttggtttgcacatttcccgaaggcagaaataaatactatatcatacataattagcttcttataattaattgcattttcaacataaattgcattttatcccccttaattacgaaattcctttataagaacccctccatagagctgaaccgccttatcgcagttaatagcccgttcttttggcctctcaaagcggtcaacatggccaataaaaggacgagcaccactgaagtattgaatacgatccgtgggatgataaaccaccggttttacaatagttga

SEQ ID NO: 177092 - DNA, 400 bp, Arabidopsis thaliana landsberg
  unsure (1)..(400): unsure at all n locations
ggcggtcagggcaacggcgagcgactcgccttcgtctacgacacccgaaaagtgaggttcggcggactggcgggagagatggtgctgccgccgttcgagaaaaaggatcccgagagtggacagaccatttacgagccggtaaaacagctggcccgcacaccctatatctgcgggctggaggccggctggatccgttttcagctcaccaccgtgcatatnctttacggcaccagcgcggccgacgacccggacccgggttcgccgaaaaaaaagcggtcgccaccacgatggcgaaacgcgccttcgacaagtacgcgtggtcggagaatatcgggcctgctggagacttcaacatatacagcccgaaggacgagacctaccagcagatagaggccgccgg

SEQ ID NO: 177093 - DNA, 129 bp, Arabidopsis thaliana landsberg
aaggtcctcaaaaaccaagtcggctgcaacattttcacttacatcgacgacattgtcgtcgcaagcaaaagcaaagaggaccacctagtcgacctcgtagaaacattcacaaacatgcgagacgcatga

SEQ ID NO: 177094 - DNA, 158 bp, Arabidopsis thaliana landsberg
atgtatgctaccacacacacgtacgtgcacacccacaccacaaatacgtacataactgtgaacacccgagctatagccacaaaggcttataaccggaacatcactttaatgcatcgtcatgcattacccgacatacgctccgagtcttgtgccatcat

SEQ ID NO: 177095 - DNA, 121 bp, Arabidopsis thaliana landsberg
atggctgaaaagaaagaggttgctgaccctgcattagctaggttttatgaagctatggagaagacgaacacagagaaaatcaccaatgaaatgttggctgggttatccgaggattctggcg

SEQ ID NO: 177096 - DNA, 515 bp, Arabidopsis thaliana landsberg
atgtattcacttctcaagaaaacaaatatctgtcaggtgtgcaagaaatcattttcaaacgggaaagctcttggtggtcacatgagagctcacactttgaaatttttccctggatcatcttcatcaactggctcgatcactccatcactacgatcatgcaacaaccttggagcaagctttagaagacctaatgaaacagttctggcgagatctgtccacaccagtgaagttgttggtggtccaaagccagatctaaacaaagaagctgagcaacgaacaactgtcaagaaaaagatcgtcgtggatttggaagaggaaaattcgatagagtctgaaagcgatataactattgaagaaagtgctttatgtcttttacaaatgaaggatgacaacatgtcagaatatcttcagaatctgaaatcgattgatagtttggtatcaactcgaaaaggaaaagatactgaaaactatatcgaaatagattctgatgaaaatcacgaagatagtgatgatga

SEQ ID NO: 177097 - DNA, 136 bp, Arabidopsis thaliana landsberg
atgggaagtggtggagagcaattttataagggagaggggtaccggtttattcgtcgtttctcacgccaattaacgaaattgccatttgtaattgacggaattaccctcttcgaatcttctatgaccaagtgtgcag

SEQ ID NO: 177098 - DNA, 588 bp, Arabidopsis thaliana landsberg
atgcaaactccacgagaagaacattggaaagctgcacttagagttgtccgttatctcaaaggaaccgttggacaagggattctacttcgatcagattccgatctcaatctttatggatggtgcgactctgattatgcaggctgtccgttgaattgacgatcatcgacaggttggttcatacaacttggtcaatctccgatttcctggaaaacaaagaaacaacaagtggtgagtcactcttctgctgaagcagagtacaaagctatgtcttggacagcaaaggaactaaaatggttaaaggcacttcttctcgatctaggtgtatcacactcacaaccaatgcggctttattgtgataacatggcggcattacatatcagtgcaaatcctgtctttcacgaaagaaccaaacatatagagaaagattgtcactttgttcgtgacgagattaaatccgggaacagcgtcacagctcacctctcaaccaagatacaacttgcagacattttcactaaggcattgggacaaaaggagtttgacgactttcgggacaagcttgggatcatgaacctccatgctccagcttga

SEQ ID NO: 177099 - DNA, 300 bp, Arabidopsis thaliana landsberg
atgagggtttgtcgattttaccaaggtaaaaagtatagaaagaacagtaggctaggcatgttcaatcagtttagcttaaatcaggtgggactaaaatgaaagcaaaattctaaatcgagttcgttcggttatgcagctgtcgacctttcaccaacaataaattcatcatgcaaatcatcaaaaaccacgatcggcttcgagaatgaagaagaaagcgatcaaaaatgtatttggagatcaaaaacatcacctaatagatcgaaagggctcgacggtggagccaataaagccagccgttga

SEQ ID NO: 177100 - DNA, 154 bp, Arabidopsis thaliana landsberg
gtttgttgtggtcaatcttccattgaggaatagatatgggcgatcagatatggtgaaggcttcaagagatgtgacaatttgggacgcatatcttgagagacacatacttattgtgagagttgcaaacagttttgacatcgccatcgatgcttaa

SEQ ID NO: 177101 - DNA, 139 bp, Arabidopsis thaliana landsberg
aaacatttctgaacaaccctcaaacggatcggcgccgtccccaaaagctgctatcgtccccaagtttgagaaacgtccccgatctaaaacgtttccgatacgggatacgtcaccttttagccgtcctcgtgcttcttag

SEQ ID NO: 177102 - DNA, 37 bp, Arabidopsis thaliana landsberg
atgggcgatggtgaagggatcttcattgaccaaaacg

SEQ ID NO: 177103 - DNA, 207 bp, Arabidopsis thaliana landsberg
atgatcagaaactttcttatgaaaaacaatgagcaacacttttatgggtcactaagggttcgtgagttaaccccatacctcttttgtgtgtgtgccataggtagtggaaaagggaatctactgatgttagagggtggtgctgtttcggcgacccacaaatctggacgatgtaggcccaaattttacctcaccccaccattttcgtag

SEQ ID NO: 177104 - DNA, 75 bp, Arabidopsis thaliana landsberg
gaaataacggattgtgacgaatctacgattactgagtcagagagtgtcaacgcgccaaactcatccaaaagatca

SEQ ID NO: 177105 - DNA, 117 bp, Arabidopsis thaliana landsberg
ggacacaagctctgttatgccatttgcctccacttcaatgccaccaataacatcgttgaatatggggccattacaacgggctccgaatcacggccgaaggggcacgatggctcctag

SEQ ID NO: 177106 - DNA, 703 bp, Arabidopsis thaliana landsberg
atgaacccgaaagttgcagattttggaatggcgaggatcttcgaaatggaccaaacagaagcccatacgagaagagtagttggaacctagtaagttttgttcttgccatctattaaatataaaaatcctctattaactcaaacatatacgtatcgtggcagtggttacatgtctcccgagtatgccatgtacggccaattctcaatgaaatctgatgtctatagcttcggtgtcttagttcttgagattataagcgggaggaaaaatagcagcctctatcagatggatgctagttttggaaacttggttacatatgtgagtataataaacacttatacttttttgctctactaaacagtcataacatattttaagtcttaaaattgtttaatagacttggaggctatggagtgacgggtcaccactagacctcgtggattcttcctttcgagatagttatcaaagaaacgaaataattagatgcatccatattgccttattatgtgtccaagaagatactgaaaatcgtccaaccatgtcagcgatcgtccaaatgcttactactagctcgatcgccctcgctgtacctcaaccacctggatttttcttccggagtaatcatgaacaagcaggtccatcgatggataagtcttctctttgttccattgatgctgcatcgattactattttagctcctcgttaa

SEQ ID NO: 177107 - DNA, 69 bp, Arabidopsis thaliana landsberg
atgcggaaccttgacaatatagcggcaacccatacacaaacctctatcatcgacaacctcaacgaacac

SEQ ID NO: 177108 - DNA, 749 bp, Arabidopsis thaliana landsberg
atggcgttggactccgttaagcatttgcctattcacggcgtctccgccttctcctccgtcaccgtcgaaatcaaaagctttttctccaccgtgaaaccaagaaaaacttcaactttcgtctacgctttcgtagtaactttcgttgccttgactgttttcttagcctttagtccttctcccatcacagtcgcactcgctccttccatttcttcctatgttctccctaatatcactgtctcgaattcatccaactcttcaccgtcgagtctcgattctaatttcaccacattgcgtacaccggcgccggaaaatctcacggcagttactaaaaacttaacctttgagtcccccgtcgcaaatgggacaacggacacaaatgctaaaaccatcactattcagttccagaccggtcatgcaaaggaaaacatatcgtgtcctgacaacaaaactgctcgagatttggacacacatggagcaaggaaagcacctctgtcggaagttctagctgtcaattcgactgcttctccgaagcgaaaacagagaaggaagtcgtcgctgagaaaggtgatcgagtctctgaagagttgtgagtttttcgagggagattgggtcaaagacgattctgatccgctctacaaacccggttcgtgtaatctgatcgatgaacagtttaattgtatcttaaacggaagacctgacgtggattttcagaaattgaaatggaaaccaaagcaatgttctttaccaag

SEQ ID NO: 177109 - DNA, 156 bp, Arabidopsis thaliana landsberg
ccaacagacatcacacagaaaccataacatgtgaaggtagaagaagagctacttccaaacaccagggccatgctgggtgcaccagggtcctctatcttggcccaagtctagtggtcaatctctatggacttgagcttgttgaaaagctcatccatg

SEQ ID NO: 177110 - DNA, 514 bp, Arabidopsis thaliana landsberg
atgatcatgcggtaagatcagcaacaccacacttgtttctactgtcgtgtcaaatcctgacagagaatgtaataagtggcctttctctgttctcgccaccggtaagagctctcgtcccattgctctacacagtctggagaatctttgtcatcattggttggtctaaagatgtttggttcaacaagtctttaccaatcaatgctacacccaatgtaatggctaggacccttctttactcaaatacaagtcttctttaccgttttagaattggtttatgttaaaatcgagtgaaatcgttttgcaggtggttacatggttctggtttggaaggtatttagcactagcaaacttaggctacttcggagtgaatctactctgtttcttgatccctaggttcctgcctcgtgctttcgagcaatacttcagagagagagacgagatcttggcgaaaagccaagaagacaagccagttcaagttccccgatccccaccttctgaccacaaatctgattga

SEQ ID NO: 177111 - DNA, 269 bp, Arabidopsis thaliana landsberg
atggaggcgattggcctgagcggcgcctcgggcgcgaccgcccccgcctcaagcacatcgggaggcgtgaccgcagacccggagtcgatcacgttcaccggcggctatcatgcgttggaccgcctggacgagcgcctgaaccgggacgtcgtcgacaccaagaacagactgcgcgcgtacggcccgacgatggggaacagcaccggttgcgagtaccctgacacgcctggcgccaggatcaccattcagctgacaaccaacagatacca

SEQ ID NO: 177112 - DNA, 22 bp, Arabidopsis thaliana landsberg
atgaaagctcccggtcgtgccg

SEQ ID NO: 177113 - DNA, 1696 bp, Arabidopsis thaliana landsberg
ataaattacgagccaaaggtgtccaactctatcaagctgctctgaaaggagattggaaggcagccaatggtataatcattgaacaaaaagatattatctatcaaaaaatcaccagtaaatcggagactgttcttcacattgctgttgctgcaaagcacgaggggtttgtaagaaatctacttggaagcttggagtcaaatgacttggccttgcgaaacgtggacggcaacacagccttatgttttgctgctgcatcgggagtcgttgagattgctaaaatgctgatcgagaagaataaagatcttccgatgattcgtggaggtggaaaaacgactccaatccacatggcagccttattcggtcatggagaaatggttaaatacctttacaagaatacacgctttagagaattcaatgatgaagagtttgtaaatctctttcatgctgtgatatcagctgatatctatggtaaatatataatcagctcttaaatagttttctcttctttcttttcttttttcatttcttccgagttgcatgttctcagtgaggtctattcacagatgtagctctggagatgttaaagaacaaggaaaggaaacacgtactaggcctttggaaaactagtaacaaagagacagccttgcacttgatggctcgcaagccttcggcagttggtcgtcgaaaacatctaaacttctttcagaaatttgcaaattctagtaagtggacaaaagcacttaatgttttttttaagtataacattaggtataatatcaaattaaccttggggtgaacaggtcgtttggtaacgagtttctcacaagtacacctcttagttaactcattcttttcatatcaaaatatatatataagtagtaggaacaagtgctcagaagtgaccaaagtttgagaattatataacctatagtctaaacctttgtttgaacatcacacctgacaagaactctttccatttagtttttaaaggggtatttcgtgaagccaaaatgcggactttagctcatatggtggtagaggagctatggagttttgttataaaattgccagtggaggaaatttcgcaatttgtgggatcatctccaatgctactctttgatgctgcacaatctggaaatcttgagcttttacttattctcattcgttcttatccagatctgatatggacggtggatcgtaagaaccgaagcttgttccacattgctgctataaatcgtcatgaaaaaatctttaatataatctatgaactcgggccatcaaagatttgatagctatgtataaagagaaaggatccaacaacaacttgttgcatcttgtggcacgtttaccacctccaaataggttacaagttgtatcaggagcagcacttcagatgcaaagagagattctatggtacaaggtatgctaaacatattccacaatgggtataatttaacatcttgtatatatctttcaaaacttctaatgactttccaggctgttaaagagatagttcctcgtgtatacatcaaaacaaagaacaaaaaagaggaggtggcgcatgatctatttacgaaagagcatgacaacttacgcaaagaaggagagaaatggatgaaagaaactgcgactgcatgcatgcttgtatcaacactgatagcaactgtggtctttgcagctgcctttactctacctg

SEQ ID NO: 177114 - DNA, 141 bp, Arabidopsis thaliana landsberg
gcggttccggcggcctaccgttatcgcgtgcaggcggcgccacgcggctatcgcgttggctactaccagggctacagcgtggtctatgacccgagcacgttcctgatcctgtcggtcatcgacctgctggccaacaactag

SEQ ID NO: 177115 - DNA, 122 bp, Arabidopsis thaliana landsberg
atacctcaaaagaaagcacaaaaaatttcatcaaatttaatcgggaaaatccaaaacatttcacaattaagatacaacacaacatcacaattaagacattgcgagtatttgcaagagattag

SEQ ID NO: 177116 - DNA, 389 bp, Arabidopsis thaliana landsberg
atggagcaacagggatacaaaaggcagcatcaggttataattcttctattaaggtatctgcagccaaaggttcagaatctgcaggaacaattgcataatctcttggtgagaagcaaccagcagtagttccaaagtctcctgtgaagaaatctcatctagcatcacaatcccctctgcagagatctcctgtaagtttgtttgttagtttgacatattgactctaataaaaattttacatccgtttaatcctggtttataatgtaacatgtcagcgccaaaaagcatctgaaggattgaaggctaatcagaagtgcaagttaatggatataagtggaaagaagcgggtggttggtgcaggacgagtgcattcaatcgaccaagatcaaaag

SEQ ID NO: 177117 - DNA, 118 bp, Arabidopsis thaliana landsberg
gaaagaggctgttacattgcctgagatcgaagaagctgattttggagattttgaacagactcgtaatgttcctaaatttggcaattacatggattttcagcagacttttatttccatg

SEQ ID NO: 177118 - DNA, 1797 bp, Arabidopsis thaliana landsberg
atgctcataaccggcgatgttaaggaagtgaaacgcttatctaatgctctttccaacgtagaaaggaccgggtacacccttcttcaggcatatcatcagtcagcttcttacctggtcaattctgaaaagtctaccaccctgtctctgatgttatctaaaaagtgtatttgggagaagttactgcaaggtgtttgtcctctctctctctctctttcatagtgttgacataaccggcaaagttgttgtttctgaacttgttttttttttccactagacgcaatagattcaggggagacaagaagacaggagctcgacgagaagttctgtgaaactggtgaatctccatgcaggtttttttgcgcactatgcaaattcgctggccaaagctttgaagatttcatcacgcatctcaagggtaaagatcatatagtgcgcgtaagccatcgtccttgcctcctctaaatattgtatcagttacatttgtcatcagttacacttttgctcctgtcatttgagcacaagtttccctttctcacttcttacttacgtttgttatctgttttttcaagcaggagttggacatggtgtcagggcctccacccaagaggaagctggtgaagccgatctttactgtctctaaatacattaacaagcaaagaaaggcaagttttaatcactcaagttgtttttttctgtagaattacggtgaacatgtcttcttagttacaatcagagtttcatcagaaaaaaaaaatgcaattcgagttctactaggctccaaatgttcaatagaaagcatgattttgatttatttacttttgttgatgctacaacattgaaggatttgaaagggtggattgaagaagaccgaatgagcctctagaggagtacctgaactagacgtggaagatgaagacctctatcgctttgatctttagtacctctctacctgtccattctcttagatgatttatatcgtcgtgatctgttttaagaaatcttgtgtcttcccgggaatactagaaaaatgtccaaggtttaagaagtgtcacagaaacatattctccaacccatttcttttttgtaccaaaacgttaagatgatgatgagttatttgcatactacacaccctccattgttttaaccggaatcttttgctgttcgtcattcggtagattgtttgatgttgatggtcagagataaatttccaaggtatatacatggctatatcacttcattttgtaaacacacattttgtatcaaaacgaattttttttacttgtaatgtttgactacaataatgtgcctttccaagccggacaagcccaagcgcccacctcttaaaatattaagctcgaaatgatgatgcaataaatactcgcttttcatcaaaagcaatagagtgagagatcaaaatgaaagtcgacaacgtttagagtgaattaaactgaaaatttgaaagtctttctactcatgtcaataagctagaaactcaagtctctcaaaccgcgaatgctgtcacaagacaagttggtgttcttccgaaaaaacccgaggaaaatcttaatgcgatctcaaccatacctttcatcactagaagggaagccgagccatttgaaaagacaatttctctccatggttggtgctgtcatcgaccacaacaacatgaggatgatctttgctaatgtcaacaagaagatatcctatctaatgctctcgacaataaaaccacagaaagcaagctcttcggatgaagaattgatgaatcccgatatcgagaaagccaagaccggataa

SEQ ID NO: 177119 - DNA, 208 bp, Arabidopsis thaliana landsberg
atgaagaagaagatccaccaacaggaagaagaagaggaagaggggagggtaaaatcgtccattttcgttctctaaagttctctttttcaaagaatatagataagtacctaaaatcaaagtttttttgaaaaaaatgtcctcctatattgacaataaccccttaaaaatgtgtttgttgctttcatagataacagctttttatttctga

SEQ ID NO: 177120 - DNA, 270 bp, Arabidopsis thaliana landsberg
gagagagcccgctgacaccaaaacaatcatttctaagaaatacggatatcattgctcacctcctgcgtcttggttactatactggtatgaccattactctgctcgctgcgacatgctttatctcttacgctgagctcaggccgaagacttcttatgagcatgtatcaatcattcatgtaagttcctgcctttttgtaaccatcaattcaggaattggttcaagttttgcaacaacgtttcttttaataacaggaatctccatcgaattga

SEQ ID NO: 177121 - DNA, 1185 bp, Arabidopsis thaliana landsberg
atgcttccatcctttgaagatgctgagagcaggagccctgaacggcttgatcctacttctagtgaaggggaggaaaagttttatgaagcaccagaaatcttggttgattccattgactatacatctctcaggacccctagttttagtcgcattgatggattgctccctgttgacaacaagaatatcactaagccaagcaatgagacaactgagtcactggatagtttcgtgaaggctcaaatagtcatataccatcagacgtcacctcaatataaaaacattgataaccaggttgatagttttctgcttttgcatcttcgaatccggagatcttagtgtttcattgttaaaaagtgaagccttactaaatcactcatcttttggctgccttcgtaggtgatggtaactttagctactttatcatttttctgtcgaaggccaacaattcttgctattttggagtttgtaaatgctatcaatgttgaggatccaagctgtgaatcttttgaggacaactctcctgtagctggagagcatacttctccaagaagagatggatttgaagattctagggatgcagctgtcaagggtttgttagggaaggggaaatctagaatcattttcaacttggaattgaacatggctcgggcgcagatattcctaatgaatgagaatggaactaagtttgctacattgtcacaagacaatctgctgacagatattaagggtgtgattatgctctttgtatttcatctctttttcttcagtatagtgaatttttggaaggtaagtgggcattttctgtactcccatttgtttgaaggtctttccgaactcgttcagtattaaggcaagtcttggaaatttacgaatcagtgatgacagcctcccagacaaccatatgtacttttggatctgtgatatgcgagaccctggaggaacttcttttgttgaggtattggttgtttgtttcttttcacttttctctttgtggaatgagaatggattgcgtagatgagatacatgtaattttttcatcttgatttacctttttttttttttctttgctagttggttttcacatcattcagtatcattgatgaagattatgaaggtttcgactactgcctatctgggcagttttctgaagtgcgcattgtttatctgaatcgctttattcaagag

SEQ ID NO: 177122 - DNA, 206 bp, Arabidopsis thaliana landsberg
atgccaaaataccttgatcagaatgacgaggaaaacaaaggaagatcaacggacaataacaatcaccgtcaaatggatcacaacgattggttaccagtcacagcgtctagagacgccagatggtattactccgccttcgactatgtcacggccatggttggcgccggagatcttggtctccctttcgccatgtcacaacttggctg

SEQ ID NO: 177123 - DNA, 189 bp, Arabidopsis thaliana landsberg
gaaggacttggtcgttcctgtgctgatcttctagaatatgttgaaagtatttatgagtgcttttataagattgataaaaggtggaaggaagttggtgattctaaaggattctccctacaaccttctacacttggagaattaacatttgacgaactgcaaagttttaccctagatctactaaaaaaggag

SEQ ID NO: 177124 - DNA, 173 bp, Arabidopsis thaliana landsberg
atggaggtaagtgtgcaagagatctcgaacgatgtacaattataactgtttgccaggatttgaagatcattcaaggtgtccatcaaaagcatgaagaaggagaagaaagtgtcgtctttcgtggatctaataaagatcgaaagaaattattcgtaatagaatcggctatataa

SEQ ID NO: 177125 - DNA, 75 bp, Arabidopsis thaliana landsberg
ctagttttactcgtcagtcgtcactttactacattaaagctatccgattgatgccacgtagtcccgaccggtccg

SEQ ID NO: 177126 - DNA, 98 bp, Arabidopsis thaliana landsberg
acaggaaaaagaaaaagaacgtgtatacaagtatcgttgctgaattttatgcatgctatagtattcgaatatcaaatcatgaacgtcaaagatgctga

SEQ ID NO: 177127 - DNA, 425 bp, Arabidopsis thaliana landsberg
cgctcttccatcgatcccgtcatcggccacctcaagggagaccatggcatgggcagtaaccatctcgcccattcgaaaggcgatgccgaatacgccatcctcgccgccatcggctttaacttcagacgcattctcgcatggctctcacttttgctggtaattttgagggcccgcatccatccgcaaagccgaccaaatcaatcaccgcaaatctgctaaccccagttcttcacgggcgactacgacgcgcgccggccgggcgaatatccgacgccgtttgagccaacagaatgggtccgaatagctgcaacatgctttagtgcccatggctccgatcagatgggcaggccgagcttgctgcgggcctggcagatcagctcggccgtgactttgtcggccgggccgctgatgtctatgaagaacac

SEQ ID NO: 177128 - DNA, 86 bp, Arabidopsis thaliana landsberg
gatcctcggtcacgggctcttctactcgccacaatacaaacaagcacaatgcatatagagagattaacattacaccaaacatataa

SEQ ID NO: 177129 - DNA, 496 bp, Arabidopsis thaliana landsberg
gtactttggagctattggtgctcaaaaagaggaaaaacagaacagaaagtcacatttccaccaacatactcgatcaccagtagcagagagggaagcagtcagttcagcagtccattctgccagatatactcgatcgcagaggagaggaggcagtccattctacagttctactcgatcgtaaaggagaggaggcagtccactttgccagtccactagttctactcgatcatagaggagaagaaccagtccatcctgacagctgacacacatactcgaccacagaggccaagaagcagcccaaaccattttgtcaaccaaccaactcgactaccacctcgaccttctgatcaatccgcactcaaccagacaacctcaggaaaggaaagagaagagaagagaaaggcccattcgaagcccatttgaagcccactttgaagcccataaagaagcctactttgagtcaacactcttgatcacatcgtccatgggccgttaa

SEQ ID NO: 177130 - DNA, 147 bp, Arabidopsis thaliana landsberg
acttaaatcgttggaaacaagaagtgggaacatcagagaatcattgctgattctggaccgtcggatcaataaaaaacgatatcctcgggtcttagcgagagccggccaatctctaaatattaaaaacttaatggccagactaaaatt

SEQ ID NO: 177131 - DNA, 327 bp, Arabidopsis thaliana landsberg
atgaatgatgcggagtatctcagtatgatatctgcggttgtgaagcttggagagtttgaacaagctaaaggtttgtatgacgaatgggaatctgtttcgggaacaggagatgctagaatcccgaatctaatccttgctgagtacatgaacagagatgaggttcttctaggagaaaagttttacgaacggattgtggagaaagggataaacccgagctattctacatgggaaattctcacatgggcttatttgaagcgtaaagacatggagaaagtattagattgttttgggaaagctattgattctgtgaagaaatggactgtgaat

SEQ ID NO: 177132 - DNA, 85 bp, Arabidopsis thaliana landsberg
atgcaaaagagaaacagagaatgcaaatcagagacttacttgaatgaagcaaagaagaagaaggaagaaagtttcaggctttaca

SEQ ID NO: 177133 - DNA, 51 bp, Arabidopsis thaliana landsberg
atgcccgtgcccaagtcaatgtgctctaacgatgccatcaaaaatctgcag

SEQ ID NO: 177134 - DNA, 291 bp, Arabidopsis thaliana landsberg
gagagccagccggcgaccgacgtgttcgccaccgtcggcgcgcccgcgctgaccgccgaagagaccggcgccgtgcagaccgaagccgccgcgccggctgcggagacgacactggccgaccccgccggtctttctggaggcttcaccaccgaagagttcccggccgacaccgacgccaccaccgagttccccgtgatcgaggacaacggcggcgccgagactcagtccgagagcgcggtgtccgaaaccgaggcacccgaagactcggcccccgacgactcgaccaagtag

SEQ ID NO: 177135 - DNA, 120 bp, Arabidopsis thaliana landsberg
tactccaaggggcaagagatagtgaacaacaaaacgacagcggatgttgtggggaatgttcttctggtgactatcgaaggcgatgatgctcgtatggtcagcattgatgtcttgcatctg

SEQ ID NO: 177136 - DNA, 95 bp, Arabidopsis thaliana landsberg
atttcctcaagggagaggaatctcctcctagctccgattggtacgccgtgattgctgctccaaagccaaaaacgtttagggcaaaatttgattag

SEQ ID NO: 177137 - DNA, 748 bp, Arabidopsis thaliana landsberg
ctaatttcccctggaacaacaatgttgagaatagtagagagatcaatacaattactagggtggaagatgaagaagagttggacataggtagggtccacttttgatgtcctttcgtgatgcaatatttgagtttggcgtatgtctctgatatttttctttttgacgttttgaagatgacattgacattgacgatcatcatcctaatcaacaacaacaagagaagcctaaagaacaagggatattgtcagggcttagtaaacagaagatggcgaataggtttagtaatttcaaaggtaagctgaaacagatggcagctaagaatgagaagagtgttgtaaccaatgacgagaagcatgaggagaaaaacggcgccacagttgatcagatcaagaagaaatacgggtttacctcgtccgatgtaagcttctataagccttatacaagcttgtagtttcggtttgcgttggtttcatcttcatttgtgattgcaggaaatgggagctgccaaaatggctcagagcaaacttcaagacaacctgaaaaagttacaggtacttttcatggctttttagatttaacctaatctttgattgattcatttctagggttaaaagcctgtttgtatgtatctctgcagggaattagcttgaggacgacggaaatggaagatactgcaaagtctttctcctctacggcaaaggaactactaaacgctgttgagttcaataaacagagctcaaaatcttag

SEQ ID NO: 177138 - DNA, 101 bp, Arabidopsis thaliana landsberg
atgaacatccgagctatagccacaaaggcttataaccggaacatcactttaatgcatcatcatgcattacccggcatacgctcggagtcttgtgccatcat

SEQ ID NO: 177139 - DNA, 1192 bp, Arabidopsis thaliana landsberg
gtggtggatgtgcttggaggatcaaaacaaaagagaacccgtgatgggtagtgcaaaatccgccatctgttttttcttcgttatagatgaactttttataaccgagtgtaatttacaggtatgaagatggggagtccattttgagaagagttgcatctgctgctgatttcatttggtctgaaaatcctcttgacgttcttggcacgactacttccatatcatttgatgatcaagcctctctacctttaaaggaacatgatttgacgacagaggaggtactgtttctaattttccatacctttgctaatcaagtatttatgtccttctctacgccatggtaacgttttatttttctgttggtagattaaaattctatgcgatgatcttcctgtcttggggaagaatgacttcaagcatatcctaaagtaagaacagtattattgactccttcatggatctttttaatctttatgtctcacttgttaatttctaagcttttccaaggatgtggtagagctttgactaaaatgaattcagctattgtagaattagttagctgtaaattggttcggtaaagaacagtttccttagcacttcaagtttttacctatgctgttttgagtgctcaacccgataaagcactgtgtgaaatgggtaaacgggtgtccatgggtgttaggaattggcgtgtgggaaactactggttttgttaagactttagcatttgtcgtcatccatctatgcgtctagaaattatattagttgcttaatggtcattgaactctctattttgtagatggcgaatgcaaatcaggaaagctctgactcctgagaaaaaggaagttgctaaacctgagcctgatgtgggaaaggaagatgaggaaaatgaagatgataaactactcaatgaattggaagagctgacaaacacagttgaccgcaagaagaaacaggcaaagaagattcttgcaaaacgaagggctaaggttatttttaaccttatgataataacctatcaagtctttatgtcttagtcagtggccttagtgatggatcccttagactttatacttccttcactaaattcaatatcttttgccaggacaaggcgcggaaggcgactggtccacagatggatgtacttgaagatggtttcgtcgacaatgaattgttctctcttaatgctatcaag

SEQ ID NO: 177140 - DNA, 70 bp, Arabidopsis thaliana landsberg
cttcgtcggcgtggcgccgtggccgcttgcaaggtcgccgccgaggacgcagtcgactgcctcagtgaag

SEQ ID NO: 177141 - DNA, 445 bp, Arabidopsis thaliana landsberg
atggctacctccactccctccgacactgctgaaacgacgaccccgatctcgaacctgatggagacacgaagaacaatctctccttacgaccttactgccgccgataacccaggtgctgtcatctctcatcccttactcaagggatccaattacgatgaatgggcttgcggaatcaagacggcactctgttctcgcaagaaattcggatttcttgacggctcgattgctcgaccagaagagggctctgcagatcttgacgactggtggacgattcaagctttgctcgtctcctggatcaagatgtccattgatccgtcccttcgctcaagcatctcacatcgtgacgttgcaaaagatttgtgggacaccttgaagaaacgcttctctgtgacgaatggtccacgcattcaacagctgaagtcggagttagcgtgttgcaagcagc

SEQ ID NO: 177142 - DNA, 1043 bp, Arabidopsis thaliana landsberg
atgaccagcggcgatgaaaggagcaagctccccgaaaccctgacggtcgatccgcctaatgatgtcggcgagcagcgaaagtgaggaagtacttcctacctatccagatgttcatacactatttgtagaatacaataatagactgaggcatactgaatgagtataatcggttagatgttagaagaaaaatatgcattaaacctacatggataacatatatacccgaataatagttgtccataacagaatggtaaaaatatagctataactgatacgaaccacatggatacaacacagacccggataaatatttggccatatactaaaccttagtaaatataaatgtactctctaattacctatatcataaaatatatattacgcgaaggaatatgaaataatttatccatgtggtcaaacaggccgatattaatataaaaatatagaaaggtaaaaaaaaaaacattataaattgtttcatactaactcctttccattagaaatctaaaatttcaagatttgctccatcggcgatatgtggagaacaatacaaatggaacaaaccagaaatggggtaatggtaagctgacatatgtgtcgagttaggtttggttaggtgtttgtgatagacttcgtttaaatctatattattcaatataagttggttttattaaagacgatgtacaatggctaagatatcatcgaaagtttgagtctgttacaaactaaaacgcaatgtcacaaacgggcgtttttacaaatatttcatggaaaaaaagaaacaaaccttatccttcaccatatagtaaacttggttttataaatataacatatttataagttacatatataacaaggaggcttggttgttatccataaaacagtaatattaactacagttatcaataaattagatatataaatataggtatcattgtcgtcattctgcaagagggagagaagagagaagaaagaaaatacattgaaagaagttcaaacaggaaacgagtggacgaccaagagttgttacaatgggaaagaag

SEQ ID NO: 177143 - DNA, 675 bp, Arabidopsis thaliana landsberg
atggcgaagatcagaacggatgctccggtgatgccttcggagactcctcctcggagcagtgaggtgggagagattgacacccgcgctcccttccaatccgttagagacgcccttagtttattccgtcaagttagcttttccaagaagcaaccacctcgtctctcctcctcctcctcttctcagtctcaggtatacacacattcttcctctctgcatgcctctttctctcattttacaaaacgtgtctctctctaaatatcttttctttcttcgttaaggacacaacaacggatgtgtcggataaggagatgcaacttctgttagccgaacaagaaatggatagagtcaagatatgtcttgatggctctgtcgcagctaaagcacaagctctctctgatctcgactctgctcaacgaaaggctgctgatttaagggttaaactagaatccatcaaacattcaaggaaatgtgctatctctaccaaacacaccatgaatcaacgcttagaacaacttcaatctgaaaaccaagaaacagagagcacaagagaggattacattttaattaccgcggagctgttcatggcgaaatacgagctcgcggaattaaaacaacagtttaacctctccgtggaagagagactagctgaacttcagagggcagaggaagcagagt

SEQ ID NO: 177144 - DNA, 509 bp, Arabidopsis thaliana landsberg
aaaagcactcatcaagggaatgttaaggaagaaccccgagtatcggccaaacgtatggtttttcatgaaccagaaattgtctgcttaaatgcatgcagcctccggagtcaaattaactaatcataaatttttcttcattctctgttcaggcctccgagattttgaagcatccttatttgcagccatatgttgagcagtaccgtccaacgctttctgcggcgtctataactccagaaaagcctctcaattctcgcgagggtcggaggagtatggctgaaagtcagaatagcaatagttcaagtgaaaaagataacttctacgtgagtgacaaaaatatccgatatgtggttccaagtaatggtaataaagtcactgagaccgattcaggttttgtcgatgatgaagacatcttagaccatgtgcaacaatcaactgaaaatggtaatctccagagtgtttcagcaacaaaaccagatggccatgggaattttaaagcccgtacacagtga

SEQ ID NO: 177145 - DNA, 731 bp, Arabidopsis thaliana landsberg
caaacccctgtgatagaaactccttccaacgtcatgaaaacgaagccaatgcgctcttgttctggtgctaagtcaatgactcctaaaaggaccacaaaacatgccagaagatcactgaatcttgagaaaagtgcagagacactcacaaaagctgaaagtagagctgtgagttaggcattcactaatttcgtttgcttttctcatgtctttgaattaacaaattttgttttctgcaaataggccactggagaattgagaagtaagagggctaatgatgttattaatgataatactcctctggtcataaccccacaagtgaaaccaataggtaattgtgatcttgttcagctctttgagtttagtttctgcatcatgaaactgatctttaaagtcaatgttttcagcctctgttgaacctgtaaccccttcccgagtcagaactgcaacaccgttgaaacaaacaaaggctgatactcaaggaaagtcttcccccaagaagacacttgagccaatgagagatgaaaatggcttagaaaattcaactcgacagaaggtaaagttagttcttcgtttgaaaatctctctttcactagatggtggtgttcatgattggtatttatcaaaatgatgctttattatctgtatataggtacttgaggagaagaatagcgaaaagaagggtaggaaaagaaaaagacaagaagaacacaactcagaccttaaggagactg

SEQ ID NO: 177146 - DNA, 338 bp, Arabidopsis thaliana landsberg
atggaggagatgtgggagagagtcaaagccgaaaagcaaccaaagaaacctaactcgttgcaagaccacgtcatctccaggggagacacaaaaatgtcaacatcttcatggccgttgccgtcacgttcaccgtcgcgagcgaggaggcctactccctcgttgtcttcgctatcaccgtcatcgtcgcgaacaaggaggtctccttcatctcccgcgcggccgggaaagaagttgatggagaggattccgtcgtgggtgaagttgaaaaaagagttatcaatgggaagagaggagctcaattcacgagtcgaagctttcattacaaaattcaaggatga

SEQ ID NO: 177147 - DNA, 163 bp, Arabidopsis thaliana landsberg
atgcgtagcataaaagacagcatcgacaaaattattgtcaagcaatatgacatagcagacaagtttatagaattgatagacgaggtactacgtgccgagtctgaaaatttggaaaacgagacggatgagccacagcaaccggggaattcggctgattcagcag

SEQ ID NO: 177148 - DNA, 260 bp, Arabidopsis thaliana landsberg
gatttttctactccacccccggcttccggcgggaaactaacagctgggaaagatgtaagcggaatcgatgttgacgttaaccaaggaagaaagagcaaaagacccaggaccttgtcgagcaaattagatgggcggttccacttcgacaagaaaaccaagctgcttgttggtcacccatcccctttgctaagcgccggcgaggtggtgtctgatccagaagaacgctaccacaggtcactctcgaagctaaatgggaaaag

SEQ ID NO: 177149 - DNA, 276 bp, Arabidopsis thaliana landsberg
atgcgcttgtggatcttgtcggtcacctcgggcgcgagcgtcgtgggcggcgccgtcggcaccagcgccgccgccggcaccaacgccattgacgccgtcgtcgacgacgacgacgactacgacggcgacgacgactacgacgacggaggcggtggtagccccgccggcgcattcaccgtaaccgtcgccgcggcggcgccgacgttgacgtctacgtgggagccgtccaccgccggcagtcacgaggtgaagcggcagagcggacatacgaggccg

SEQ ID NO: 177150 - DNA, 72 bp, Arabidopsis thaliana landsberg
atggagccgggtgaagcaacgaccgcgtgcgagggagaatcaagggccagtgcagcgccgatggagccgaag

SEQ ID NO: 177151 - DNA, 130 bp, Arabidopsis thaliana landsberg
gagctatagtcataatgcaaacagtgagatgtccattagtcaaccccaaaacagaaatgagcataatcatccatccctgatcaccatatttcgcagtgaagtagaacgccggaatgagaagataacgtga

SEQ ID NO: 177152 - DNA, 1924 bp, Arabidopsis thaliana landsberg
atgacagatgatctcaaaccagacaaaatgttggaaaatcaaagaaccgctatgttgcaggttgaagactttttgaacaacagtgagtccaaccatgctgttgaagatgagtatggatatactattgaggacgattcagctcaaggaaaatcatcacaaaatgtattcgatacaagtttgcaaaagaaggatatgttgatgctggatgtagaggttagtcaatttcttatttcagaattgtttgcgccttccaaggcacatgcaaccattaactacatgggatgttaccttctatgatgacttatttagttgcacgttttcctcagttaaatcctctaactatgatatgacgcttactacaatggtggttgatggatccgctaagggcaagtggatattctattagataagtatttggactggcgaaatcttgacactattccagcgatgtcatattagtacaaattatggttatacaggcaaatcttgagaagaagcagactgatcatcttcatcatctggatggacacagtgatgggttctcggagaacagttttactttacagcacagtggtatttcaaggaaaataatggataccaaccagtattaccctccctccgcattccaacagcgagatgtgccatactcgcatttcaattgtgagcagccttccgttcaagtatcagcatgtgaaagtaaatctggtattaaatctgagaacaaacccagtccttcctgtgcttcaaatgagtcatacacatcaaatcatgcacaatcaatcgagagcttacaaggtccaactgttgatgatcggtttaggaaggtctttgaaacgagagccaacttgctgcctgggcaagatatgcctccttcttttgctgcaaataccaagaagagtagtaagacagactccatggtgtttcctgatgctgctcctatccagaagattgggcttgagaatgaccacagaaaagctgcaactgaattggaaacatcaaatatgcagggaagttcttgtgttagctctgttgtggatgacatttcactggaagcaacaagttttcgccagcttcaacaagttatagaacaggtacaacttgtcaatagataattgttgatataaggaaaaggcttcctgggaatcggtaaaagtttgctgttcctttgtgattgatatcaaagtgtatatatgttaataaatttacatatacatttgcttacttggttgataatacacttgcttgctccagttggatgttaggacaaagctttgcataagagacagcttataccgattagcaaaaagtgcggaacagagacatcatggtggaaacagaccggagaaaggcgcaggctcgcatctcgtgactggtgaagcagacaagtaagcaccacatcctacataattattcaatatgttcaccctttatcacctgttgctaagtaaagttcttgatgccaacttataactttatataggattagactcgagtcttgacagatttagtaactctcttctttagaaacttccacttgggctcttgtactcgtccttcatttctcttagattctaatctttgatatctgtatgtggtctcatccaggtatgctggattcatggatatcgaaactgatacaaacccgatagatcgatcgatagctcatttgctgtttcacaggccctcagactcatctctttcatccgataacaatgttctgtcttataaatctcatccaatggtaagttaaaccttcgattcttacaccgccatttaatgtgcaaaacacagtgcctcattttacccatcactatctacacagattcctcagcccaatagtagtccgagcctgaggatagagaaacaagaggaaactacagaacttagacccgaagcagaagttgtaacaagtgacaacaattaa

SEQ ID NO: 177153 - DNA, 226 bp, Arabidopsis thaliana landsberg
atgctactcgatgacaccactcgaccactgggtcgagtaacacttcgtcacacccctgaccaccactcggacattcactctactcgaccacgagatcgagtatcatcactctaccaccactcgactaggcactcgaccacatcttcaaattctactcaaatccacactcaactagataagctgagcacaaggaagagaagaggagaagaagaagtgtttggaagcg

SEQ ID NO: 177154 - DNA, 198 bp, Arabidopsis thaliana landsberg
ggctgggaaagggcgccggcgtctggttttccaaacgcgacggctacccgcccgtggaggtcgtcgacgggaaggggatccaaggacatgcgcgaaccctgcaagtcggcctccggcgtcatctgccaaagcggcaaccgccgctccgtcaagggaagcaccctccggcgatgaatggcggcaatcactcccgcagcg

SEQ ID NO: 177155 - DNA, 236 bp, Arabidopsis thaliana landsberg
aaatcaattctcaacaaaaaaacaccaagtgaagaaggatatagtgaaggacgaaaagggaaccttactcatccaagcaagaataggcaaacaatcagcctagaggaaactggaagacaggaatcttcacaggccatacgtggaaagaagaagccttctgaagtggtaccagataaatcatcggatgaaccgagcagaacaaaagatcttgagcagtcaatcgacaatatttcctg

SEQ ID NO: 177156 - DNA, 2110 bp, Arabidopsis thaliana landsberg
  unsure (1)..(2110): unsure at all n locations
atgttgcagctattgacgcgtctggtttttgatcgaagtagcacagatgcagctgcaaaagttgctgaggttatgtctgctgattttgctcatgaagtgataggagcatgtgttcccccagtttatcccccacgttctggtcatgggtgggcttgtattcccgtcattccaaccactccatgttcccactcagagggtaaagtgctctctccttcaatagaggctaaacccaactgttatgtccgttcctcagcaacacctggtgtccctctgtatcctcttcagttggatgttatcaggcatttggtaaaaatttcaccagtacgagcagttttagcttgcgtctttggtgggagcatattgtacaatggcagtgattctatcatatctagctccttgaacgatgagtttccaagttctcctgatgcagacagattgttttatgaattttctcttgatcagtctgagaggtactgtcaagccaaagagttctttcctcctttcaatttgaaatcaactcggttcctcttttccatcttattcagtgatattttactttttcttcataggtatcccactttaaaccgatggatacagatgcagactaatctgcatcgagtttcggaatttgttgtgacaccgaagcaaaaacctgatgacacacggattaagcctgatgaaagaactgggatcaagagacttcttgaacatgatagtgactcagagtcagatacagaagaaacattttctaaaaataacattcaaccagcattgacagacggcagtgctcgtgatggtggatcctttgaaaatggagtttgtagaactgatcctaccgttttcctttcttttgattgggagaatgaagtaccgtatgagaaagctgtaaataggtatggcagtttatctcatatgtctgcatcttctatttgtttgttagcttgtgaaaagtcttccagattggattttgttgtcttgagattaatttaagtgttcgtttgttggaattttgctagactaattgatgaaggaaaactaatggatgctttagcactttcggaccgcttcttgcggaatggggcttctgattggttacttcagctcctaatcaaaagtagagaagaaaatccttcaacatcaggacgatctcagggatatggaggccagagcaacagttggcagtattgcctgcggctaaaggacaaacagctggcagcaacactggctcttaagtatgtaaacttataatttctataacaagtaacaaccatgaaaaaaaaaactgtnnnnnnnnnnnnnnnnnnnnnnnnnnnncacaatatagtgggatttacgcttatgttagtaaactgagaaaacagttttttttttttttttgtcttatttcaaacggctacatgcagttttgttctgtagtggattggttttgaagctctgttatgtcttggttcaggtatatgcatacgtgggagcttgaggcagctttaaatgttcttacaatgtgtagttgtcatctcttagaaagcgatccaattagtcttgaggtataagggagttttgctttcagttctagattcctgcatgtaactttggtttacagtcatcctgtaatcagtcaatcgagacctaacttctcattcttctttgtgcatctaggtgttgcataggagacaagctctgcagaagtacagccacatactttcggcagatgatcgccataatagctggcaagaggttatctttcttccttttgtttgagatcatgtttggctcttggtatgctcgatgtgtcactctcaaaaatctaaatgggaaacaggtagaagccgaatgtaaagaagaccctgaaggcttggctctaagattggctgggaaaggagctgtttccgctgcgctagaagtggctgaaagtgcaggattatcaatagatcttagaagagaattacaaggacggcagcttgtaaagcttctaaccactgatccactcaatggtggtggtccggcggaagcatctcggtttttatcttcacttcaagactcggctgatgctctaccagtggttatgggtgcaatgcaattattacctgaccttcggtcgaaacagctcctg

SEQ ID NO: 177157 - DNA, 436 bp, Arabidopsis thaliana landsberg
cgccgacccggtgatccacgcgctgttcaaggccttccacgcgccgattcagcactacctggagcgcatcggccacggcgctgatcccttgcgccggcgcaacgagggccgttggcgtttcaacggcagctggtcggtcaggttgcgcacgtccggctttcacaccagccacgtccatccacgcggctggatctcgtcggcctgctacatcgacttgcccgagagcatgggcgacgccgggtgccgggagggcgcgctcaccttcggcgtaccgggcatcgtgaccacgccggtgctgtcggtagagcacgaagtgcgtcccgaagtcggcatgctggccctgtttccgtcctacttctggcacggcaccgtgccgttttcaggcacgcagacgcgcctaaccgtggccttcgatgtggtgccgggcaagccataa

SEQ ID NO: 177158 - DNA, 190 bp, Arabidopsis thaliana landsberg
agggttcgacttctactactactactcaagaagctctcaatgaatcctcaaggcttcttgatctcattctaagagattacactctcaacttcttcaagaaccaacattattctatcaagaccggtgttattcggcgtgttcatctcccgtctgactactccggcataaaacttgacgccgttaggttccg

SEQ ID NO: 177159 - DNA, 161 bp, Arabidopsis thaliana landsberg
atgagacccaacccgaaagccgaagcacgagcaacctaaatcgataccaacaaacaaaagactcgataaactcttcaaaatccaaaattcgacaagtcaaggctacagatcgagaaattgatccggggtttaccagagcaagagtgctggtaccggagtaa

SEQ ID NO: 177160 - DNA, 525 bp, Arabidopsis thaliana landsberg
gtaattgctattacagttgaagatgaagaggacattggaaagttcaaagattacaccccatcatctactgctgatgccgctcctacaaaagcagaaccaactcctgccccaccaaaggaagagaaggtcaaacagccatcatcgcctcctgaaccgaaggcctccaagcctagcacacctcccacaggagatcgtgtttttgctagtcctcttgcaagaaagttggctgaagataataacgttagtttcacagtgttctaaatattctgttttttcttattattcctgcttaatttttcttcttgtttactttatttaaaaaaacatcaggtgcctctctcagacatcgaaggcacaggtcctgaaggacggatagtgaaggcagatatcgatgagtatttaggtataagtaactccatgactcgtcctttcctttctttttctttcagacctttcttgcctctgtttacagttatcactcatccttgtgtcgtaatacatcttccaatggtgcagcttcaagtg

SEQ ID NO: 177161 - DNA, 448 bp, Arabidopsis thaliana landsberg
ttatcggaaagagactctccgctatagagagccattcaggaaccgatgcgcttacaggggagaaaaaagactattacgagcccgagcttttttagctcaactatctgctcgagtattagaaatacgaggaagaaatctaatattgaaagaagggaaaaaacaaactaaagatcggtaagaagccaattccgctacgaatgtcggccaatcgtcttggttgtttaggatagaaatcaggtctgagcaatctgaagcaaaagtactagaagtatcgccaatggagatcatgcattccattgcccataacaaggagtcaaattttgcatggagcggtgataagcttcgacgagcactcttgagcccgagatggaggattgagtcttgtcgaacaaggacccatccatgcccgctaagagagtcatcggcatgccatgaagcatcaagttga

SEQ ID NO: 177162 - DNA, 559 bp, Arabidopsis thaliana landsberg
atgctgcttcttactggagttacaactatacttcactgttacttcggtactcggcttccgttggttcaaggaagctcttttgtttacttggccccggttttggttgtcatcaactctgaggagttcagaaacctcactgagcatgtaagtttgcatatatagaaatcaaaaggaggattttgagttcttggagactttgcaataaactgatgttttagcttcgcacagaaatttcgggacacaatgagagaactacagggggctataattgttggttcattattccagtgcatattaggattcagtggtctcatgtctctccttcttaggtaattcgagaatcaaaaaaacggtggtttcctagatgtcactgatatcagattagacatcttaatgatatgttttcttaaattctattttcagatttattaatcctgtggtagtagccccaaccgtagctgcagtaggattagcattctttagctatggatttccacaagccggcacttgtgttgagatcagcgttcccttaatacttttgcttctcattttcacattg

SEQ ID NO: 177163 - DNA, 606 bp, Arabidopsis thaliana landsberg
atgcaggtcaattttgatgaaacttgtgattcagtgattagaatgaatgctaatgagcaaactcgatccgccaatggcattggcaatggcaatggtgagtctattcccgggattccagatgacttacggtgcaagagatcggatggtaaacagtggagatgcactgcaatgtccatggctgataagactgtttgtgagaagcactacatccaagcaaagaagcgggcggctaattctgctttcagggcgaaccagaagaaagcgaaaaggcgatcatcgttaggcgaaacagatacgtattcggaagggaagatggatgatttcgagttaccagtcaccagcattgaccactataataacggtcttgcctctgcttccaagagtaatggtagactagagaagagacataataaaagcctgatgcggtactcgcccgagacaccgatgatgaggagtttctctccacgtgttgcagtggatttgaatgatgacttgggtagagatgttgtaatgtttgaacagggctacagatcttataggacaccaccatctgttgctgttatggatccgacacgaaacagatcacaccaaagcaccagtcctatg

SEQ ID NO: 177164 - DNA, 1338 bp, Arabidopsis thaliana landsberg
cttctcagatcctgatgttgatcacgaagctgtcaaagaagctgctgctgatatcgccgatttggctaaaatcggtaccgtacttcttcattttacctctaatcggcggctaaaactgaaaacgtgttactctctttgcttgttcgtccttgagttgctcaattttgaatcaattctcgacaacggattcactctaattttggattctacatagaaattgttttgttcttgcccatagtactttgattttcagtaaggcgagacctagaagtgtttttttttggcttaattgattttctcatctgtttatatagatgaaaatgttgaaatcatcgtggaaaatggagcgatccctgctttggtgagatatctggaatcccctttggtagtttgtggcaatgttcccaaatcttgcgagcacaagctagagaaagattgtgctcttgctcttggacttattgctgcgattcaggtaacccttctttcgctgtttttgatgaaattgtggatgagatgttgtgtaatttcaatctctgttggaagttaacattagaatttttgaaatgggcgatttgcaactatcttagatgtacttagcttggattgatgtatattgatattagctttctctgttaaatagcctggttaccagcagcttattgtggatgctggagccatagttcccaccgtgaagttgttgaagagacgtggggaatgtggtgaatgcatgtttgctaatgctgttattaggagagccgctgatataattactaacattgctcatgacaatccaaggattaaaacaaatataaggtactaatatctcatgatccttactggttatggtgatgactagctgttttcacttgacaccttttaaaaatgctttacagggttgaaggtggcattgcaccacttgttgagcttctcaattttccggatgttaaagtacagagggctgcggcaggggccttgcgaacagtttcatttagaaacgacgagaacaagagtcaagtatgtttttactatgattatgttttgtttaggcttatgaaaggcatgattctcacataatgcgcaactatgtagattgtggagttgaatgctttacccacacttgtattgatgcttcaatcacaagattctaccgttcacggggaagcggttagttcttcatcttgctttagatcgttgcaattggtttgatttgttcagttctttctaatgtactatggactttcagattggggcaattggaaatcttgtccactcatctcctgacatcaagaaagaggttatccgtgctggtgccttacaaccagtaattggtctacttag

SEQ ID NO: 177165 - DNA, 681 bp, Arabidopsis thaliana landsberg
ctccttgatgaggatccatctgatgctgaggatgttgaacttttaatgcttgcatctcagtgggctggtgctgcatacgtacaacaggtttgaccaaccatcattttttgaaaacgatagttatgattatgaaagtagctcaggtcctgaatgtcagtcagtaataactcctttgcttagttccaattttcctaacactaagatactattgttattttgggtctgcaatttgtgaatgtatgtattggcttttacttgtgaattggttggatcttgacattcggtgtttctggcagggaaaactgaaaagcggaatcatacacttggaaagagtagcgaaactgagagaacctggtgatcctaaaagcaaagagcattactttgaggcattgctgcttctttcaaggtactaattttacagcgaacagaagtgtcatcacaatacagagtttaggaaataggtacagaagcatgtatgctactgaactgcgagcaatgtgaaatcataaaaacttttgctgttgcagcgctttgtacaaagaagggcagagtgatgaagctgcaaagattttacgagtagtagtggatcacaatccggcgtacaagcctctgctggaacagtgtgaagatgagaatgagctagttagcgatcttgtcagtcgcagaaaggatcatttctga

SEQ ID NO: 177166 - DNA, 84 bp, Arabidopsis thaliana landsberg
gtcatttgcgaaagagattatgaatattttgattatgaaaacggctacgaatgtgaccttccggtctctgtgacaacgaggaag

SEQ ID NO: 177167 - DNA, 460 bp, Arabidopsis thaliana landsberg
gttgtcaacgcggatgtttcagtacaacgcattgaggaactacttctaagtgaagagagaattctagcacaaaacccacctcttcaaccaggaactccagccatttcaattaagaatggatacttttcatgggattcaaaggtgaatcctcaaaatatttcctcttgtttacattatgttggaatgcaatattagcttctgcaatgctcagtatacatgacattctgatcacagtgtttgctcgaatatttcccagactaccaagcccacattatccgatatcaatttggagatacccgtgggcaccttggttgccattgtacgtggaactggagaaggtaagacgtcacttatttcggcaatgctgggggagttatctcatgctgaaaccacaagcgttgttattagaggcgctgtagcttatgttcctcagtttcgtggatcttcaacgccactgtga

SEQ ID NO: 177168 - DNA, 384 bp, Arabidopsis thaliana landsberg
gtggctcccttgaggcacttagcccgacgtctggcgtcatccattaccagtgaaatggaagacaacagcagcagtggcaaaagtaaaagaatcggcagcagtagaagcactgggtagacgcatcttccttaatgcgcgtatcgaatggcgaaactgcatttcaccccatttacataagacctttttgctgtattgactttgcctaattcaagattcgattgttaattctgctaccatatttctgttgttcatcgggcaacgacaaagtcgcagtgtgatggtgtttgcattaattattgccatggcgagtaatggcaaatccaaacacacaccgaacacaccaaaaactaaagtggtcggatatgcgaggcgctactcgcttcg

SEQ ID NO: 177169 - DNA, 319 bp, Arabidopsis thaliana landsberg
gtgtgaagcattctcgacatatccaaggacatatgatctcctccatgcttgggatattatatcggatatcaagaaaaaaggatgtagtgaagtggatttgttactggagatggatcgaatactgcgcccgagcgggtttataatcataagggataaacaaagagtggtggattttgtgaagaagtatctaaaggcattgcattgggaagaagtaggtaccaagacagactcagattcagatcaagattcagacaatgttgtattcattgtccagaagaagctgtggttgactagtgaaagccttagagatatggagtga

SEQ ID NO: 177170 - DNA, 311 bp, Arabidopsis thaliana landsberg
aaaatatcagagcagatggtcgtcggatgactcttggtgactccaacagaccggatcttttctattccaatcggtctacaatccgaccacctacgtttgacagaagcgttttcgagataaaccctgctttctatactcttgtgagtatgcacccttttcatggtgaaccacaagaacacccggtggatcacattgagcggtttgaagacttggtttcaagcattaaggcaaaaagtgtttcttatgactaccttccctgcaaggtcttcccatattctcttactggggaagcatctttttggcctaagtag

SEQ ID NO: 177171 - DNA, 912 bp, Arabidopsis thaliana landsberg
atgaagagtctatgactactgttgaaggaagaacgggaccagaacctgaagatgtacaaccaacatttgcagaccgcaagcggtttctgaacctttcaaagatagcctatgtggcaggtatactagttaattatctatgggtggtataattattccacatgttattgtttctttgtctttctttctgaaaaccatgataattatcgcattacagataaggatgctgattccgaatcgaaagtgaagcgcattgaagctgatctcaacttactgaagctgcaggtatattctcagctgtgttaatatttatcctgtatagcctgttggtaaactcagctacgtaaatactctctataaccggtgtaaccgtgttatatcttgcaggaagaaataacaaaagctttgccaaatggagaagctagaaaccggctcttccgaccagaggagctcattgaaacctgtctcaatatccagggtcgatggacagctataaaggctttcgaagtgtttgcatggacgagctcttcgttccgtgagaatcataggagtcttttggaagaatgctggagaaatgctgcggatcaagacgactgggacaggcatcatcaagcctctactaatgaaggttggagcgaggaagaaacattacagaatctaaggaacacggcccttttccaggcttccaaaaggtgttacggaccaacccgagtcaacacttttgatggtgactttgcacaagtccttcctctaagaagagagaaccctgaggattcaacttcttctgtagaggacgtgttgatgagtcataaagatttcgctgaggcagggaaattaatgctaactgcaatcatgcttggttgtgtagaagaagagggtattgtagcagaagagttctcatctccaatggagtaa

SEQ ID NO: 177172 - DNA, 459 bp, Arabidopsis thaliana landsberg
aaacgttaactttcgatatcttcagtcaaagtcttttctcggtaagattgctatatagtagtagtaaatttgagcataatagttacattactatgtatgattgtcccgagagctctaaatttttcgtttgatatattgcagtacaataagtcatattatggcgtcggtccacgatcatattggaaaaaaaaccttacttataagtctcttcctaagacacttaaggttgtggtcgtgaggatcttcactggtcgctttgacgagctaaatgttttgaagttattgattcagtcgggacgtgggcgttggcctggacgcgagcatgggcctatgctggaaagagtggagctttacatggatagtagtatggcagaaagtcaaaaggagttggcagatgatggagccatgatgttacagagtatttcaggggatgtacaggttcttgtatatgatccttga

SEQ ID NO: 177173 - DNA, 697 bp, Arabidopsis thaliana landsberg
atggctgagtctagcaagttatccgcaaccacagttgaagcagctcctgctatgattaaggccaaagacgtgatttctccttccgagaaggaagaatctgatcagacggagatcacgaaagtatccgtcttgaaaaaccttgatgagaaggagatgatcaaagaattcgctgatcgtcttcagcgtctcgaagcaaaggtggatttgttggtaacaaaggcggatttgttggcaataaaggcggatatacaggagcttctcatctcagccaagggtgagaaagttcctgccatgaagacttctgctaaggcttcttctgagagcgatgactcatacatggacacttcttcggaggatgaatcgtcttctgctgaggaacctgtaaacaaacctgctgcaagtgccgccaagccagctactaaagatcctttattctctgctggtttcaagccagctgataaagattctttattctctgctggtttcaagccagattctttattctctgctggtttcgagccagctgctaaagattctttattctctgctggtttcaagccaggctctttattctctgctggtttcgagccagctgctaaagattctttattctctgctggatacaagccagattctttattctctgttggtgtcaagccagctgctaaagattctttattttctgttggtgtcaatg

SEQ ID NO: 177174 - DNA, 319 bp, Arabidopsis thaliana landsberg
atgaagaaaaaactgcttgtgctggccgtggggacggcgctggtggcgccactggcccaggccgatggtccgcaagtgtacggcaagatcaatctgtccctggagcacatgaaatacgacccggcgccgggcgcaccggccaacgatgatgaatgggaactgcaaagcaatgcctcccggttcggcattcgcggtgatttcgatctcgatgtggcgggtctcaaggccctctaccaggcggaattcgagatcgccgtggacgatggcgacaacaaaggcgatacgctgtcccagcgcaatatcttcgctgggctgcaag

SEQ ID NO: 177175 - DNA, 100 bp, Arabidopsis thaliana landsberg
atgtggaggattaaaggctatcctattcattatcgacaaacatcagttactaaacttacgttccatgagaaaggcaagcaacctgtatatgtcaaggaag

SEQ ID NO: 177176 - DNA, 896 bp, Arabidopsis thaliana landsberg
atgggcaactatctctgccgttgggatgaacaactcttcttactatttcctttgttcgcctgcgtcttctactggattttcgctattcctagagtttcttcattcaagaccaagcaggaagttaagtaccatggaggagagatccctgatgatagctttatccttggacagctggagagctgtttcctttcactgaatttgatgtttatgccgcttctctttcacgtggcgtcacattactctgtgatattctcatctgctgcttcagtttgtgatttgctgctcctgttctttatccctttcctgttccagctctatgcttcgacaagaggtggtctatggtgggttaccaaggattcacatcagctgcagagcattcggattgtgaatggggctattgccatggtcattattgtgatctgtttggagattagagttgttttccgctcttttggaaagtatattcaagtgccgcctccattgaactaccttctggtgactacaacattgcttggaggtgctgctggtgctggtgcttctgttcttggaatgatctcgagtgctctgagtgcagcctttttcacagctttgtctgtgattgtgagttctgctgaagctatcgttgtaggatttccagttctggtaagtatttttcttcccgttgcacagcttctattactattgtcattaataactagttacctgcgctttcctgtagtcaaattctgttgcaataagacgagtaggtatccctcaatagtaacaatggaattcatattctgtgtttgtgttgcagtttactccgcttcctgcagttgctgggctttattttgctcggttttttacaaagaaaagtgtgccctcttactttgcatttgtagctcttggaagcttaa

SEQ ID NO: 177177 - DNA, 490 bp, Arabidopsis thaliana landsberg
ccttggtaaggacaagaatgtggtgaatgtgaatgataccggcaccactgcgcgggagctggtgcaggaactggaacgcaacagggcaagggtagagcggaacctgaagcggacagattcgctgaaaccggataagatcaaaacctacctcaccaggctttcgctgatcgacagcgacctggcccagatccgcagcgatacaacggccaggaacaaactccgaaccatacgcaacgagtttaacctgatgggagatgaagatgcgatcaaatacaggagcacacaccagtatgattctgcgcaggccgcattgccgcagggcgacagggatggttttctgaaacgaagccttacgaggcaatccctgcatctcaaagaaaaatacaacgataacagcaagcagatctggactgccatactcgaaaagttcaaacacctgttccctcaaatgctgtttgtatcattgcccctgtttgccttcctgctcaag

SEQ ID NO: 177178 - DNA, 204 bp, Arabidopsis thaliana landsberg
agaaacgaagaaaacaagccaaaaaaactaagaattgatcatcgggaactgaaacaagtaacttcagaagctgaaaaagacagagaagagaaagagaaccgtgagcgtgagaagaagaagaagaaggaacaaggcgtggaggccccgtcatttgttttaatcaaacaccgacccgcgttagctttagggcccatttcgttttag

SEQ ID NO: 177179 - DNA, 101 bp, Arabidopsis thaliana landsberg
gtcaaaagtcgtcggaacgatgtcgagtaaaacggaaacaggaggccaacgatcggagaggattgaatcgtaatcagaaaagtcgattgttgtgcatctaa

SEQ ID NO: 177180 - DNA, 325 bp, Arabidopsis thaliana landsberg
atggcgctcgagcgtgccgccgccgaccggactgacccgccggccgaggtcgtgatgaagcggggcgactgggacgacgcgctcgaggagtactacaccgagcacaagtcggtcggcaccaccggcgatgcccgcagcccgcagatgctggccacccgcgacgagagctccgacgaccgtcgtcggtggtacgtcacccagacgatcgacgacccagccggccatcacgactgggtgatcgaggcggtcatcgacctcgacgccaccgacgcgattggcgagctcgtcctgctgaccgaggcgatgccggcggctctgaatccga

SEQ ID NO: 177181 - DNA, 1145 bp, Arabidopsis thaliana landsberg
gagcttcagaggaaagaagctcatgatcattctcccaaggatgactctgcagacacaagaatcaacgataagacatgtgaatgtcatgaaggccagttaaatcatgaccatggcagtgtaatgccaactcatatactcttatacctcagttccgcccagaaaacgtttttgactatgttagctttgcgcagattcgttagttattgtatcagttaagatctttggtgggatcatatgagtatttcctggcattctagatcaaatgaattttaactgttagtctatattaagaaagcattcaactgtcaagcataggcttgttgtatatatttttgcattatacttcatttatgactataaaattgtcataattcatgtgatttttctaattctaatgttcctcttttctttcttaggtatcattttcatcccatgattggttggattcatcgttacagacacatgttcctctggttgatgtagataaggtatggtttttcaaatttactatggctggtgatattcattttccttagtcctagcctcctaggtaatcataattgtataagagctcttgtagcgtgagacaaagatcataatgtgtcatgttagaacttattctcaatctctattagttccattaggcagtttggtaagttatgtgggttggtttgctcatgtagctttgcatggggaggtgaatcctgttgagcttaagtgcaccttcttacacgtatgcatatgcacatgatagaggtgacacacacaccagtacaattgcatatgtttgttgcgatgttgtgtgtatttctcaccaatctatactttaaaatgttcatgattttgttgtattctaacacaggttcgttgtattataaggaatatagttcgagactgggcagcagaggtagccatatttttgtttgtcattttcttctgacaatgatgtgcggaaatcctttctttaatcttaaatcacaaccaaagttttagtggtatattctttttacttctagggtcagagagaacgagatcaatgctacaagcctatccttgaagagcttgattccttgtttcctgaccgtttgaggagaggacgccgtgttactcctatttgttttgacttttgggttatagagacttaa

SEQ ID NO: 177182 - DNA, 1022 bp, Arabidopsis thaliana landsberg
tctgctccaagagaatgccaagcagtacgagcaacattctactttcagctctttgaaatttgatgaggaagcagctgttttacccaaggtagaacttgcatatactttgttttcttcaaagagactttatggcctctaagactcaatggcgatgaatgataaactgttgctattgtgtatttctgttatctctgtctatggttgatctttggttttgtttccaggagaagaagggtcgcgggtctcctcccctttggtacataactgttgaggaactcaattcactctcatcgtaagtacattttactttctcttctccttgtttatgtgaaatgcataccgcttttctgacatttttccaaaaaacaagatacatgagaggaaggctcacccttgagaaagtgaatgctgctatcaatgacatggcctcatatgctgaagcaaatgctcatcttattgcagcctcaaaacagaaggtatatttaccagctgaaggaattgagttatataggctacaattgtactgacgcttttgtcttatattgccaaagctagcggaaaatctctgggagaaagcacttgtaagctaatataactcatcaaccacactgtctagatgatagtatccgttcactagtgaaaacattgttataatctttgattgtcttgaaactcttatatgcagaaactacgagatatcgtaacagagcaagcagtgaagggcaaacatttctttcttgaaactgacatgaagggaccaagtttgaaactagacaacacaggaaaagcaatacttactgtaagtaactaatatatcttcccttcatttcaaaatttcaacaaaaaagaaacaacattttcatgcttccttaaactcttcaccagagttagactaacatcgataacacatgcttattgtcaaattttgatgtgtctattaacaggttcttcgccaccttggtcgtattagtgagactcgcattggacaaaaccgcgtcatcattcttatcaagcctcactag

SEQ ID NO: 177183 - DNA, 544 bp, Arabidopsis thaliana landsberg
atgctggtagcgccggagcacaagctgggcctggcgatcctggtcaaccgttcggacctcagcgccaccgagctgggctggaaagtgctggatgccttgcttggcaaaaagctgaagccggccgccgcgatggccaccggggcgagcggcggggccggattttatgtccacgccgggagcggccgcacgatggccctggaggtcgtcaacgagcgcctgtgcttcgatcaccagagccagtacgcgccgctcaccaccgacggcgatgccttcgtgctgaaccagatcggcttcaaggcgacccgcctgaaggtggtgggcgaggggcgtgatgccgccgtgctgcttgagcaagccgacggcgccatgcggttcgaccgaatgagccccgtggacagcctgccttgcctgccacgcatgagcgggcgctacttcagcgccgagacggacaccgaagtccgcatgcatgccgacggtccggcgcacgtcgagatacgtggtccttacgggcgcagccttgtgcggctggaggcgctggacgccg

SEQ ID NO: 177184 - DNA, 659 bp, Arabidopsis thaliana landsberg
agaaagatttagtttctcctcgagcagcaaactttgctctgtgcaaagatatgcctttggacaaagccatcattgctccaatacaaaacaaagtcaccagcccctgccacgcttttacagtgacatctgaaccacaaggtaagattttagatatattacgaaactaataaaacacaaaaggttaaaaaggaaatctctcaagaaaaaaatgcaactcacaagctgcctcttgggatattttcccgaatgttaaagcattggtcaaccatttctccctgtaacataagataaacaagcaaatgattatcatggtagatctttcccagattgagcaatcctaactcacagagaaagcaaatgataaagaataagaactaaggactcaagtcgagattttctagctaaccagaaatattccaaaacctagacaaatactccaacaatgcaactaagagggaatgtacgaagctcaagctaatgctggcaagtacccggccatgaaggagatgagagagaaagcggaagcgatagagagcaagaatatgaatagaagaacggatttcgaaggacggatgctgttggcggtggaagcggcggcgagagcagggttccggtacacagagaacttggagggcttcggagaaggggacgaaccctga

SEQ ID NO: 177185 - DNA, 63 bp, Arabidopsis thaliana landsberg
atgagacccaagagggtcaatatcggtgataatagtaccttccacaacccagccccgtataga

SEQ ID NO: 177186 - DNA, 402 bp, Arabidopsis thaliana landsberg
atgatcactgggattccaaatcctaatgccagagcaggttataatcccgggccagcagaaacggttacaacggttatcgtggaggtacggaaaaatgttttgatttttatggttttgctaattgtttatcgaggttactctaacaaatgtctaagggctagtgcaatatgtaatatgtagtgttacttatgtgatatgtagtgttacttatgtgatacatttcgctttagtgttacttatttatacggctttagtcattctaacaattgagtcttcattcttttggtttgcagaaaaaggctattgaagaaagaagccgaagaactcggtcaaaacatatgcatttcaggtctgattattcagatatcttaccgggtaattctgattccatctcaccaaaat

SEQ ID NO: 177187 - DNA, 87 bp, Arabidopsis thaliana landsberg
atgaataagactaatttcggttcctctgcttccggtggcgatcccatgatcagattaacctttgtgcaggttctggagtcggaaaag

SEQ ID NO: 177188 - DNA, 91 bp, Arabidopsis thaliana landsberg
atgaaggaagaagcggtatttataaccaagaactcacataatagcaagcgaaatacaacacggaaacttaataaaaatcttcatatctttt

SEQ ID NO: 177189 - DNA, 155 bp, Arabidopsis thaliana landsberg
aggtggcacgtcgagagaggcagaagagaaagaagaggcagagatggattcggggatcaattgcagcaaccattactctaggaagcgcggcattggcatggtcttacattcctgcagccaaaccatcatctgaagtatctcttaaggatgaatga

SEQ ID NO: 177190 - DNA, 134 bp, Arabidopsis thaliana landsberg
atggttcatcgtgacataaaaaccactaatgtgcttctagacactgaccttaatgcaaagatatctgactttggattggctaggctccatgaagcagaacacactcacattagcactaaagtggcaggaaccat

SEQ ID NO: 177191 - DNA, 335 bp, Arabidopsis thaliana landsberg
aagttatcccagacccgattttgaaacgagacgatacaaatattctctacacttgcaagatatcgtatatcgatgcgattttagggacgacactgaaagtaccaacagtggatgggacagtagatttgaaagttccagctgggacacaacctagcacgacgcttgtgatggcgaaaaaaggagttccggtattgaacaagagtaatatgagaggagatcagttggtgagagtacaagtggagatacctaagagattgagcaaagaggagaaaaaacttattgaagagcttgctgatatgagcaagaacaagactgctaatagcaccagtagatga

SEQ ID NO: 177192 - DNA, 3327 bp, Arabidopsis thaliana landsberg
atggccaagtcaagcgccgacgatgaagagcttcggcgagcttgcgaggcggcaatcgaaggcaccaagcaatcgatcgtcatgtcgatacgtgtggccaagagtcgcggtgtttggggcaagtctggaaaattgggtcgacaaatggctaaacccagagttctcgctctttccggtgatagaaccttaccttcttcttctctcttttgattgttctgatttgattcatttcacttttaattacttcgaccttcttcgcgttgattggctagttctaagcatttagattcggtgattatggaatttagagaatctgttgaatactaaatcgatgaattctactgttcttggccattttatgactcgtgagagctcaattaggttttcctacgcaacaaaaaggattctggtagtgtctattaggtgaatcaatctagtgtactcgaggagaatctgtgttgttatgattcaagtggaagatatgtttactctgatccacgtttcaagcattctcgtccaattggttttaggttctttagagttgtaatcaactgagtatgctttttgttattctgctttctacagtcaaatcgaaaggtccacgaaagaaagcaattcttcgagtcatgaagtattcaagtggaggagttctggaggtaatcttcattttctttctccatatgagacacactttcacgagcaacgtacaagatttaacattttgatttggaagacatatgattgataaaaatcaatgcataccatggtagcagatttctcaagttcagattgactgatgatgctttataattctttgtttttccagcctgcaaaaatgtataaactcaagcatctgtcaaaggtggaagtcataactaatgacccaagtggatgcactttcacactggtaagattttaatgaagcttacagtacctaagattttaagaagaaatgtatgcatctggtgtaggagactttgtaattgtaattgattgtgtaattgtaaaatactgttcaatattttctatgtatcctctacttttgctgatgcaaagtcttttaggggtttgataatctcaggagtcaaagtgttgctcctccacagtggaccatgcgcaacactgatgacaggtactgcagttagcaacatcaatattaactattacaagatgtgaagtatacatgataagcgatgatatttttgttgacgtagttttcttcatttaatacatacctttctctgtcatgattgtaggaaccgacttttagtttgcatattgaacatatgcaaagacgtattaggccgccttccaaaagttgttggtatagatattgtcgagatggccctttgggcaaaggtgcagactataacttattctaactttaaactttggtctaagtctcttatcttcaaaagaagcttttgtatgtacttgttattgtcattttcccctcctttcagatatgtgagtgctttttcatataagaaagttatctaatttgtgtttctttgtttcataatattggtctaggataacactccagtagtcactactcaaagaagtacagaagatggggagcctgttgctgaatctgtaacagaaagcgacttgaaagttactgttgagaaagaactagtctctcaggccgaggaagaggatatggaggctctgttgggaacgtatgtctttttctgttcctttcatcatttggttagatcgttttagttcacgcatttacttctttctttttaaatgtaaaatcagtagatatcttacaaaggaggacttctttatctgctttgtgttattgttatatagaatgaagagagaagagtaaaattacagagtccgcctgaatcttaagcctgtgagactagatttctgactaacttagaattacttatatgtccggcatgattagtaatcgtagaatcacttccttgagtttttcctcttgattgtatttagttaaaactattggcattgtttctttgagaactagcttgctggggatatcgatagtgggagcagatatcttttccacttattttaccagaatattcagtcaactaatataaatgtcatatacagttatgtaatgggcattggtgaagctgaggcattttctgaaaggctgaagcgagagctccaagcgcttgaagcggcaaatgtacatgcaattcttgaaagcgaaccattagtagatgaggttattccttttctgctaataattattctttggattatcttggtattagacagttcatgggaagacaagtgtttaattttcttgtatatatatcttcatgcttttcaggttttgaatggactagaggcagcaacaaatatcgttgatgacatggatgaatggttaggaatattcaacattaaacttagacacatgagggaagacattgaatcggtaggactcttgacctataaatgatcttttttgctgtgttctattatgaggacaatgtcactgcagtgagaaattagttgttgtatgttgtcaataaactcttctcatggatatacattgctttactatttctttttggttcgtaatttctttcacagtacttctgaaatctgcaagagtaggagtgaaagagaaatttatttcaagtatatttgttgttggactgatcaaaccattatatgtcaacacatgttctcacttttttttttgtggttaccagatagaaactcgaaacaacaagttagagatgcagtctgtaaacaataaagctctcattgaggaacttgataaagttattgagagactgcgtgtgccttctgaggtttgttcactttttttgtgcttgctctcttctgtctaattggttcgcttatagaagtgttgttgattgcagtatgcagcatccctaacaggaggctcatttgatgaagcagacatgctccagaatattgaggcttgcgagtggttagccaaagctttaagtggtcttgaagtgcccaacttagacccgatctatgctaatatgcgagctgtatgcctaatcacttagatctttctaattcggtatctctagttattattctaattttatagtaaatcggccttgcttattacattacgttttgggaatagaaaaatacatttataattgtctgtaacattcattaactattgtctacttttttgtaatactcatgctgtattttcttcaggtaaaagagaaacgagcagaactagaaaaattaaaagctacttttgtaaggagagcttcagagttcttgagagactactttgctagtctggtagatttcaagttcagtgacaaaagctacttttctcag

SEQ ID NO: 177193 - DNA, 536 bp, Arabidopsis thaliana landsberg
atgattggacccgaggttagttactttacaaaccagaacatggttgtttgatttttccgagcttttttgttatttatcatttatttgactggaatcatctatatggtggatgtccttgcagaaggagaactgtatcaccctccaggatctgaaaggatcgaaactttcagcaaacgttttcaatatactcttcaaccttaataagttcatggcatttgaaacacgtgacccatttctcattcgccaggtaagtttggcttaccagtggagtttttatagcactcaagagggaaaaaaataacaaagaatatgacttcttttaactgctaaaggcagtttgtagtagttcggattgaggcaattagaacaagtataattctctttcattgctgtaggaacgggaagatccaaatttgacagagtgggatcgatttgctcagagagagtatgcgagattgtcaatggaggaagatgtagatgaagtctcaaatgggagtgcagatgtctgggatgaaccactcgaacctccattttag

SEQ ID NO: 177194 - DNA, 400 bp, Arabidopsis thaliana landsberg
atggaccgcaacctgtcgtacctgggcctggtgaagaccctgtacggttatccgatcgacggcgtggtgctgaccatcggctgcgacaagaccaccccggcctgtctgatggccgccgccaccgtgaacatcccggccatcgccctgtcggtgggcccgatgctgaacggctggcacaagggccagcgcaccggctcgggcaccatcgtctggaaggcccgcgagatgctggcggccggcgagatcgaccgcgccggcttcatcaagctggtggccagctccgcgccctcgaccggctattgcaacaccatgggcacggccacgaccatgaactcgctgacaaaggcgctgggaatgtcgctgaccggctcggcggcgattcccgccccgtaccgcgacc

SEQ ID NO: 177195 - DNA, 2754 bp, Arabidopsis thaliana landsberg
atggacgattgtcgattcgagacgagtgagttgcaagcttcggtaatgatatcgactcctttatttaccgattcttggagttcatgcaacaccgcaaattgcaacgggagtataaagatccatgacatcgccgggattacatacgttgctataccggcggtatcgatgattcagttggggaatcttgtgggcttgccagtcaccggagatgttcttttccccggcttatcctccgatgaacctctacctatggtcgacgctgccatactcaaactctttcttcagttaaaggtttgttttctcttcctctgtttttttttctttctattggatgcaatttaacctatttattatcttcaaggcatgtggatatttgaatttcaattaataatacctcgagagaaaaatacaaaaatcattaaatgctaatatgggaaattatttcacaaaggatttttaaaaaaaacaaaattctatcataagttttattcgtttggatttgcgaaaacgaattttacctattaaagttactattttttttacgtattttagtactttttagtagaactgatgatcattactattttttatttaaatatctctgccctctgaattttgatgaattataatccaaatggaggttctttttgtccctttaaaagattattataaactatcaccaccacctaccccaataggcaatagacaatagataataaataaaaattattttcttgtaagaaattctaaaaagattcgtggacacaattattccaaatccaccatttggaatatgtcattgtcgcgacctttggatatcataagcaagtcaattgaaagtttggtttgtatgccatcacgtccgtccgcccaagtgatttaaaaaatttactaattagtgagtgaaacgtcattggtatttttgacaccaaaaaaaacaaaaaatgttaatggaattggtagctttacgctttatgctttaacacacctcggcgaagtttataaatgtgcgctcaaaaagtttttaacccatgattattgtgtcaccatcatgtattttattccctttttcgtcgaatactttttgtttttgttttgtctctaaggatatgaaaatcttgaacaaaaacaagttcctattggttttgatgagtagaaaaaacaagaagtgaccattaatgtagatataagttgtaaaaatggtaagtctagagaggtgtcttaactgatttttattcaaatttggttaaaccaagtaattggcaaatttagtctctaaatcagtttacattattagaggaaattgtacactcagaaggaaggtaatctataatcagttttgttcttgttagtcaaccaatttacagtaacgtcgactgcattaacgtgcagatcaaggaaggattggaattggaattgttaggtaaaaagctggtggtgataaccggccattcaaccggcggcgcattggccgctttcaccgcactttggcttctatctcaatcttctccgccgtcattccgcgtcttttgtatcacctttggctctcctctgctcggaaaccaatctctctccacctcaatttcacgatcacgtttagcacacaacttctgccacgtggtctccatccacgacctcgttcctagaagcagcaatgaacaattctggccctttggaacttacttgttctgttccgacaaaggaggtgtctgtctagacaacgctggttctgttcgtctgatgtttaatatcctcaacaccacagcaactcaaaacaccgaggaacatcagaggtacggacactatgtgttcacactttcacacatgtttcttaaatctagaagctttcttggtgggagtatccccgacaatagctaccaagctggtgttgcgttagccgttgaagctctaggtttctctaacgatgacacaagtggcgttttagtcaaagaatgtatagaaacagctacaagaattgttcgggctcctattctgaggtcagctgagttagccaatgagcttgctagtgtcttgccagcaagactcgagattcaatggtacaaagatcgttgcgatgcatcagaagagcagctaggttactacgatttcttcaaacgatattcgttgaagagagactttaaagtgaacatgagtcgcataagactagctaagttttgggacacagtgattaaaatggtggagacgaatgagttaccttttgattttcatttaggaaagaaatggatttacgcatctcaattttatcaactcttagccgagccactcgacattgcgaatttctacaaaaacagagatataaagactggcgggcattacttggaggggaatagacctaaaaggtatgaggtgattgataaatggcagaaaggagttaaagtgcctgaggagtgtgtgagaagcagatacgcgagcacaacgcaagatacttgcttttgggctaagcttgagcaagcaaaagagtggttggatgaggcgagaaaagagagtagtgatccccagaggagatctttgttacgggaaaagattgttccattcgagagttatgcgaatacattggtgacgaagaaggaggtttctttggatgttaaagcgaagaactcgagttatagtgtgtgggaggcgaatctgaaagagttcaagtgcaaaatgggttatgaaaatgaaattgagatggttgttgatgagagtacgcaatggagacttagtaggcctaatagcaaatcgaatgtttga

SEQ ID NO: 177196 - DNA, 65 bp, Arabidopsis thaliana landsberg
aacttcgtgaagaagaacacaccccacaagcaagcaaccctcgcgttttggctttggaaaactga

SEQ ID NO: 177197 - DNA, 901 bp, Arabidopsis thaliana landsberg
gctttggtcagtacattggagaagaaaatcgattcattagacagaaagcacgacgtaacaagctcaaacatctcagatcaattgaaagagagtgcttcatctgattatgagatgttgagtaatcttgcagcagagaatgaacgtctgaaggtaaagttacagtgacatagctccactcctgattctttttaagttttaggtttgtttttcccattgttctgagtatgactcttctcaggcacttgtgagttcattagagaatgaaaattatgaaaacgatggaaatgattcaccaaacgagcaaaaggaaggaccacagatgctcaaagaagagatattagcagaagatttttcgattgatgatgaaatgaccaacaaacttgctgctgaaaacaaagatttatatgttagttttccacaaaatgtattcttctccattaaaagtttgtgcgttatgtctctcttaaatttattgaaattctacaggatctggtagatttgttggaaaggaaaatagacgaaacagagaagaagtatgaggaagcaagtaaactttgtgaagagaggcttaagcaggttgtggacacagagaagaagtatgaggaagcaagtagactttgtgaagagaggcttaagcaggttgtggacacagagacaaaactaatcgagttaaaaacatctatgcaaaggttatcgatttgcattctctattttcccaaagtttcaatgtttcaatcttttctttgctatttattttcattttcaacagtatctatgtatgcattacttatttactcctaaatttaggctagaggaaaaggtatctgacatggaagcagaagacaaaattcttcggcagcaagcgctacgtaattcagcttcccggaaaatgtcacctcag

SEQ ID NO: 177198 - DNA, 1407 bp, Arabidopsis thaliana landsberg
atgagccctgacgctgagattatctcaacgagattcacaaagagtattatcaagtcttctgcagcattgtcctatattgaagctcaggctcggatggatgacaggtacattctattttaccatagagttagagggtcattggcttgtttgcttacctttgctactacaataaattatttgattttatgctctctagtcatttgacagtgagaaaaatggtagcaaggattgtcaaaaaattattgtagaaaatttaatctttctaatttcatgaatttttatcccattattttgtattgtagagttgtttcagattccctcttttactttatgccgaagattgacaaatgtaattaatttcttgtagccgattgacagactccctgactacagatctgaggaatatgaataccttggcaaaggtttgagacaccttcctctcacaagttgccatatgttccagaaatcatagaaagaacacaaccattttgacctgttttttgctcttgaaacctgtagataatgaggcaaaggcgtatcgataggggagccttaactcttgcttctgcggaagtcaaatttgatattgatccggagaatcatgatcctcttaacattggtatgttatctgagcaaaatttgtttcttcttgatgaatacgaacgatgttttcttagtctttttcacccaaacacccatgaaatacaaccacctctatccttctgaaagatgtattcaatttattcatctgtttttcatttgtcatcatgactctgttttgcgcaggtatgtatcagattctcgaagcaaaccaaatggttgaggaattcatgcttgctgcaaatgtttccgtcgctggacagatcctgaaactattcccttcttgttcactattaaggtaaagtttgtgatagttcttttcttcttgaaggtagctttttcttacatcggtggtctgtttctcaaagatagcaatcattctgtatttgttgatgggttcctctgcgtaaaacggattttattttttctgagatgtgacaaattagctttcaactgttgctaaagatgcatatatacactggttcatgaattgtttagtcttctcgtgaaatttggccataggtggttagattatataattttgtgcatatttagcataatgaatattatgggatcccaagtagctgttgaggatgtgtttagtttttacaggcaattattgaatttctgttcacttttattatcaatagtagttcatcatatctctggtttcgttcttcatgcaggcgtcatcctactccaacaagagaaatgcttgaaccactactgcgtactgctgcagctattgggcttaccttagatgtctcttcatctaaagctttggctgattcactggaccgagctgtg

SEQ ID NO: 177199 - DNA, 485 bp, Arabidopsis thaliana landsberg
atggtcgtaaggacaagcacggattccagggtttaactggattttctgaacccgagacacgtgcggtgagggactacattgagcactttatgaagggctcaggacgagtcgccgtgctgcatgttcgatgctgtggtggaacaatctctcctccacagctgtttggtgaacgagcgaaggactcttcagccatctcagcgattacacaaggctctggagtcttggcgggtaatattagaagcgcaggagagggcaaggactatcagattttaaagcgatcggacgagtttagtgcagacaacactggacagttgattgactggactgcttctcgcggtgttgaccactcatacgcgctggagatcaaggcattgagtgtggccacctataatgatcggtaccaaatcaatcctgaacctttcatggcgctgtgcaaagagcttgaagtcgcaattcccaccactgcacagttgcttttgcaacag

SEQ ID NO: 177200 - DNA, 318 bp, Arabidopsis thaliana landsberg
ccggggcactgcgcggcgggccggatgcggtcaggctcgggatcgcatggccgggggagcacgccgacgacctcgccgagatcgactgcgttaccgacaccgcccccggcgcgccggctgtgcgcgtggagtccctggccatcgacgacgtcaccgcgctggccgacaggttccccgggcgggaccccgtcgaggtcctccggcaggcgaaggttaccctgcacgacgaggacggtgccgtcagcccgtcgatcccgctgctgaagtggatcgccttcgaggcccgcgaccgcgaccggctgtacttcttcgccgacg

SEQ ID NO: 177201 - DNA, 437 bp, Arabidopsis thaliana landsberg
agctcttggaaagtctcaaaaagtcggataattttagtcgagctgagaaatcaaggttgagaagttcccgtgacgatgcccttcgcactgctcgttccgaacggagccgctttaaagatgacattcctctttataaagccaggatcgatcggttacggaagcatatctttgacaaacgcgtttcggacgaacctcttttcatgcaatatcaggccgcgggttctcgaaaactcttgaagaagttgatcacaaacggtttggcagtcctcggagagactatgtgcgagcttaaggttgacaaaaagaagtggggcaaagtggtcgatgaccttgcgattaccgatcttcttgacgatgacctcgtggcctttacagaggttgaggatgaggcagcgatgacgacggctgagggcgaagcgaggattggtggtacttag

SEQ ID NO: 177202 - DNA, 103 bp, Arabidopsis thaliana landsberg
aggctggagaaaaaaggaggaaaatggattgtcacggaaattgaaattcgttccatttggaagatggcggtggaacgagagaacgttgattcgtttatgtata

SEQ ID NO: 177203 - DNA, 82 bp, Arabidopsis thaliana landsberg
atggggagccctttgaaatacgcccggagccccctgatgtcgaggctcgtcgttagacacgtgaacagacccgatcacggca

SEQ ID NO: 177204 - DNA, 45 bp, Arabidopsis thaliana landsberg
atgcctcgacaattatatttacgatatcacgtgatggtcaaagag

SEQ ID NO: 177205 - DNA, 409 bp, Arabidopsis thaliana landsberg
cgacctgttcgacaccgtcttcggcgccctcgccaccgaactcgtcaaggcggttccctttgatcccgaagatctgcccgcctacgcgggcgccctcgtcgactactacatcgcccgtcccgaggtcgtccggctcaccgcctggcaccagctcgagcccggcgacaggccactgccggaggcggtcatcaagaccgagcgagagaagatcgccgcgatcgagggggcccaggccgccggacgagtcaccagaacctatccggccgccgaccttctcaccatgatcctgagcctcgcccatatggccaccgacgcgggtccggtccggcccgagcacggcggcagggctcccgcgagcgaacacaagcgcatgattatcgcggcggtggccgccatcctggccagctaa

SEQ ID NO: 177206 - DNA, 170 bp, Arabidopsis thaliana landsberg
ggattaggccgagctgtacttacaagagtgatggctttagttggtcttatataaaatctggtaattatactgtgaaatccgattattggaccacaagagacctctctcgtcctatttgtgaccccctttttcagggacctagtgtttcggcgcttcaggcacaagtatga

SEQ ID NO: 177207 - DNA, 442 bp, Arabidopsis thaliana landsberg
agtaaaaggaatctctggatttaagattgaggaagaagaagaagaagaagaagaagaagaaagagtggatgtgagtgaagctgagcataaagaggaaacagagaagggggaactaaaggatgattacttagagaagagtcaccagattgatgaacgtatagaagaagaaaaaggattggctgattcaaataaagagagtgtggacagtagcttaagaaagcctccggacattgaaggaagagaatgtcatgaacagacaagacatgaggaacaagagaataataaacaactggttcaagcagagagtgatgatagtgatgattttggatccagagcatttgaagagattgaagaacaagaatctgatgttttagatagaacaagtacaagtggagcaatggaaaaggaaatgactgatgatgttggtgatggcttgagaaag

SEQ ID NO: 177208 - DNA, 117 bp, Arabidopsis thaliana landsberg
ggaaataaaaacacaagaagaaaggttgttgatcaagaaagagaaccgtattgtaaagttttactcacgaagaaggtcaaaatgcatgaggttaacatgaagtatgaaccctccaag

SEQ ID NO: 177209 - DNA, 173 bp, Arabidopsis thaliana landsberg
tcttaactgttacactttcgagtgtcagatctcgtctttcttctccaactcgtctatcttcttctccgattaatctaatctctcgtcggagatttagaaatgagcacacctacaacttccggttcggcggcgaaaccgacgagaccagcacggtcgtcgagtttagcaactag

SEQ ID NO: 177210 - DNA, 1164 bp, Arabidopsis thaliana landsberg
atgttgcatatgtacggacaagacatcccgatccacgactcggacgccgaagcagccaataaaaggcaaaaaaactttttgctaaggtacgagtaatatgcctcttacacgttatggtgttatagtgtttgtttttacctttaatgatgtgttttagtgtttcacctgtttccacaactaaagtttaaaaagttcaatttacgaaacacatttacaagaaaataattattctggtccaagggaaagaaatatgaaaatcaaccttttgattagtcaatacacgtgcgcataatcaaagtcaaagatattctccaacattgccttgcctgtatgtgagcccaccacgacctatagatttcctcttattcatttgagacgtaaatgtttggtaagaaatccagaaaatacgatgttaagatttcttacattataaaataaaataaagatttattaaattatgttttaagatgtgtgcagaaataagaaaagaatttatcaccatcatttcaattaatgtacatatgtagggttagacatatgggtaatccattcgggttagaataaaaccagtttagattcagctttaatgggtattgaatttattatttaatagagtatttctaattatttggtctcaattcaggtctggtctagtcgggttcggatcggtttggatacaaaattttaggccctaaaaataccaaaaaaatagaaacgggtattttgtatgcaaatagcggatacccaaacaaaaaaaactttaaaaatttgtaaattttaaataatttaattatatttgaatatattttctatacttttgacaaacaataacaaataatttttaaatatttttagttgttttggatatttaggtctaaaactaatttacatatttagatttataagtataatcttagacaattagattatagtaagattaataataataaatattttggacctaaatttatgttcgggttttcgggtatcctatttgggtaacgggttattacggaccgactcaatacccacgggtgcactgaaactgtatccaatgaaataatttaaattgtacctaagacacgtaatccgtcccaacaccgatttttacggaacggttatcacattggatatcggatcaagtgtttctgcccaaccctatat

SEQ ID NO: 177211 - DNA, 1168 bp, Arabidopsis thaliana landsberg
ctattatgcaagtacgaaccgaagtccgtcttgaaatttctggaaacctttgacagctacagggtggaacactgtcttcgcctctgccaggaatatggaattgtcgatgcagcagcatttctcttggaaagggtgggtgatgcaggaagtgctttgtcccttacactctctggactcaatgaaaaatatgtcgagcttgaaattgcagtggaatgcctaatgtcagaaatgaaattgggtgctagcgaaggagccagcttggaacacttcagtagtcccttaaagttgaaagaggtccgtccttatttatgacattaagaaaaggggctctccatggctctttcaatgctgttggggatccttcaggtacatgacatacaaggtgttttgcaagcctgtataggattgtgtcagcgcaacactcctcgtcttaatccggaggagtcagagatactctggtttcgcttccttgacacgtaagcctgatcatacacctgatcgctacttaccgatttcttatcatccttataacacactcgtcatagttactcttaaacatatgcaattaatatcatgttggaataaacaagcctgagcgagcgctcgtagctattaaggcaatgatgatcatagttgtctattcgtgctttatgcagtttctgtgaacctttgatggaatcataccgggaaccgaagaacaccgatggaataaacaaaggttctttaggtgttaaatcattggaacgtcatgtcaatgaatcagatgttgcaattaagtggaggattccaagatctgatacggcagcgacacacatcctgagaaagctcatatctcaatttatcaaagagattgttgaaggaatgataggatatgttcgtcttccaacaatcatgacaaaactcctttctgacaatggtactcaagagtttggtgattttaaacttacaatactgggaatgcttggaacatatggcttcgaacggagaatactagtatgttcctgcgtggctgcttctctctaatcatgtacttttgtgcatcggttgactgatctctcttcaaatgttctaaaacctttttttcccctggacaggatactgcaaagtctttaatcgaagatgatacattctactccatgaacttacttaagaaaggtgcttctcacgg

SEQ ID NO: 177212 - DNA, 770 bp, Arabidopsis thaliana landsberg
ctgtctcttgcttgcccatcaagattcagctgagcccaaaacctacaaaaactcactcccatgaaggatccacagagggtcctttgatttataccataaaggcagtttttgtggttctcatcatcaaagcctacgaatacagtaccaaattgcctgagaaagtcgtgctgactctctacgcgatccacatatatttcgcccttgagatcatccttgccgccacagctgctgcggttcgagccatgtcggatcttgagctcgagccacagttcaacaagccgtacctagcgacatcacttcaagatttctgggggagacgatggaacctgatggtcactggaatcttacggccaaccgtgtacgaaccgtcacttcaactgttctcggttttgggcccgaactattcccagattcttgcagctttcgggacgtttgttgtctctgggataatgcacgagctcatcttcttctacatgggacggttgaggccagactggaagatgatgtggttcttcctcataaatggattttgcacgaccgtggagatcgccatcaagaaaaccattaacggtaggtggagattcccgaaagcaatcagtcaggttttgacactcacttttgtgatggtgacggcattgtggctgttcttgcccgaatttaatcggtgcaacatagttgagaaggctcttgatgagtacgcagccataggcgcatttgcagtcgaggtcaggaggaaactgactgcatatcttttttaccctgccgtgtga

SEQ ID NO: 177213 - DNA, 96 bp, Arabidopsis thaliana landsberg
gtcacatcattcatacaccgtatggttgatacccttggatccgctgtgttcccttatcttcccaaggctttggaacagctacttgctgacagtgag

SEQ ID NO: 177214 - DNA, 486 bp, Arabidopsis thaliana landsberg
atgtccggaaaggaatctagtcatggcatcagcgccactgacatctcagcagcggtaggccatcctcaacggggccagcatcttcgaagaaggcgtcaacgcgatgaagtcggtgtacagcgaggtgttcgcctcgagtacccagctgaaggggcaggccatggtctccacggccggcagccagttctccaacgccatcaccgagtggaccgaggacttcaacaacatcacctctttgctgcaggcgatgcacgatcagctgatcgacaccacgaacacgaccacgtccaccaaccagggcaacaccgagatcgccacggcgctctcctacaccccgccgaacttcagctaagaccgagcgtcagcagctaagggagatatccgcgatgagcatgaacgatggcgacatctacgtcaactacagcggtgtcaacgacgtcgaggacgcgctgaacgacgccacccaggcggtcggcaagatcctcg

SEQ ID NO: 177215 - DNA, 2144 bp, Arabidopsis thaliana landsberg
atgaccctacttgagctctccaagcgtactggtgagtcagtggcggttttgcagagcattctcattaatgttggggaagcttttagttcagaattcgacacaatcagtgttgatgtcgccgagcttcttgctatggtaaggtgattctacctctagtccatgataatagatttcacaggtcaattaactcatcctttgcaggaaatcgggatcaacgtaaggaggcaacattctacagaaggatctgagattcttccacggcctccagttgtaaccgtaatgggccatgtcgatcatggaaaaacctcgttgctcgatgctttaagaaacacctctgttgcagcaagagaagctggtggaatcactcagcacgtgggtgctttcgtggtaggcatgccggattctggaacttcaatcacattcctcgacacacctggccatgccgctttcagcgagatgcgagctcggggagctgctgtgactgatatagtcgtcttggtggttgctgctgatgatggggtaatgccgcagacactcgaggctattgcgcacgctagatcagcaaatgttccgattgtggttgcgatcaataaatgcgataaacctggagctaatccggaaaaagttaagtaccagctcacgtctgaggggatagagcttgaggatattggaggaactgttcaggtgaaagataatccggtttggttcggtttaatatggtttttgtttcaatttggacttggtttgttaatatgatttgacttgttgtttcaggctgttgaggtatctgcagcgaagagtacaggactagacaaattagaagaagctctgcttctccaagctgttgatatggaccttaaagcacgtgtggatggaccagctcaagcatatgtggtggaggctcggcttgacaaaggccgtggaccattagccaccattattgtaaaagccggaactttggttaggggtcagcatgtagtcattgggtgtcagtggggaagactcagggctattcgggacatgatcggtaagacaacagaccgagcaacaccggcgatgcctgttgagattgaagggcttaaaggtcttccaatggctggcgacgatgtaattgtggtggaatcagaggaacgtgcaagaatgctgagcgaagggaggaaaagaaaatatgagaaagatcggttgttgaaagcagaggaagcgagattagaggaagcagcagcgagattggaaacagagtctgaagaagggtttgttcgggttgaattacctatagtagtgaaatcagatgtgcaagggactgcacaggctgttgctgatgcgttaagaacattaaatagcccacaggtacgtaaaacggaaatattggtttatggtgattgtggcttattgttttgtgattttgcctattgtttatattgttgataggtgtctgtgaacattgttcatagcggagtgggagcaatatctcactctgatttggacttggcacaagcttgcggtgcgtgtattgttgggtttaacgttaagggtggaagtactggtaatctatctgcggctcaaggcagcgtcaaggtatgccgttctgttataaagaattcatacgtatttagctttgataatttccattgccaacttgtgcgttggcgtccacattcatatcatggagatagcgtttaacattgtaaccgatggtaatctcttattaggtattccatcaccgtgtgatataccatttactcgaagacatcgggaacttgatcgtagaaaaagcaccaggagtttcggagatggaggtgtctggtgaggccgaggtacttagcatattcaagatcttaggaaagagaagaaccgaagaagatggagtaaacatcgcaggttgcaaagtgatggatggtcgggtatgtagaagcggactcatgaggctgttacgaagcggagaagtggtcttcgaaggctcgtgtgcgtcgctgaaacgggagaaacaagacgtggaacaggtcgggaaagggaacgagtgtgggcttgtgtttggagattggaatgattttagagtgggagatgtgattcaatgcatggaaccagtcattagaaaacctaaattcatatcctctgagagtggagctgtgagaattgaatgctga

SEQ ID NO: 177216 - DNA, 585 bp, Arabidopsis thaliana landsberg
gtagaagaaagatttgagcagtactgcaatcaactggagcaagtgatttcatcatttgaggaaatagcaggagaaggatcatctaaagtgtacaccggtttagctctccaagccatgactcgacatttcggtagtcttgaagaagcaataatctctcagctaaactctgttcgtcggagattcatcatttctcatcaagatgttcccaagatcatcagctctggcttatcacagctcagcttgttcgatgggaacaccacttcatcatcacttcagcgacttggtttggttcaaggaccacagagacatgcttggaaacccatcagaggcttgcctgagacttccgttgcaattctccgagcttggctctttcaacatttcttgcacccgtcagttttcttgttgctcaagtgtaataacactagtgatgaatcaaagttaaaatgttggagaaataacattagtttgattgctgtaatgaaaacagttatccgaatgaagcagagaagctggtgttggcgtctcaaacaggactttcgaagaaccaagtacactcctctgaatctaattctgctttttttctga

SEQ ID NO: 177217 - DNA, 302 bp, Arabidopsis thaliana landsberg
ccttgcgaggccggggggtgtgggtcaagcatggctacgggcagagcgccgaggctatcgactacatcaagaaattgggtgtggagcgcgtgctggtatgtgggctgcagaccgaaacctgtgtgctggccgccggtttcgccctgttcgatgcggggctgatgcccaccttggacaccgacatgacggttggctcttcgctcgacaggtcgggcaagctgggcatcgacctgtggaagcatcactttcgccaggtcaccacctcggccgaggtgctcgccgaagtggctacaccaggctag

SEQ ID NO: 177218 - DNA, 268 bp, Arabidopsis thaliana landsberg
atgtctaaatccgtcctcgacgaacttaaacgtaagatttgttcagatttgattattggtgttacttgtttttttttgtagtctcgtgtctttgttctctagatcttaggcttgtgtttatttcaataatttagttgttttctttcttgtttcagtgagaaagcgagaaaccgactcatcaaccttgtttactgcaatctcgcttaaagctggaataagaaagtttgagatcgccgtggacgagaccgtcatcgtccgagcctcatag

SEQ ID NO: 177219 - DNA, 629 bp, Arabidopsis thaliana landsberg
gtaagagagatgcggaagaggatttggacatgcaagttacgaagaagcagaagaaagagttgattgatgttgttcagaaggagaaagctgagaaaacggtacctaagaaggtagagagtagcagttctgacgcttctgattctgatgaagaggagaaggtgtagcttcaatctcatagtttaattagtttagagtaatatgacaaagtttagttattttgagtttaagattgtgtacaatgttctgtctatactcatcttgttcctctaattctcctttttagactaaggaagttgcaaaggaaactccatctaagctgaaggatgagtcttcttctgaagaggaggatgattcttcttcagatgaggaaattgcgcctgcgaagaagcaaccagaacctattaagaaagacaaggtagagagcagctcatctgatgatgattcttcttcagacgaggtattagttgcttctgcatcactacacgttatctcaagcgtagaggaatctcgtaagcttactttgcagtttgcttgttaggaaactgtccctgtgaagaagcaaccagcagtccttgagaaggttaaggcagagagcagttcatccgacgatggatcttctttcggacgag

SEQ ID NO: 177220 - DNA, 162 bp, Arabidopsis thaliana landsberg
aatgttcaagactatgaagggattatcgagttgtctaagacaaacatcaagaccaagcagcttggagctcagctgattccacgctactttaaattcttcaccagtctcgccaatgaagcttttgatgcgtacatggatctaatcggtgaagtggatgtcggg

SEQ ID NO: 177221 - DNA, 113 bp, Arabidopsis thaliana landsberg
atgtgtcacgggcacgaggacaaaaggatcgtggtaacagctgagcgaagacacgacacgtatcataatcgtgaatgcaaaggagtttcaaatggcctatgcatggcctatag

SEQ ID NO: 177222 - DNA, 52 bp, Arabidopsis thaliana landsberg
atgagacatgggcaggaacatatgcttggtgctagttcctatccaaactctc

SEQ ID NO: 177223 - DNA, 114 bp, Arabidopsis thaliana landsberg
gaaagtgtagaggctacagctgaagtttcgaagaccttcaatgagaagattagaaagtattgtgatatgacacttctttcttgtgcttatgctggaactggaaatgtcctaaag

SEQ ID NO: 177224 - DNA, 96 bp, Arabidopsis thaliana landsberg
atggctccaatgcacgttaagactgctcgtgaagtccctgagtatgaaataaatcctagtgagcttgatttcactcaaagcaaagagataacaaag

SEQ ID NO: 177225 - DNA, 83 bp, Arabidopsis thaliana landsberg
atgaccgatgcagtgttcgctgagatatatgatgtcaggaccatcgaacgactcatgtggttgcggataccgttaaaacaaag

SEQ ID NO: 177226 - DNA, 751 bp, Arabidopsis thaliana landsberg
atgcctccattaccgtcctccacggcgacttcgtcttcgagacatcttcgatcgccggaaagtatcgcgaaatttgcagggagagcaatatttcctgctttacaggggaaatcgtgtccgatatgcctcgaaaatctaaccgagcgaagatccgccgccgtgatcacggtgtgcaagcacggatactgccttgcttgtattcggaagtggagcagcttcaagaggaattgtcctctttgtaacactcgttttgattcctggtttatcgttagtgattttgcttctagaaaataccataaggagcaattaccaattcttcgtgatcgtgagactttaacttatcatcggaataatccttccgatcgccggaggttatctctctctctaagatcctctctatgaagttaaaaatcacttctttattatattcacttggttattatttcattaggataattcaaaggtcgagggatgttttggaaaactgtagctcaagatcaaggccattgccatggcggagatcatttggacgaccaggttcagttcctgattctgttatcttccagcgaaagcttcagtggcgagctaggttggtttactattgattctaactctatagcttcatttgcaatctcctttttcgaagtgttagattagttcgccgttgtttctaactagtgttggctctaaatacagcatatacactaagcaattacgagctgttcgattacattcaaggcgcttggaacta

SEQ ID NO: 177227 - DNA, 223 bp, Arabidopsis thaliana landsberg
atgataagcagcaaccacactgagtctatatttgctgctttcaaactggataagaaaccagttaagacaaatccacaagtaaactccctcttcctctaattgaatgttattcttgtataatcagatctccatttctccaagtaaaatggaatatttaacaggaaaagagatgaattcagagattttgtcttgcacagctgcaatgcaacggcacgtgtggtga

SEQ ID NO: 177228 - DNA, 168 bp, Arabidopsis thaliana landsberg
ggtgaagaaaagctatatggtctcccaatcaaaaagaaaaacgacatttgcacaattatgtatacgagtggaaccactggtgacccaaagggagtgatgatgtctaacgaaagcattgtgtctctaatcgctggagtgatccgtcttctgaaaagtgctaacgaggct

SEQ ID NO: 177229 - DNA, 384 bp, Arabidopsis thaliana landsberg
gagcttgaggaagctattcaaagtagacccagctgattacatgttatcgatctgtgggaatgatgcccttcgagaactatcatcccctggaaaaagtgggagttttttttatttaacaaacgatgatcgttacatgataaaaacaatgaagaagtcggaaacaaaagtgagttcttttcaagttaccggttagagagtgttggctggctattaccaaaacttttcagattgcaattactgagcgtcttttttgtcttcttaatgtaggtgcttctggggatgcttgcagcatattataaccatgttcgagcatttgagaactctttggtaatcagattctttggtctacactgtgtgaaattgaatggaccaacccaaaagaag

SEQ ID NO: 177230 - DNA, 275 bp, Arabidopsis thaliana landsberg
cgccagctgtgtgctcgccaccacgtcgttgtccccgccgtctactgtcgtgccacgtcatcggtggagctcgccagcggacgcttcgtcgcgtgcttgtccatcacacgcacagcggtatcgtcgtcgtcgtctcctcgccggccatactcgaccccgcaactccttcacgtcgtcgatttccacgacccacagcctctcactgtgcttcgtcgcccacctcgctactcacgcttcattttctccaagtttgtcgccagccatggtagacctag

SEQ ID NO: 177231 - DNA, 109 bp, Arabidopsis thaliana landsberg
atgagaaaactgaatgtctcggttataagatcggataaccaagccttcatatcatgtatcataccagcatcgacttctccggatagtcctaaggccgtctgtacgctca

SEQ ID NO: 177232 - DNA, 492 bp, Arabidopsis thaliana landsberg
  unsure (1)..(492): unsure at all n locations
ggcggggcagacgttgccacactgattcgcaacgccgacgcagccatgtaccgctccaaggccaagggccgcaaccgcgtcgaagcctacaccctcgacctcaccgcccaggccagcgaacgcatcgccctggagcacgaactgcgccgcgccatcgagcgnnnnnnnnnnnnnnnnnnnnnnnagcccaagctcagcctcaagacccagagcctggtcggcgccgaagcgctgatccgctggagccacccgacctttggtgaagtgccgccagagcacttcatccacctggcggaagagaacggcaccatcctccagatcggcgactgggtactggaacaggcctgccggcagatgcaggcctggaagatgcactacgaccccttcggcccactgtcgataaacctcgccggcgcccagttacgccacccncaccttgcccggcgcatcgaacagttgctgaagcactaccagattaaggccgcgacctga

SEQ ID NO: 177233 - DNA, 1399 bp, Arabidopsis thaliana landsberg
gaaaccagcttgatgtagctctaacttctcgatctctcgcggcaacaacttcatttctccacctcccaatccaatcttacccacgtctccggcaaacagagcaacgattccgttaccgagaagtcgtactggtaagagactaaatttgaagttgaaggagaagagacgttgaccatcggtgattcgcagactcgcacagtacaatctatctaatggcttacctcatgcatgcgtcatagattctgtttccttttttattttattttaaaaaagattcccaacgtttggttttaaaaatgttttcaaaaaacccatttttggcaacccagtttcgaatcttctccagtggacttcaaaaaaaaaaagcgtaaccgctcgttctaaaaaatgctcagctgaaatcaagactaaccgctcgcttacccttgactaacgtataaaatcctgaaaccgaactaattttctcaaagtttctcgatcattttccgggaaaatttacagacgagaaaataaaacatttggaatctgctacattcctcataaatggtatgcaattctctttgttcttactctttgataacctcaaataatctggacatgtttggttattttttgtgattttggattttgacaggagcaaccggcgagaaggaggccgcgacgtcgtcctcttgagacttgtggtggtgtaatactctccatggctcgtgttctttacacaagaagccagactctgatgaagaagaagaaaaatctatcctcttggctattgaggaaactctttgaattcgttatcttctttgtttcgatgacaagtccgtttcatcgtcattttctcgcggttctctctgtagctgacgatcatatactcgcgttacaagacgcaatcgagacttacttcccttcttcaagcaatgtgtttgttaagatctttgatttgttgatcattgtagagactctgccagagaaacttgatggagtgctcaagaaacttccgagtttgatgagccgagtggcgtggctagattggttgttggttcatgttatttcttggcttggtttgttggtgaacgtgttgggacgttggagagataagaacaaagggacgaatgagaaagagatcacagttgataggagctttagcagatcagggtcagtttcagaagaggaggaagagaagaggaatttggggacggagaagaaagtgtcgtacaaggaggcattacagagaggaagtagtggagaagatggcggtggaagcactggtcgaagcagcagtagccgcagagatccgatcttggaactctttgagaccggatggattcagaatcccatcaaacgaagtagtagaagcgcggattcgctcaccttctcgcgttctgaatcctattcgacctga

SEQ ID NO: 177234 - DNA, 907 bp, Arabidopsis thaliana landsberg
atgacgagcgatcgattttggcgcggcggtgaccgcgttgaggtggaacgactagtttctggcgcgacggcatattttccggcgagtgttgttagcgcgccttcggtgagaaagaaactcgtttgggtggagcatgaatccctaactgttggaggttccgtttccgtacgtatgaaggagtacgtcactcccacgcgcctccgtccatctccaccgcgtgaactcaacagacggttcaaagctgacgatgaggtcgatgtcttcagagatagcgaaggttgctgggttagaggcaatgttacgaccgtacttgaagattcaaggtacattgtggagtttaaaggggaaaatcgtccagaaatagaggttgatcagttcaatttgaggcttcatcgtgaatggctagatggtgggtgggttccttctcttctccaacaggtaaaacatttctctgcgtttgaattgaatctagggtttgtagaaaaatagtgaatttaatgttttagggattaagatacattgaaagatttgacgaattaattgtaaatttagtaaaaccaaaaaaaaaaaaaaaaaaaaaaaaaaaaattgtaaatttagaaaaaagacttaattatactatatatactgtatgtcaagcaatttgaatttgaagatttgttggaatttggcataataaactcacactgcttttttgatttacagagcaatttctcggaatcgacagcccaaagaattaaactgaagataaaaatcaagagaagagatcaatatgagaagggagctcttgtcgaagtcagaagtgaagaaaaagcttacaagggttcttggtattgtgctcgtatactttgtttattaggtgatgataagtacattgttgaacacttgaaatttagtagagatgatg

SEQ ID NO: 177235 - DNA, 422 bp, Arabidopsis thaliana landsberg
gactacaaggagaagccagattatggtcgatgtgtcgccattgtcgcatcttcagctttgagggaaatgataaaaccaggagctttggctataatatcacccattgcagttggtgagtcagtaaaaatgttggttaagcccgtgaaacgagaaagaaacagacataaggaaccaacgctctctatttgatgtccacaggttttgtgttccggatcttgggatactacactggacaacctttgcttggagctaaagtagtagctgcaatgctaatgtttgcgacagtatgtggtatcttaatggctctattcttaaatacagcaggaggtgcttgggacaatgcaaagaaatacattgagactggagctctaggaggcaaaggaagtgattcccacaaagctgcagtaactggtgatacgtaa

SEQ ID NO: 177236 - DNA, 1627 bp, Arabidopsis thaliana landsberg
atgtacgcgacggggataatgaaaatgagttgctgtgagacggagatagccgccggaaaaagtgtgaagacactaggcggtggtggaaacggtcggagcggagatagtggttgcttcgtgctgtggcagatgcagcctggaatgtggtctctggagcttgttctcggtggaactaaactcatctctggctcggacggtaaaacagtttggcgccatacgccatggctcggtactcacgccgctaaaggccctcaacgtccacttcgtcgtctaatccaggtaatttcatgttgataattactcgaaaatactacaaaacataactttagttagtaaaaatagtattaacattgatttagaagaaaataattgcataaacttggcaaaaaggagagatgacgtaataagattgtccaagagataaggacgtggtaggaaaaagagtggtcgctgtccaataagctaataatattatttgaaaaaaaaaacaaatactaacctgacaagtgatggagaagctgtctcctccttttgcttgctttctcttgaaacttcaaaatcaaacaaaaccccattcacccactcttgactctcccaccaccacacgtggttttctcctttcttgtccgtatacttactatttacaaaatgttttgctaatggttcaagttttagttccttttttagcaaggtatgaggtttttgtcctagattatttattattattggggtatttctaaaagatagtgaaataattaaattgtcagagattcagagcgcattgttaagtgactgtgtacaattattggtttaaataatatgacattatactaatagtattgaaaccctatgtaatgtactatatgcttcatcatgaatacgatcttacacattcattcaattttcaaagtgggggaacttcttgggattatcaaagtttgtctttcactttatctttatttctttctttctttcttttaaatcttttgctttattgttcttgtcgttcaaaccccaacgaatatttgccggacacatttttcttggatagtagtataatttatttaaattaagtaacgcaaaatcaatatatttgtgaatttccttttctgtttctttttgataaagatatttgtgaatatttttttaataaacccgtttgtttttgtaattgggctacagggcttggacccaaaaaccacagcaagcctattcgcaaaggcccaatgcttaggcgaacgaagaatcggcgacgatgactgtttcgtgctcaaagtctccgccgatcgtgactcgttgttagaacggaatgacgccggagctccggcggaggttatacgccacgcactgtacggatacttctgtcagaaaagcggtctcttagtctatttagaggattcgcacctcactagggttatgacgatctcgcctgaggacgaggcggtttactgggagacgacgatcggaacaagcatcggagattaccgtgacgttgacggagtagccgtcgcgcattgtggtcgtgccgtcgcgacggtgttccgatttggggagacgtcgttgcagtatagcagaacgaggatggaggagatttggaggatagacgacgtcgttttcgatgtgcctg

SEQ ID NO: 177237 - DNA, 1402 bp, Arabidopsis thaliana landsberg
atggtctgcacactttctgagcgttttcaagtatctcaaccacgccaagacggtggaggatggacgccgttagttccggcagaagctccgcccagtttctcggtttgtcctcgtacttcataggcgaagaggaggaagaatccattttctgagtacctcaaacgtcaagtcaagttaaatgagaagaagtgtagtaaagtttccgacctttcggcttctccacaaatttacaatttagtcctcatagtataacaaaacaaatattctagtgatatattgggccgaaggcccattatgtttttatctcacacatttacatggttaacattcaatgttaatttttaataggaaaaaaagttagagcgtgaaatgaggtaagacaggcaaatttagttgaaaaaggcataatctgtccactaattacgcctcacaaaacatggaagttgcaaaaatacaacaaccttaatctgttatttgtccaaatttccaacatcttcctctggtgatcatttttttgtctgattgattctctccaggcggcgtttctgaaccggaaaacatgagccgtctccgagcattttctgcgccggatttagtcccttcagattctggatctattacatcatcaccaacaagaaccatagagcaccaatcttatgaagattctggtttggaaggtagatcaatcacattcatctcataaagatcgatttaagacatgtttcattttccgttttgggcaagaaaacaacttgtgacttgcatggcaagaaatatgttaaacgtgttcttgtttctgttttaaggaatcactacgaacgtgaagctactgctgaaactcgttcaagatcacaacgaagcaacatcgaggcaccacgatgattggaaagttcagagagtcaacactatgatgacgattctcgatgatctaaagacacgaatccagaaagctcaacaacaatcatcatctgggaaaaaagagcttagacgatgctacaccgatctgaaacggagtcctgatctaaccaagagtccaacaaagccaccacagaacgatcctgaagatattcagaaactgagaaaagagttaagcgcgagtatggctgcaagaaagagtcttcaaatgatgtgttcaagtttagggaaggagaaagagataatggctttggagctttcgaggaaagctcacgaattaaacgaaatggaggagcttgtaagtgattttagggctcaaaatgagaaattacttaagaaagtgcagaattgcgcggtagagcataataaggagaagaaagaagatattgatggtccaggtccaggagacaacaatgtgcctctacagggaagaaacaaagaaatgtgtaaacagctactcaaatctattgacggataccgattctaa

SEQ ID NO: 177238 - DNA, 924 bp, Arabidopsis thaliana landsberg
atgaatgcgagaagatcaagactattagacaagcagatgtcaaacttaacctcccaaactcagaacagtcattttcatcgaagctacactattcagcccgatagatcatcgttatatgatcctctcttagctagtcacaacactacacccattagcttgtttgataaggatggtgtgaatcaaataaattctatcaaactcggggatgatatggaaaaggatgagaatactggtatagttctagtccatggatttggaggaggagttttctcatggaggcatgtaatgggagagttgtctcttcagctcggttgcagagtcgttgcttatgaccggcctggttggggattaacctctagacttatccggaaagattgggagaagagaaatctagctaacccttacaagcttgaaagccaagtaagtttctttagatatgtaacagttgaaaatgttctgtatacaagttgtataagcttcttcttcttcaatctcttttttgacatacttgattcacaggttgatctactactttcattttgttctgagatggggttttcttcggtaatactcgttggccatgacgatggtggtttacttgctctcaaggccgctgaaagaatgcaagcatctacctccaaacacaatgtaagaatcagttcctttagaggcttatcactttgtgttacttgtcactgacaatatccttgttgcttacagatcacaatcaaaggggtggttttgataaacgttagcttatcaagagaagtagttcctgcctttgcaaggatactacttcatacttcacttaggaagaagcacttggtccgtcctttattgcgaaccgagattacccaattggtgaaccggcgtggatggtgtgacaccaccaagctaactactgatatcacaatgctgtacaag

SEQ ID NO: 177239 - DNA, 2220 bp, Arabidopsis thaliana landsberg
atgtggcctacagctagaagtggcttccagttttttgtttatcaagatgaggttagtttacaatgcacatgtctatatcatattctttaagtccaagcataaccatttacttataggaaagccttttatgctgcagatattcttatatggtggttattcaaaagaagtctcatccgagaagagctctgagaaaggaattgttcatgcagattagtggtctcttgatcccaggacttgggaatggaacaaagtatgtaattctagatggcatcacttttaattatacttcttgtactgttttcatgataatactagtatcaccgggagagtaatacccacacttagttcatatatgttttgcaatttttatcaattagaaatcttaacaacccagttgatttaacaattttctttctttgtaatgtaataatactttctgtactcaggtgaagaaaattgggatgccacctagctcccgtgccggattttcggtatgtgtccacaaaaagcgtgctttgcagtttgggggtgtcgtggacatggaaatggaaggtcaggaaatggtatactagtatcatttttgtttatcagaatctgtaagctgaattattgacatctgtaattttttggcaggtgatgtaatgatgagtttattcttaaatgaactctatggcttccagttagataatcgtcgatggtaagaatccaatgttattatgagtattgacactatgaagtttcttctccaacgtactttttgtttattaaaaattattcctgaaggttgtaaaaattatagctatcttaagatgcttggttttttaaaatgtgagtttttcattttgtatcactcactctcagtttctgtggagtacaggtacccaatagagttacgaaaagaaaaatcatcaaaagataaggtatgactacacctactatagtttttgctgcgtactgtaattacctgtaacagaaaaaaaggctgtttttcttttgcatgcattgttcaacttttatcccgtaggatgagccttatggtttaagacgtttcaaatgagtagaaaacttctcttcgttgtttacaggcaaagaagactttggaggcaaaacctgtggcatctaataatgatgatgagatggattcaacagaagaagatgaatcatcggccatgattgagcaaactgatggagtaggctcctcggatgggatatctgaacgtatggcaacaaatctaactgttgatggaaataggtctgataaaagtaaggctctacagggagcaaaaactagactagatccacaagtttcggtctcagaggaggtttgttttggcaaaattcattaacattgtgtaatttcctttactagctttggtgttatcttgttaatcgttgcaattatttccttgcaggttgtaaaaccatgtggacgtattaattcctgtatggtcgttgggaaggataccttatacatatatggtggcatgatggagataaaagataaagaagttactcttgatgatttgtattcgcttaatcttagcaaacttgacgagtgcaagtgtatcattccggtttgtttgacaccaatctccatttttctgtcttttgatatcagttgataaaatattgtgtagacaataagtttctgggtatgtctttacaacagacgactgaaactgagtgggtggaagtctcagatgacgaagaaggggacgaagacgacgatgaagatgatagtgaagatgaaggaaacagtgaagagtctgatgatgaagatgacgatgaagaagtagaggtactatatggtcttacctttctcttaacttctttgaatctggagctagctatggctatatttgacttaatttggttatgttaaatctaggcaatggatgttgatggatcagtgaaagtgggagttgttgttgcaatgataaaaggacaaggaaaatctctccgaagaaaagagaaacgagctcggattgaacagattagagctaatctaggactttcagattcacagagaaccccagtggtaagattgtcttcgccatttccttttattctgttgtctgagaaggagattctgtttgaagctcaactaatttggtcatgttgttgtctttgaagcctggagaaactttgaaggatttctataagcgcaccaatatgtactggcaaatggctgcctacgagcatacccaacatactggcaag

SEQ ID NO: 177240 - DNA, 172 bp, Arabidopsis thaliana landsberg
atgaagattacgagaaacgagaaatacacaaaaatcaaatcgcttaccccgaagatcccagatatcgagagagatcacaatcagatcatacaccgaagcggtgtggagaagaaacctcttgaagaaagcaaattcaaaaacacacagaagaagaagaagaagaagaagaaag

SEQ ID NO: 177241 - DNA, 898 bp, Arabidopsis thaliana landsberg
atggagctggcttttgatctatgccttgttctaaccaaagaggggcatggtcccatttgggatttaggtgctgcaatagcaagaagtcctgcacttgaacacatggatataagttctagaaagcagttgcttggttttgctttgggtcactgtgatgatgaatcgattagtgagttattgcacgcatggaaagattttgacctgcaaggccagtgcgagactctgggaatgttatctgagtcgaattctcctgagtttcaaaagatggacggtgtttcttgtcttactgatttccctcaaatgcttgatggactaagcagtgatcaacaactagatttggatagagccaaagattcaatttcttgtgttgctaaggatatgccggttgatgatagcgtggacttggaatctctgctaaaggaaaatgggaagcttttctcatttgctgcttcacatcttccttggttgcttaagctgggaagaaataggaaactggataaaagtctagtgcttgattcaattcctggaaagcagtttgtcagcataaaagcaactgctctaattaccattctttcctggctggcaaagaatggttttgcgccaaaagatgagctgatagccatgattacagactccatcatcgaacatccggtaacaaaagaggaagacgtcataggatgctcctttctgttgaatctggtagatgcatctaatgcagtagaagttatagagaagcagttgagaataagggggaactaccaagaaattcgaagtatcatgagtctagggatgatatacagtttgctacatgactctggggtagagtgcacagctcccatccagaggagagaactgctacagaagaactttgagagaaagcaaacagaaagtctcgctg

SEQ ID NO: 177242 - DNA, 99 bp, Arabidopsis thaliana landsberg
aacaaatctgtagttgttgttgtgtctgaagaaaacatatctggactcgaatttctgaacactgaggaagaagatgaagacgaaccatcaaagatatag

SEQ ID NO: 177243 - DNA, 226 bp, Arabidopsis thaliana landsberg
cgattattttggcctctatgcagatgcttgttttgccaattttggtgatagagtgaaacactggatcacattaaatgaaccacttcagacctcggtgaatggacactgtattggtatatttgcacctggaagaaatgagaagcccttgatcgaaccatatttggtctcacatcatcaggttctggcccatgcaactgctgtttccatatatagaagcaagtacaag

SEQ ID NO: 177244 - DNA, 729 bp, Arabidopsis thaliana landsberg
atgcaaaggctgttacacaactccggaagtctaattggtgttgacatggaacaagatggcatagatttagctacattgttcgctgattctactgaagattcgaagcttccttatgttatctatgagggtttagaaatgcagggtaagtaaaagtcttcccttgtcagattttgacttccttgtgagtttattatatgtttgtttatcggtttaggtgaaggatatggcacaaacactcgtggccctttcgaaaacaagattgatattggttcttttggaaagagtgggtcggtgatgaacgtagaaagagagaaagaaaagattgtgatgatccctaccccaagatttggcaacgcaacaccacaatggaccataaagaagaaactgagctcgtacgatattaggcctcgttgtggcagacttattctgcaaagtagctcctttaatgagcacattggaagacatttacctaaagaccaaatgataaaaattaatgtcggagtcaattgtaacgtatatgactacgacacgggcacattgcatgagctgcgtctggaatatcagaggcaatatggtctagcgcatggctggcaagaagattttgtccgcaggagacacttgaagcaaaaagacgagattggactcttatgggatttttcttcttctaggcttcaatttggcgtcatttctaggaacacgggacccggactctgggagaccaaaaactaa

SEQ ID NO: 177245 - DNA, 174 bp, Arabidopsis thaliana landsberg
gactgggtcaaggaatcaaaggaaggttacaagcagtcagacttggcgagccaatgccatcacaggtagtagtagtagcacaaaaacttttagagggacccttactttacttttggagttctaagaaataccttatgcaggtacaagatttacatagaagggtctgcgtggtcg

SEQ ID NO: 177246 - DNA, 247 bp, Arabidopsis thaliana landsberg
atgactcatttcaccgtttcgtgcctcctcgtggcactattcttatgtcagtccttggtccatgccgcatataacggttattacgggtatagccccgcggctgcaccctaccccgccgaagaacctcagaacatcatgaatccggtggactcctgttggcggctcaagtctgactgggatgtcaatcgtgaagacctagcagattgcgcggttgggtttggttcatctaccttgggtggcaagaaag

SEQ ID NO: 177247 - DNA, 412 bp, Arabidopsis thaliana landsberg
gcttatattttattcgaaatccgtactcttcttatggatggtacggagtacggacacctggctaatggagctaatttggtaactcacagctgcgaaccggaatttggtccggttaaattgcaatacgccaataacgtaacgatggaaaagtaagcgaaatgggcggagagtgaggtgactaatttatttaggcccatgggccaggatccataaactgaataacaaaatatccgacaccgattcagatcgccggcggatattcagatctcctccacattacattctccgaggaatttaacctttacctacaaatctaagcttctgtcgttgacttcgaaaacttataagtcaaaatcccctttctcaatctctcatcgccttgactcaacaatggcggacaccacaggatccg

SEQ ID NO: 177248 - DNA, 185 bp, Arabidopsis thaliana landsberg
gctgtgcttcttgtgggtcccttttttcttacgtggaaatctttggttggtcccggactaccggtgcgagatccgacaccaaaaattatctcccaagtccttcgagcagttactctagttcggaggactttaatgccctaatgagcaaagattgcgctacacgattttctgatttttcgccatag

SEQ ID NO: 177249 - DNA, 52 bp, Arabidopsis thaliana landsberg
atggtcaatatcattagtcggatagctaagagtcaagttagtcggataaggg

SEQ ID NO: 177250 - DNA, 452 bp, Arabidopsis thaliana landsberg
atggtccaccgtctgaacactggtaaggaaatccaaaaagtaaaagagtgactgaaatttttaaactataaattaatccaaataataatagttggttgatcattatcaaatatttctaatgatgatatagtagatgaaaaaaaaaaagttgagactaagaaatacccagctaagaaatgtacaggattgtaataatgattttaattaatttatcaaaggagctttctacttgataatagggttggacctctatttgttttggcttttgcaacgaccaatcaaagtcaattagttctgctacgacctttctttatgagacttttggattgacccgaatcagtactcctctccgtttgtattcaatcacaggtctaaccacttttctgctttttgtttatgctcgtgtaacagataaacaagatggtgatctacgcgatcgagcaagctcttaa

SEQ ID NO: 177251 - DNA, 182 bp, Arabidopsis thaliana landsberg
caaaactcaaaacaaaagttagcagcgacgcgccagcggagcgcgtccccgccagcatccagcaacgagcatccagcatccaagaacgccaaaccagttcgccagcgacgaagcctcaactcgcgccgctcgccgacgccggcgcccggatcgctactcgccgccgctctggaaaaatgtga

SEQ ID NO: 177252 - DNA, 120 bp, Arabidopsis thaliana landsberg
atgaggcccaatgggcttggcaagaaagttaaacaaaaaaaagaagaagacaattttgtcaagttttcaattgaaataaaccggttaaatcccaatttaaaccggatcaatcaagatatg

SEQ ID NO: 177253 - DNA, 1854 bp, Arabidopsis thaliana landsberg
gtataaagctcttgatgtgaagaacatcttgacggaaacagtttcacaccatattctacgtcaaatgttggaatctccaatgtgggtggacttaagtaatctcctaaaagactatctcaagtttatggatgatcatttgagagagtctgcagacctcacatttcttgcttaccgccatagaaattactcaaaagtaaacaatttgatatctcccggagttgtcattaccatatccctgtgggcaaccaatcggttactgtcatgacttatcttgatttcctaatctcaggtgatcgaatttgtcctattcaaacaacgattgcagcactcaaaccagtaccaagctgcaagggttgaagcgtctgtcttgcaattgaagcagaacgcagacagctttgaggaagaagaggtaattcatccaagttcttatcatgtataataacatatctccatctacttgatcctctcatatatctaaggttgcctgggattttgttgtctagcgcattcttgaaaatctgaaatctggagttcaacttgtggagctctcaaatgaaattggatccaggacacttaagttcaatgaagatatgcaaacacgtccgtggtggacaccttgtcctgagaaaaactatctactaggtcagtatttccttcacaatttgttgttgtttatgattgtggtgttattcttaatatcaaaaaacgtctgtaggtccgtttgaagaaatttcttactgtcctcccaaagagaatgtggtacgtttgtctatatccatacatcttttcttggggacggatgcaacctaatacatgtaattgttggctgtctatagaaagaagaacgtgaagaaaatatgaaacgatgccatccagagaaaatcccttctacgctcggatgatatatctctctattcagtgcacgccaacggcattaaaggaaagtgttgaaaccaatgggtctggaggtgacatcgacgtctgtgaagaacttaagtgtttgctggaggactacacaaaaatgttgggatgttctctaagtgacgctgtagaaatgatcacagagatctcacagggtgcaaggacttccgaggttagcttttctactcctttctccttctacctgcactcatattaactggtcttactgttagtaaccttgtcgaaacatctctgtagagcctcggttcaaatttggtggactggttaaattttgcggtgttttggaatgcgtggagcctaagttcccaggagcactggcatgtgttgaactccctgtttgagaggcttattctggatagagtcagatcaatgggatcttcagacatgagttcttgctactctgatgtccaggtcttggttcagatcatcaccgaaccgttggcgtggcacagtcttatcattcaggcctgcacccgctcgtctctcccatctgggaaaaagaagaagaaaaatcaacattcagatcaattatcttcgtcccccatatcacaagcaatcaaagattctatacagtcactatgcagcacaatacaagatgtttctaactggctactgaatcaactgaacaatccagaagatggtcaagtggagggatttctgacaactctgaagagagatggaaatgcagcaggaccaggtcagattcttggggtactagagagtttcatcgcatccagcgaagaatcggaggttggaaatcgcatctttcaagcactgaaatcatggaacacggcagataccgcacgtaaaacagtcatggcgcaacagagagtcctccgtgagtttctccagatctgtgaatctaagagaaagctactggaaacgctcaagcaacagatgtcccatgtttga

SEQ ID NO: 177254 - DNA, 297 bp, Arabidopsis thaliana landsberg
cccaaacatcaactcccgagtcagtattaccgccgataacttctgaaattttgctcgagtcgataagatcttctcagtggcatatcgtcgaacacgttgcagacaaactcacaccttcgcttgtatctacaactctactcagcctcgtcaagactcctaatttagccttcaatttcgtcaaccacatcgacctttatcgcctggactttcaaacacagtgtctagccatcgctgtcatctccaagctctcttctccaaaacccgttactcagttactgaaagaagtcgttacttctc

SEQ ID NO: 177255 - DNA, 134 bp, Arabidopsis thaliana landsberg
gtattctatgcagtgaaacaacaatggagataaggagacattttggagcaaaagctaaggaaaaggaagctaaggatgattttcagttccagattaagaggagtgtcgatcgacacactcctagtgtcgattga

SEQ ID NO: 177256 - DNA, 186 bp, Arabidopsis thaliana landsberg
gcaaagcagaagccgtctcctccacccatcctgatggagctacaggtctttcaacagtacgtcgtcgacagtttcaagagcgtctggaacgccatagctacactttctcgctgcggttgtgttgctcccactcgtcgtcgtcgtcgctctcccgcacccacctccggctctaggcatgaggactag

SEQ ID NO: 177257 - DNA, 195 bp, Arabidopsis thaliana landsberg
gaaaagctagaagcacaaggtggtgctggaggagctccttgggatgatggcagtaatttcgaaggtgttacagagatatacattcggacaggtgagattggtatcgtttccatcaagtttttgtacgaaaatgacattcatgagataatagtgggagatcatcatgggaacaagaacctacttcgacatgaagag

SEQ ID NO: 177258 - DNA, 344 bp, Arabidopsis thaliana landsberg
ttgtcgagaaccgcttcggccgcattaacatgctgtccgaacccatggaatggctgaccgacaacgggtcctgcttcatcgccaaggacactgcatccttgctccgcgacatcggcatggaaccgcgcacgacgccggtgcgaagtccgcaatcgaacggcatggccgaggcgttcgtcaaaaccttcaagcgcgattacgtctcggtgaatccaacccccgacgccgaaaccgtcatggcgcaactgccgttctggttcgagcattacaacaatcttcacccgcacagtgctttaggatatcagtcaccgcgcgagttcatcagctcgcaatctcaaacctga

SEQ ID NO: 177259 - DNA, 400 bp, Arabidopsis thaliana landsberg
atgaacccttatatcaagcgtaagtctgaatgttcagatcgtgctcacgtttggacttcggatgagttccagaaaactggaacgaaatctcaaaaagcatttcttctcctcacaaattcatacatcattcgtactcgtttcaaatggtggttccacgttgctccgatgtacacaacgacatcgggaaaaaaaatcgtgatggattatcaatttcttgatcatccagtgactttcaatgaatggaaaaaccttcttgtcttcagtaagcgtgattgcgtaactgatttccgtttccttgattacaatgaaggcgcagatcagactcaggactgttatcccaaacatgaacccatgtattattacattccggaagatatcggtaaccgcgaatcgggccagg

SEQ ID NO: 177260 - DNA, 238 bp, Arabidopsis thaliana landsberg
atgttagatgccaatatcaagggccagctgcaggcttacctggagcgggtcacgcaaccgatcgaaatcgtggccaacctcgatggcagcgataaatcgcgcgagatgcaggaaatgctcgaagaaatcagtggcctgtccgccaagatttcgctcgagctgcgccatgacgctaacgaacgtgcgccttcgttctcgctcaaccggcccggcaaaaagatcggaatgcgctttgccg

SEQ ID NO: 177261 - DNA, 145 bp, Arabidopsis thaliana landsberg
gatggtgaagttcatatcaaaaggaactattgaagagaagataattgaggtattagaaggaaaacaaaacagtttggtcgatggctattgttcttcgttggaggatcttacaacagaagagatggtgactttgttttcagtctga

SEQ ID NO: 177262 - DNA, 146 bp, Arabidopsis thaliana landsberg
atggctgtcaatttccggatccgcaattatgtgcattccaaaacgcttcccttcaattatgttgattccaccgtacacagtataaatgatttcctgatcgccaaccgcaccacagctttcctcgaaggtttcgcaaccacggccgg

SEQ ID NO: 177263 - DNA, 778 bp, Arabidopsis thaliana landsberg
gttttgaatgttgcttgtggtggaagtctttatcaagacttggagaaagaggtcacgatcaaggttcccgaggaacataaaagaaaccatatagattatgatgactatgatggttatagacatgaggtgaagatagtaaaaaacagccctttgcataaatggttcaaagattctttagatgaagaaaagatggagatcttggtcaacagttatcaccaccaaggggttaagagattggcgcaaagatttgtgccaatggcttttgctcctgatggattgattaaagggttttatgatcctgatatgtacaatcctgaagagggaaagttcctaatgggtgtgcagtttcatccagagagaatgaggaagaatggtagcgatgaatttgatttccctggttgtcctgttgcttatcaggtttgttattgagttcatgttttctttttcttttcattagcatgcattatgcgagtttgaaccttgatggtgacagatgaacaacactaccacaaacctctaaactacatgtgttgatcaatgactttatagtcttatgtggttttgacaggaatttgcaaaagcagtgattgcatgtcaaaagaaggtgaatagtttcttgtctgttcctaagaaattggaactcaatccagaaatggagaacaaaagaaagatacttgtcaggagcttctcgcttgcgaggtctatgtacaccagatctcattcgttgaagaaccaatccacagaatcagaacttgaagttggagctgagtttcttgag

SEQ ID NO: 177264 - DNA, 165 bp, Arabidopsis thaliana landsberg
atgagaggtgtcggaggtccgttgctgtcaatcggagatcttctcgccgatctcggtgatgaaactggcgactccccgcaaaatcatccaaatcctgaagtttcatcaaaatcatactctgatgataccatctctggacccttggatctaacccgactctttcag

SEQ ID NO: 177265 - DNA, 37 bp, Arabidopsis thaliana landsberg
atggccgaggagaagcaagagtatggccgtcggcacg

SEQ ID NO: 177266 - DNA, 140 bp, Arabidopsis thaliana landsberg
ctgccggagcgagcgagcgctggcaaagcatcattggtcgccacatcgtgctgattggcttgtccattgttcgagcccgcatgtataagcgccccccgtgcgccctctccatatctgctgttatctacacggcagcttaa

SEQ ID NO: 177267 - DNA, 605 bp, Arabidopsis thaliana landsberg
gagtttgatgagacgttttcttctgaagaagtaagcgatattcccagtgcccctccattttccggggcagcagaggaatctgaagaaattaaaccagcaacttcaagcgttcaagtttcagaagtcaaaacaggagattgtgtagaaagtagaaagactggccactttactaggtattctatttttagctcttaaatgaattgagttctcaatttggtaaactaatttcagtttttgcttctgttcctatagacctagtgcagcttctgagtcatctgggccacctgatcaacatccagctcggcttcctacttttcatgcaaggtagttatgatctaattagtttattcactgcttcagaaactggatatagacagatagaaaacctcagttatcttcactttgttcagtatacaagttggattctttttaatcactctgccaacattttttattgaaccctgatacagttctcgtgggccatggcatgctgtggtttcctatgatgcatgtgtacgactttgtctgcatgcgtggtcaaccggttgcatggaggctcccatgtttttggaaaatgagtgtgctcttctacgagaagcatttgg

SEQ ID NO: 177268 - DNA, 133 bp, Arabidopsis thaliana landsberg
gttgccaggaagatatcgggtaaagtgtcaggcatttctcaaagcccctgttgatgacgtattgcggcgtttccgtctccggcatctgcttgcggaagccggccgggaacaaaaaccgccctttggcatctaa

SEQ ID NO: 177269 - DNA, 389 bp, Arabidopsis thaliana landsberg
gaatgaataaaagatggagcaacagcagggatgcaatcgagtgttcaaataaaaaaattcagttttttgatgaatcactggatcgcaagatgagagtaaaagctcgggagtgcgatctagtggttttgggacaacatctttctcaacgacaatgtcaaactactcgatcgcaacctggaagtggtctgatggagtggtctcctagtggaattgcccaaatcactctatcgcaaccccagagaacacatgagcgtcatgctccacaacctcctagggttgcgatcgagcacaatgacgaggagatggcagagccacatcaagaaccggtcgtgcatgctgagtacactcaagcagatatggatgactacatctccaggacattctactga

SEQ ID NO: 177270 - DNA, 335 bp, Arabidopsis thaliana landsberg
cgccaccatccgcggcctggaaggccagttgggtggtgactggaacggcttcacgtgggcgacgtatctcacctggcagaagccggaaaacaccgatggcggcgtcgacgacggcaactggctgccgcgccgcacgcaaaaaagcgcgcgtttcgacctggatcgccggctgggtgcgttcagcgtcggcgccacgttcgaggctttcggcgggcgttacgacgatatcgccaacacgcattggctgggcggctacaccaagctggccctgcgcggcagttggcagttcgcgcaacaaaggcaattgcaggccaagatcgccaacgcgttcgacc

SEQ ID NO: 177271 - DNA, 437 bp, Arabidopsis thaliana landsberg
atggctgtgacaggttccgctcaccggaatcaggggataagatatcgtatgaggctctctcttcagaaatttcgtgttcatacaaggtgcggtttgaggatattggcagatgtctcaaatgtgaatgtgtagtgcatgatgtgtttggaaggtctagtgaactagcatacgccgagactgatccaatatcaccaggtttcatgcatttcagttaccattgcatcttgtttaccaatatctctgacgaggtgaagatgtgaccaactttgtgtctgcttcaggttttcctaggatagagaagctagagattgaaggacaaggtttccatactaacttatatgctgtgcggggaaattattttggtggtaaagagggaaagagtaaaatccaatggcttagatcaatggttggaagccctgatctcatctcaattccag

SEQ ID NO: 177272 - DNA, 138 bp, Arabidopsis thaliana landsberg
gaccgcaagaacacaccaaaacccggaaatgccaggcctgacacagagacccccgaacacacccagaacgagagcaacacacccaactggactgacaacctaaaaaactacaacgaaatgaccggggctcaaggataa

SEQ ID NO: 177273 - DNA, 242 bp, Arabidopsis thaliana landsberg
gctgcaagaatgaaaaccccaataaaggcgattatacgtatttgcgcatcagcaaccaaaacaagcttgtggcacgcttcaacttcaattcgccttcaccaggatggaggattgacgacctgatttacgatgttgcctccaccgatgtttattactatggaccttcggttgaaggaaaagataaattccagagcgaaattgtacctactgcgaaaaagttcaaagctgtacagctcatgaaa

SEQ ID NO: 177274 - DNA, 324 bp, Arabidopsis thaliana landsberg
gcctttcatatgcttgcatgttggatagaagaccctaagagtgattattttaaaaaacatcttgctcgagttcgcgaatacatatggattggcgaggatggcctgaaaattcaagtgggtgcttttttaattatgactcttacttatatactccgagctcaaaaccaaaatcctccatagcattaaagagctgcgttaacacatgtgcaacttttgtagtcttttggtagccaattatgggatacagccttatcgctacatgcattactagacggaattgatgatcatgatgttgatgatgagattaaaacaacgctcgtttaa

SEQ ID NO: 177275 - DNA, 104 bp, Arabidopsis thaliana landsberg
tgtctgtttacgagagcagtatttcaaagaacagagtggagctaaaacaggcacaatacaaggacatagataagcggcacttagatcaactgatccagctaaag

SEQ ID NO: 177276 - DNA, 193 bp, Arabidopsis thaliana landsberg
atggagcatccgagaccatatagcgaaagtgattctagtgatagcttatcctcatctaggagctatagactaggagggctaacttgggacttgccagaaggaagcaaaatcgaggactatttacttttctggataggttctgacagttcagcttttgccaatgtagtactgaccttcaatggttgtgacatag

SEQ ID NO: 177277 - DNA, 1109 bp, Arabidopsis thaliana landsberg
ctcacgtctggcactgttgaggatcaattaggactgtctttgtgtaagaagttgacttctgtcggttggtcggtgcaacaaaccactgtccttcggaatgatgtgagtgagatttactcattgtttttgttgcatcagttttcacttatggattcatgttaatcagagaatttacattaatctctattattgcttcactgtgtttttttttattagatagattctgtatccgaggaagttgaccgccaaaggtctacgagtgatatggtaagtactctagcatatgatcataaaatcaaaatcaaagagaggttttgttgtggaaaatgtgcttgacagatttcgtctgattgattctttggaaggtattcatatatggaggagttggtcctttgcattcagatgttactttggccggtgttgctaaggcatttggagttcgcctggtacgtatctcttttatattagtgcaaactcatggttaagatatgtgccttaacatctcaatgaatgtgggtgtcaacaagtgaaaaagcaatcaccactcaattgtaatgtgagaagctgatactgccatttattcaggcacctgatgaagagtttgaggaataccttaggcatcttatcagcgaccagtgcacaggtgacaggaatgaggtgagttcggtcttgagcataatagtttttatagatcttcagacaagataagctaaaactatataatttctgtatatatgtggggccaacttcatgcttatgatttgcgtaatatccagaaggttcctcaccaagttggttgcttttctcatttcagatggctcagttaccggaaggaattacagaactactgcatcatgaaaagctttctgtgccattggtatgtgctctcagaactccattcaaagtaaataacgtttcagcattatttccatacccatctgatcgttggtcatttggtgtagattaagtgccgcaatgtgattgttcttgctgctacaaacactgaggagctcgagaaagagtgggaatgtctgacggaacttactaaattgggtggaggttcactcatagaatattcgtcgaggcgcttgatgacatctttaacagat

SEQ ID NO: 177278 - DNA, 75 bp, Arabidopsis thaliana landsberg
atggacttcggtgctgccgccgactggctagcctaccaacaggccataaggcacaccaagcgggcaggacccgag

SEQ ID NO: 177279 - DNA, 405 bp, Arabidopsis thaliana landsberg
atgaagtggcaattctggattgaccgtgggggcacgttcaccgatatcgtggcgcgccgccccgatggcagcacggccaccgccaagctgctgtcggaaaacaccgagcagtaccgcgatgcggccgtcgccggcatccgccagctgctgggcctgaccgcgggcgatccggtgccggccgaacgggtggagtgcgtaaagatgggcaccaccgtggccaccaacgccctgctcgagcgcaagggcgaacgcaccttgctggtaaccacgcggggtttccgcgacggcatgcgcattgccaaccagaaccggccgcgcctgttcgaccgcaacgtgacgctgcccgagatgctgtacccatcggtcgtggaagccgacgaacgggaaaatgcaaacggcgccgtg

SEQ ID NO: 177280 - DNA, 871 bp, Arabidopsis thaliana landsberg
atggatgaattcaagagacatattgagttccttggcagactcaagcaccctaatcttgtgccacttagagcttatttccaagccaaagaagaatgtttgctcgtctacgattacttccccaatggaagtctcttctctcttatccatggtatgtattgcacacacactcttctcttattcagcactcgtgttaatctgtttgatatgtgtcttgttcgtaggaagtaaggtttctgggagtgggaagcctcttcactggacatcatgtttgaaaatagcagaggacttggcaatgggcctggtctacattcatcagaatcctggcttaacgcatgggaacttgaaatcatctaatgttttgttaggtccggatttcgagtcctgtctcacggactacggtctcagcgatctccatgatccttactcgattgaagacacaagtgtagcttctctcttttacaaagctcctgaatgcagagacttacgcaaggcctcaacacaaccagctgatgtttatagctttggagtcctccttctagagcttctaacaggtagaacttctttcaaggaccttgttcataaatacgggtctgatatctccacatgggtgcgtgcggtgagagaggaagagactgaagtaagtgaggagctgaatgcttctgaggagaaacttcaggctcttttgagcatcgcgacggcttgcgtggctgttaagccggaaaaccgtcctgcgatgagagaggtattgaaaatggtgaaagatgcaagggcggaagcagctctgttctcatttaacagcagtgatcattcgcctgggagatggtcggatacgattcagagcttgccaagggaggatcatatgagcatctga

SEQ ID NO: 177281 - DNA, 1261 bp, Arabidopsis thaliana landsberg
atgagggtgttaattcggccaaatttcttgagcaatctgattcgatattgctctagaggtacgcattcacacgatcgtagcctgcgatcggttctctcgtcaaatatgattcgtctgtacaccaccggtacgtaaatatgatctgaataaacattgcattggattatagtttagtatttgattgaattgagatgtataatgacaggaatggaacctcagttgtctcctgatcttattaagataatggatcagaggctctcggcgatagagcatcgaaatgctgtccttcagaagcttatcaaccaggtaatcccaaagattaagctcattgttgttatttaagctttccttttggttgttgattttttgacatgatcgataaactgtgttttccgttgttcgaagacagcctgagtactcaccagaggagttttcaagagccaataaggaacttcggaagctgagagattcaatgttgctgatcaatgatttgagggccaaacaaaaggtagtgaatttgctttaccgtattatatatctgttccaaagatcatcattgattaggtttactttctgttggcaggagattgatggattgaaatctctggtgtcggaaagttcggatgataaagacatgcttgatatggctgtaggtgaattagacgaggcggtggaagaagaaaaaagacttcaaactttgctgcttaagtctttgcttcctaaagatgaagctgatgagagggattgcattttggaggtgagagcaggtacacttgtgagctaatggttcttaaacaccacggtgtcttctacattatccatgtagaaagctgtctgtagttgtttttcattttgacatctgaatgtttatgttaggtactggtggtgaagaggcttctttgtttgccatggacatattcagaatgtaagtcccatatactgctggtagaagcaagtatacttctttgtacttgaactttacttctgtttttttatccggttttggaatatcgacaggtacgaaaggtattcacagaagaaaggttggaagtttgatattgtagacatcaccgagtcagatatgaaagggtataaagtaagtaacttttgttcctccttatgtgaatattagtattccagtattgctctgttctcctgaagctaagatcttgaatgtaatttccaggaagccagtgctgcaatttgtggagccagtgtctacggaaaactaaagttcgagagtggaattcacagggttcag

SEQ ID NO: 177282 - DNA, 917 bp, Arabidopsis thaliana landsberg
atgatgtcctttgaaatgaatgaccggaaaagtaagttcacattgtgatttctataaatattttgtgctattggaagagatacctgttacttagttgtacttaattcttcttttacttattacgttctcgagtgagtagatcattgaatgtcatgttgttgtgggaaccccgtttagtttcagtatatcttattaccaggttacaaagttactcctgctgtacttggatatacttaaacgtttcttatgtgatttgaaacagaaatcgggttaggcctgacaggatttggcgtattcttctcgtttttgggaatagtctttgtctttgataagggattacttgccatgggaaatgtaagtatctcatgtatctttgtttcatactttgaccactattattgcatacacgtacagaactagtatgagagcttgtttcttttcatattttctcagattcttttcatctcgggggttagtctaaccattggcttcaagtctaccatgcagttcttcatgaagcgtcaaaattataaggtttggttctgtctttgcctacattatcaatagctctgggccagtctctgctggatttttacatatttctccttaatgtcatctatgtgtgttcatttggctttatatgttatccactcagggaaccatctcttttggcgtcggtttcttctttgttatcatcgggtggcctatcttgggaatgatgttggagacctatggctttttcgtactcttcaggtacttttgcctattttcttcttctttactggtattgcttgaggaaatgtaaactgatactaaaaacgttttgcttttgcagtggcttctggcctaccttggcagtctttgctcagaagatacccgttctgggttggattattcagcaaccatatattagatcg

SEQ ID NO: 177283 - DNA, 281 bp, Arabidopsis thaliana landsberg
aaacgaaggagaagaagtcagcgacgatgagaatctggtgatagtattggtccacccgttctcgctcttgggtggttgtcaagctctgctcaaaggcatagcttctgaattggcctctaagggtttcaagtctgtcactttcgatacgagaggtgccggaaaatccaccggaagagctactcttaccggctttgctgaggtcaaggatgtggtcgctgtttgtcggtggctttgtcagaatgttgatgctcataggatcctgctcgtgggttcttctgctg

SEQ ID NO: 177284 - DNA, 69 bp, Arabidopsis thaliana landsberg
atgtttgggcttcgaaggcgtggacgttgcctaattgcagatgagatggggctcggcaagactctccag

SEQ ID NO: 177285 - DNA, 1366 bp, Arabidopsis thaliana landsberg
tgaacttcctgagttcttgggtggtaactgcacttgtgcagacaaaggtggatgtatgcgttctgacaaaggtccatggaacgaccctgacatcttcaaggtaatttgtaggataagtagagaatcttcgaaaaccgtttaacgaaacgatgaactgagaagctgaatcttgaactatatacagatggttcagaacggagaaggaaagtgcccaaggaagactttgtcaaacattgaagagaagacaatctcagtggacgagaacacaacaatggtaaaagcaaaatacaaaaatatctttgatctttaaaatttacagtaatatctaacattctcatatttttgcttgaagaaatctgattcctttgcggtgagtttctctcttttgtcaataataaaggttacttctttagctctctctttctctgtatgactgattttgaaatcctattggcagaagaacaaattcgatgcagagaacacaaaattcataccgatgattgacaaaactgtgaatgctaaaacatggcctacaaatctccacaagtcaaactatcctgaacctgaaggtacactacattgaaacattggcactacactatatttattcgtgttttcacgttttgaaaacatgattcttttttttattaccattccaaacattcatcatagtttcatgtctttgaaaagagattctgctattatactataccgctacactcttcaacaagaataccacttattacctaaatgtgttcttgccgtcgcagatttatactctgccgtgaagccatcgcagaggagaggaggagaaggttatttattcgggggagtgatgtctttggtgatggggttaatgaccgtggtgaggctaacgaagaacatgccaaggaagctcactgaggctgccatttacggtggtgaagtggacaaagcagagactacaatggtgtcaaaccaagagtatatgtcgatggtgaagagaatggccgagttggaggagaaatgtaggtctttggacaatcagcctgcagcgttctcgccagagaaagaacagattctcaccgctgctctcagccgtgtcgacgagctagagcttcagttggctcagaccaaaaaggtacaaagttaaacagcctccataactagtttcttattttagagtttagaagtttgaatttagactattttgttcatttataaaagttaaaagctattttaattcttttgatctaaaatttagaccattttcataatcctgttataaatcaattttattttgttgaaaattcagacgctggaggaaaccatggcaacgcagcatgtgataatggcttatatcgacaagaagaaaaagaagaagaag

SEQ ID NO: 177286 - DNA, 243 bp, Arabidopsis thaliana landsberg
atggtggaagaagatgaatcgctaactaaagcgaaacaacagatggctaaaacacataaggtatacaagcaatgataagtattgaataccttctaatggtagccactcttcattgtggagaaattctacttaatgattttaaaatattgtgttatgcaggtgaacatgagtgagtcaacttctcaggtcgaggttgaagcagaaatcactctttcagcgtctgatgtgaaggataagtacagg

SEQ ID NO: 177287 - DNA, 337 bp, Arabidopsis thaliana landsberg
atggggcccatttgtgctaaagaacatctggctgcttacctgccatcgcatatattcaaagataccagcgaagcgggcctgcaatctctccccggatcgtacggagccgtgagcgcggcgccttatggatcggcatctatattgctcatcagctatgcttatatcaggttgctgggtgccgacggagtgaaagccgcaacagaatatgccattttgaatgccaattatatgagggcaaagctggaaaaatattttaacatattgtatctcggtgccaatggcacatgtgcccacgaatttattgttgatcttcgtccttttaaacctacctcgggcc

SEQ ID NO: 177288 - DNA, 106 bp, Arabidopsis thaliana landsberg
gttctgtgtgcagctgcatacttcccgagtccctcaagataacagcggtctgccacgatccagacgggcaaatcccggaggaagaaaacgaaaagagaagtcttag

SEQ ID NO: 177289 - DNA, 324 bp, Arabidopsis thaliana landsberg
tttcaagaagaaggagttgtctaacatttttcagctaaatgttgctgccaagggtacttttgcgctcaacaaagatcttgacaccattgaccgtcttgtctcccgtttgcacacgggggttaaaaacgacaagcttcttattcgccttggattagagagggggagggacgtgtatacaattccggagtttgtgaaacagcttcgaaagagccatgttaaccacacccatcaactcgaggttcttgtggatcatatatgtcgttggttcactaatgttaacaaatccagatcgttgctccttaaagagatccttcgtccccaaac

SEQ ID NO: 177290 - DNA, 72 bp, Arabidopsis thaliana landsberg
gtctgcaactaactacaacctctgaatttgctaaagtttctgaaaaaccaaaaactttaaggaaacacattg

SEQ ID NO: 177291 - DNA, 501 bp, Arabidopsis thaliana landsberg
ttaaaagaattgaaggagaaattacctccagaagtatcagagagtgaagcatttgaatccattaactctcaagctgaagcttatctaaacgccaacaaagtatcagaaacatctccacttacaacttcgggacaagaacaagaaacatatcaaaagacagaggaacaagtaccttctaactcaagtataaccgagacatcgagttcatcaagggcaccaagtacagaagcttcatcatcaagaataagtggaaaagaaagtaaagaacaatttgagcctggtgtttatgtgacttatgaggtagacatgaatggtaacaagatctttcgacgagttagatttagtaaaaaaagatttgatgagcatcaagcagaagattggtggaccaaaaacaaagataggttgcttaagtgttatagttcaaattcatcatcatcatcatcatcgaatccaacggcttccgactcacctgttgctccacaaccaccgtctgatccgtcg

SEQ ID NO: 177292 - DNA, 1045 bp, Arabidopsis thaliana landsberg
atgaaaggtctcttcaagaacaaatcacgtcttcctggtgaaatcgtacgtcagactcgagatctcatcgctttagcggaatccgaagaagaagaaaccgatgcgagaaactcgaaaaggttagggatttgtgcggagttgtgtcgaaacattagagatttgaaatcgattctttatggtaatagtgaagctgagcatgttcctgaagctgtcttttggttaactcaagagttttccgagaagacacgcttggtcctttgatcaaatctataccaaaacttgatttagaagcaagaaaagacgcgacacagattgtcgcgaatcttcagaagcaacaagtcgaatttcgactcgttgcttctgaatatcttgaatcgaacttagatgttatcgattcgttagtcgaaggtatcgatcacgaccatgagctggcgttgcattacacgggaatgcttaaagaatgtgtgcggcatcaggttgttgcaaagtacatactcgaatcgaagaatttggagaagtttttcgattatgttcagcttccgtatttcgatgtagcaaccgatgcaagcaagatctttagggagcttttgacgaggcataaatcgactgtagcggagtatcttgcgaagaactacgaatggtttttcgcagagtataacaccaagttgttggagaaaggaagctattttacgaagagacaagcgtcgaaattgcttggagatgtgttgatggatcgttcgaattcaggtgtgatggtaaagtatgtgagcagtttggataatttgagaatcatgatgaatctttaagagaaccaaccaagaacattcagttagaagcatttcatatctttaaactctttgtggcgaacgagaacaaacctgaggatatcgtggcgattctcgtggcgaatcggaccaagattcttcgtttgtttgctgatttgaaacctgagaaagaagatgtaggttttgagactgacaaagcattggttatgaatgagattgctacactttctcttatcgatatcaaaaccgcagatcgataa

SEQ ID NO: 177293 - DNA, 118 bp, Arabidopsis thaliana landsberg
atgttgattcatcggttgcaggttgtgcaagacgcgcttgataaagccaatttgaccgagaaggatctctctgctgttgctgttaccattggacctggtttgagcctctgtctacgtg

SEQ ID NO: 177294 - DNA, 240 bp, Arabidopsis thaliana landsberg
tggccgctgcgcggcatcgccgaggatgtcgccgagcagacccgcgcgatcaccgtgccggcgctcgtcgtggccggagagcgcgacgccgtcgagcccgtcgacgtgctgcggcacaacctgatgcccttcctcgaccgcgccgaactccaggtcatcccggtcaccggccacctcatcccgttcgaggcgcccgaggcgctggccaacgccatcgcggccttcgaaccggcccgctga

SEQ ID NO: 177295 - DNA, 377 bp, Arabidopsis thaliana landsberg
atgatcgcaacactggaagcaaacaagccgatggtggaaaaatttgcgcttactgatccggagcggtactggcattacctgcaccacctgttacccaatgatcccttcctggtttgcgcgctggatatggcctgctgggatcttttcggtaaaatgaaagggaagccattgtaccagctatgggatacttcatgggatacaaccccggttaccgattacaccataggcatagacaccatagacaagatggtggataaaatgaaagcaaaaccctggcctgtatacaagatcaaactgggtactgatgaagatgtggagatagtggaagcattgcgcaggcatccaaatgcgcctcttcgcgtggatgccaataaaag

SEQ ID NO: 177296 - DNA, 85 bp, Arabidopsis thaliana landsberg
atggttatggttacgtacgcgagtgttgtggtggttaaggtgaagcttagggagtctattgaaaggagcaacatagatgtgtacg

SEQ ID NO: 177297 - DNA, 954 bp, Arabidopsis thaliana landsberg
aatctcgtggtgtcaatacttttcttcaaccgtcaccaaatagaaaggcttcaccttctcttgctgagcgtagaggcagcctgaaaggatctctgaagttgccaggtttggctgattccaacagaggcacacctgcttttactttacatccggatgatagtaatgacatagtcttcaatctggagggtattagaaacggcgatctatatccaccaagtgattgcaaagggacaagtgtagattcagatttgccagagaaggaaattatatccttaatcagttgcagtaaatctgacagacacaaatcgggaggtgatactgatagctctggccagcctttagcatgtcgttggccaagtatggagatgattacaaaactgagcagagcttacttagattcagaatctgttatagcaatcccgttgccaagtgatgctgtaggagaaacgggtagtaggaatttgtacatttggatcggaaagtcattctctttggataacaactgttctctagtagatagcaacaaagcggcagacactgtggagaatgttgattgggtacaaattggtgaatccattttgtgtcagatggacttgccaaaagatacccctataaaggtaataatagcctaaactttggaggctctgatactttttactaattgtaaagtcagcgtgctcatctttgtcatgtcttatccaaccaaactaaatttcgaagatgaaaattacaatctcagcactttcattactgactactgaggacggttaggtagaatccttatgatttcagcagttgtatgtattggattattctctagtggcttgcatggatccaacttgctatgatccttttgctgtttgtaactgataagttgcttttctttcttgttaacagatagatagggaatctgaggatcagacacagttgctagcactgctgagcgcgctataa

SEQ ID NO: 177298 - DNA, 2583 bp, Arabidopsis thaliana landsberg
atggtgtcaccgggacggagtgattctacctccggcaagaacaataacccgcccgacggaagcagcggcaagagatctccatcttctcccgcagataaatctccatccaaacgccaaaaggtttctgatcggagacattatttcttatccatctttcgagtgccatctggagcttctggtttgaacaattttggcgatttcacttttcgtttcagttggaagatggcggcgatacactacctccttcggattctagtaaatgcgtgttaggcgacactaatccaacctctggagactcccagattgatgcctctgcggcggctgctacgacgtcgcaaccaccacctgttgcgcaaggtccgttgctcttattcttgttcgatctttatgctcttggacccaatttaaattccttttgagattgttttttcaattcgtctttgttttctggtttggattgtatactcaacagcgattttgcaagagaaggcaagttttgaaagatggacatatgtacacagtaggtttgagaacccgtggtgtcgattgctatcacagtctgcacaggtgaattaagcatctattggatcttcctgtctttatttttctaatgcttttgtggatgcaatatcctgacaaaattgagctacttatgaattttcagtatccaagcataaacatttttctatcagtcttcaaattcttagacggagaactcagttcatactcgttcaagatcacaagaattcaggtatttttgtttccttgaatgttacgctcaaacattagcactgctggattttaaactggcctatgcaattcctgtgcgtatgattttttctacttttgagttgtttgtggagatatgtgaactccttattcagtatgtattctcattgtttgtgcacatgttcagcgcaaaggcaatgttttagcggttctagagaccatgggaaacaatggacatatgtggataaacggaaattatgccgaggggaatatcaaccatgtgctaaactctggtgacgaagtggttattggtttaagcaggattgctttcgtatcctcatgtgattccactttttttattatatgcaagaagaaattttccttcagttttgagatgaatatctccataggaatatacataagtttcccccttaatttctatccaggtatatcagcaaatgcctatagttgcagcaaaacctggttcagttcaggttcctgcaggaaagtttctagacctagagagaatgacaggtcattcaattatatcatcgcttgaaagattgatccatgcatccagtaagagccaccaagcgccagagtcgatggtccaagttgacggcatggaaggaattttttctgttaacaaccaagattccaaaatggaggtaaatactctatgtttctcttgtaccctggcgtcatcaacagcattttgcattatattaacaaagctggtatcagatattggatgagaaaaacgaggtgacaagtaattcacaacaagcttcaacatcaggcaatggtctgcaatctgcaatattcagagaagccattcaagctggttttgttagaggcgaaaacatggaagtttcattcaaaaattttccctattatttgaggtatgggaccaagtcagatatattttttcaggtattcatgcagtgttaagatatgtgcatgtgaatcttccattaagaatctgtttatatcatcatagaattttgaggtctaattctgctttcttgtctttggtagtttaggcgctttgcatgtgttctctgttttgtgtatgctgactaaggctttatttttgcagtgaatatacaaaggctgccttattatatgcttcatatatacatctgaagaaaaaagaatatgtccaatttgtctccgacatgacccctatgaatccaaggatattgctttctggtcccgcaggtttgtggtatcttgcttgtgtggttcttgtacttctttagccggaaacaacattttcgctttttggttggagttgtttcagggtctgaaatataccaagagacgttagctaaagcacttgcccgtgacctcgaggcgaaattgctaatatttgacagctatccaattttgggggtaagatattgtatgtgttacttaaatataagctgttttttttttatatgctttttagtttacaagaggaaagtttttgcatctacacttatttgtctattttcctgattacgggtatgagattactgtaagtaattcctggtgcatccgttctgcaatttcctgcaggctctgactgctaaggaagttgagtcactgagggatggacttgcttctaataagtcatgtaagcttcccaatcagagtattgagctcattgatcaagggaaaagctcggatttgtcagccggtggaggagttgcttctagcctttctcctgctgcttcttctgattcagactcacagctacagttggagccggagactttacctcgttcagtgaatcatactttgaagaaaggcatgcccccattacattgtttgcaacagaagattctacttcaatcttcttggattctg

SEQ ID NO: 177299 - DNA, 208 bp, Arabidopsis thaliana landsberg
cttcaaccgccggaaaaactaaacaaccttcttggaaaaaagagaaactaaaaatgaactacccttcaaaccctaaccctagctccacagatttcactgaatttttcaagttcgatgattttgacgatacttttgagaagatcatggaagaaatcggccgtgaggaccattcttcgtcgccgactttgagttggagttcatcggaaaa

SEQ ID NO: 177300 - DNA, 112 bp, Arabidopsis thaliana landsberg
atgaaacagttagaatacctatgtgccttgcggctcgacagcctctttgaatcgcttggcttcttctcgggcttcacaagtagcgttctcattcgggtgtatagcgacgtcg

SEQ ID NO: 177301 - DNA, 256 bp, Arabidopsis thaliana landsberg
gttcaactgcagcacagaatgaaacaagaagcagaacagtttcgacagtggaaagcctcccgagagaaggaacttttgcaggtacacattacctttttcttcctacttaagtctttcgttgatattttctttcaaaattcccaaagcctcttagattctaactttaccttttactacaacacagttacggaaagaagggagaaagagcgagtatgaaaggcataagctgcaagctttaaatcagcgccagaaaatg

SEQ ID NO: 177302 - DNA, 188 bp, Arabidopsis thaliana landsberg
aaaaaaagaagcaaagaagaaggaaactacaaggaaagaaggttggcaagtgcacgttgtctgtacctattcgatatgacacgtgttttatcatggttggttcgtttttctacgcgtggagagattcttgtatttcagtatccagggctcttatacgctgctacgcgacctatagagttctaatgtga

SEQ ID NO: 177303 - DNA, 137 bp, Arabidopsis thaliana landsberg
atcaaatcttccactcttatgggttcagagaagaaatcaaagaagaagaaatcaaagaagaagagattgaagaagaagagttgaagaagacgcgtttgggaggagaaagagaagaaaaaaaaaatgacagagaataa

SEQ ID NO: 177304 - DNA, 320 bp, Arabidopsis thaliana landsberg
atggccggcaagcacttcggtgtgccggtgaacaagctggcggccagcgcgggagtcatctccgtgacgggtgcctcgggcaaatccatcacttacggagaactggtgggcggcaagcgcctcgacgtgtccattggcgccagcggcaagactttcggcatgaaagtggcgcctggggccaagctcaaggatccctccaagtacaccgtgatcggcacctcggtaccgcgcaaagacattcccggcaaggtgacgggccagttcacgtatatgcagaacgtgaaagtgcccggcatgctgcacggccgcgtagtacgccc

SEQ ID NO: 177305 - DNA, 109 bp, Arabidopsis thaliana landsberg
atgggactgcgacttcgagaatttgtaagccactattgtctctttctcaatgcatccgcaaccacaacagaacgagggagaagagaaattcttagtcataaatcttcag

SEQ ID NO: 177306 - DNA, 502 bp, Arabidopsis thaliana landsberg
atggcgggcaactatgatcgtgctggtgaggtaaaagcattcgaccagatgaagatcggcgtgaagggtcttgtcgacgccggaatcacaaaagttcctcgcattttccatcaccaagatgtggccgttacaaaccctaaaccttcctcaacgttagaaattccaacaatcgatgttggaggtggcgtgttcgagtccacggtcacgcgaaagagcgtgatcgcgaaagtgagagctgcggttgagaagttcgggttctttcaggtgattaaccatgggattccactcgaggtgatggagagtatgaaagatgggattcgtgggtttcatgagcaggactcagaagttaagaaaacgttctatagtcgtgacatcactaaaaaggttaagtataacactaatttcgatctctatagctctcaagctgcgaattggagagatcctttaactatggttatgctctgatgtataaacaagcaggggacttacccgtgatttgtcg

SEQ ID NO: 177307 - DNA, 174 bp, Arabidopsis thaliana landsberg
atgggaagcttgccggctgaagaacagctcctgttcgaggagcgccaggagcagctgatccaagaagcaaaggcgaagttccttgctgacttcaaagtggacaggaacaacaaagtcgttcggcaacgggcgacagatctgcgttcgctccgacctactacgattaccccaaat

SEQ ID NO: 177308 - DNA, 122 bp, Arabidopsis thaliana landsberg
gcggaagtggacatgaagaagagacaagttacacaaaatttgagactctgacgaggattggcattttatctgataatgccaatgctaatgtgtctcatatgagacggcttcttcatgcttag

SEQ ID NO: 177309 - DNA, 252 bp, Arabidopsis thaliana landsberg
atgcaaattctaagttttaaactcgtcgaccgaatcgcctctgcctttgctgataccaagtcaaggcctcaagatactcagcttcgccaaaatcaggccacaaaacagttggaaagtaaagctcagtgtaagcagattgccataaaaagaagttactgatcctttgctctccgcttgttctgatcaacaggtcagggtttgggaattcgctacactttgtcaacaactctttctccatcgccttttcgttaa

SEQ ID NO: 177310 - DNA, 218 bp, Arabidopsis thaliana landsberg
atggagaatggtgtgaaagtgaaaagcatgacaagaaatccctgggtgaagtaccagtgccatgggtgagttccgtaatagtctccaccagacgaaaggaaattaaacttcagaaaattgagaggcacaatgacccacgagccgtacatcagacggtccaacaaacaggtgaaaccgaggaccaaagatctaacaccagaagcaagttagcgcaatga

SEQ ID NO: 177311 - DNA, 160 bp, Arabidopsis thaliana landsberg
atggcggttccctccatctacagtgaagaaatcccaccgcagcaccaagtcttcatcaacttcagaggagaggagctacgaaaaagcttcctcgggtttctgttgaaggccatgagagacgcgaagatcaacgtctttacagatgagatcgaagtcagag

SEQ ID NO: 177312 - DNA, 654 bp, Arabidopsis thaliana landsberg
gctagaatcgagacgtccgtgctcgactcggtgttcgacctgctcttcaagtacgagcgacccgtgttcgaacagggtcagttcgtactcggcgccacccgttcgatgtggatcgtcgcggccgtcgcggccgcggcgctgatctatgccgtgtggacgtactggcaggtcgccgcgctcggggcgcgcgaccggacggtgctgttcgccttccgcacgggcctgcttctcgtcgccattttcgccacgctgcagccgatgctgcagctcaaggtcgccgtcccgcagcagaacttcgtcggcgtgctgctcgacgactcgcgcagcatgcggattcccgacgagggcggccagccgcgcagccagttcgtcacgacccagttcggcggtcccgacgcgccgctgctcgccgcactcggccggcgtttcgtgccgcgcgtgttccgcttctcctcggccgccgagcgcctccggtcgtcgggcgagctgacgttccagggcacggccacgcggctcggcgaagccatcgaccgtgcgcgcgatcagatgagcggactgcccgtcgccgggctcgtcgttgtcaccgacggtgccgacaacgcggagacgacgatcgatcagacgatcgccgggctgaagtcggaaggcctgccg

SEQ ID NO: 177313 - DNA, 130 bp, Arabidopsis thaliana landsberg
gttaagcttccgcatcagccagctgagcaactttctagacaataagtgcggcttgaatctcagcaggccgccaaaccccttggcaactacttcacttcaattcatcggagagagcattcacaagctttaa

SEQ ID NO: 177314 - DNA, 359 bp, Arabidopsis thaliana landsberg
atgtatgacatctggctgacggctgcaaagaaaccgcaatcgaccatcgcaacgaccgagcagccggcgaaaccggcaccggctccccagcaccagaagcgccagccccagcagaggcagtcagcgcagcagccgccacggccgcgtgcgccagcgccacctcccggttttcgataaggtcaatgacgatctgagtagtgcgatcacgcgcaggcgaggatcgcgagcgcatccgcgccgctgatcgagggcggcaatgtcaggaaatccgcctcgacgccaatcgcattgtcgagcaggacgcgatagcgctcacgcgacacctccacggcaccgaagctgcgcagatgctcggtcac

SEQ ID NO: 177315 - DNA, 216 bp, Arabidopsis thaliana landsberg
ttggtaactccgttgctcgccattgatctttctgccttgcgtatgagttcttcttttagttgtgagtacaagttttgtgttgatggtacatctcattatagtcgaggcctttctaaaggatttaaagttaagggtcgtcgtaagactacacaaaatgaagaccttaaaataagaatactaatcaacactttccacatgctacgatcaatattgtaa

SEQ ID NO: 177316 - DNA, 1692 bp, Arabidopsis thaliana landsberg
atggagacgcctccaacatctcattcattgttagggtttgcaatgttctctgaaaagaaggtcatccttatgtttaaactaaattaggcatgcatgttcacttttatattggataggagtttgtggattcgttataacttgcaagtaatatattcttatgtttttctcaccatctctttgtgaaccctaaacattcaggtcaccgtgtatatggctgcagcaattcattcaggagtttgtgaagtcaactctgatcctatgaaggcagacattaattacaagtatcataattttctggtatgttttaatggacagctctgtttggattgtttttaaaattatcttcttattccaggcaatggttgtgtttgtgaagcctgtatttgatacaagttccaaagctgacaaagagccccaatcatctcccacacatagtcccaatattgtgggtacaaggaacgaggtattgcgtaacatatactgacttttgttaataatgactagggaatgattttcagttttgtaacagcttgtccctattggtctgatattatatcttcctgtacaggataataactcagaacactctaactcacctgccccggaaccagatcaatattttgagttatctgattcatccccggcgcgtaaaagagaaaaaccaaatctctcccaagctgaagcacgtctcgtagccgagttcacatctcaaccaatacttgagacacaagcacttttaccaacactaaaaaaagcggagtattcacagtttgtcaaaaccctctcgagctctccaaatatgtatggttatcattcatttttcttatttccacaacattcatcatcaagttcatcactaatgctgtttttttacctcatagtgaacatctaaccaagtgtggattccttatttccaacaaattcttcgtcgaacttgccaaacctcagcaatgggtttcaaccctggtatgtagtccactatatttaccttaatacaaattaacctgttaacaagagatactaatgtgtaaatgttttatttcctagcacatggaggttttggtgtcattactttctcggaggctcagaactacacttgagaatcatcgttcttcttttgttgatccatggttcacaagccatctacaagctaaattcagagccttcaacgctgcgaaggtgaaatcacgtgttcgttggtcagaggacatgcagcgcttcatcaaaggatccaaaactgaatggttcaaggacatagatacaatttacgcacccatgatatggaatgattgccactgggttggtctttcaatcaatcttggcatatggagcgttgaaattcttgacccaaatacagacctctacgacgacgctaaggtaaaaagatgcattgagccagtagtcaatcttttgccgcacctcatccaaaggtactgtacgccagagttttctcagaatcacggtcttcaaccgtttggctggagtcgaattgatggtatctacaagaatttgcggagtggtgactgtggcccggttgccatgaagttcctcgagatccaggcaagtgataaactcccagataaaatggctgaaattactgacaaacacgtcgacgcgtttaggcgtcaatatgccatggacatatataaacaatgtgtctgcccactctattcatctaatgtttctgactag

SEQ ID NO: 177317 - DNA, 377 bp, Arabidopsis thaliana landsberg
gtcagcaaggaacgcgttgaatcagtacccacgtttctcactggacggtaaggacgctatgtaccggtcatccttccggcgccatcttggcaccagtgctgacatgacgatacagggtgggcggagatcccactgcggggatcaacggacatcaaagagatcgagccagatgagcttggagacaaaacgcctgccacggacagtgcgcggagagagtgtggtatggtgcaagacgggggttgttgcaaagctgatgggtctggagatgatacctgttccggacaagggaaaatcgggaaaagataagttagggactctgctcaagagggagcgtctaaggaggagagaacggactctggacgttaatggtctgaccg

SEQ ID NO: 177318 - DNA, 674 bp, Arabidopsis thaliana landsberg
atgattcatctgttcatcaactttccgtggactcgtcggactctttaccctttcaggctttttattagattctgcttaggaattccgttgatcaactatctcctagaattcttcagcatctcagatcaggtaaatgagatagtgttcacatcccgcacacgcctcaccaaagagctctgggaattcatatttgaagaggtcaagcatagatcgctcttagttgttggatcggaaagtgccagccatatatattcggctagaggcgactggattctgcgcgatatgcaaatcgaggattattatgagaaactcctgccatatgtcactgaagtggagtatgatcagggcattctggtgtggcacgttgcaactgagctcttacaccaaacagaagtagacaatgcagcaagaaatgtcagaagcaaagagtacagcaaaaccatttcagactacatgatgtacctcttagtcgcacaatcctctcttatgtcaacagttgcaggaattgataagataaaattcaaagacgctatagcagaagccaaaaactctaaagaggctaaaaagctgtttcagaagatgcatgttgagggttcaagagatgcaaagaaggcctgtgcagcaattgtggattcctttacggaatttgagctagggaatgggaacgccagacg

SEQ ID NO: 177319 - DNA, 147 bp, Arabidopsis thaliana landsberg
gttcttttcatcgtgacttatttccagcgaatgcttcttgcaagtgttatttctttgataacttgggagtattcagcggtaggaggattggagaagcctctgaatcgagatttaatgatgttcttcgtcgtagatttctcagactag

SEQ ID NO: 177320 - DNA, 168 bp, Arabidopsis thaliana landsberg
gtgagtccacatgagttcttgcaagctgtcatgaaagccagcaagaaacgctttaggattggccaacaatcagatccagtagagtttatgtcgtggctcctcaacactttgcacatggatcttagaacttcaaaggacgctagcagtatcatccacaagtgcttccag

SEQ ID NO: 177321 - DNA, 1345 bp, Arabidopsis thaliana landsberg
gtgagaggacttgtgaagcaacacctggattctttcaactactttatcaatgtcgggattcataagattgttaaggcaaatagtcgtattacatccacagtggacccatcaatctacctaaggtcaaactttttttatcatctttttatctcaatttcttgacatatgtatattgatatactttgtttcataatcagtatgtagaaccattggtgttttgaagtctttttttaatcgtcctacaacattgatatataaattgagattgttctatttattggatttctgctgtttcctaaactaacctttcgtagccaaattttaatgcaggtttaagaaggtcagagttggtgaaccgtcaattataaacgttaatacggtggaaaatattaatccgcacatgtgccgattagcagacatgacgtaaagagttcttttatttacattttttttgttgttcgatgtttgagcatatgttgggcagttagaattcggtgatatcttttgcattttccacctgtttctgttgttctgcattcttccacatcatcaataactttcttttttctcttggctgtgttaaatgcctgaaaacttcttgttttaatcatcagatatgctgctccaatatttgtcaatatagaatatgttcacggaagtcatggaaacaaggcaaaaagtgcaaaggtaaatgggaaaaacaaaatgtataatacaaactgctggttattggaaaattcaggctgaatatgatgtttctttatttcaggataatgtaattatcggaaggatgcctattatgttgcggagttgccgctgtgtattacatggaaaagatgaagaggaacttgcaagattgggtttgtattgtactcttatttcaagcattacatcttcttgttcatcatatttattgtatttcatttggattctaggtgagtgccctcttgatcctggaggatacttcatcattaaaggaactgagaaggtgcttcatacttcgtatatacaatctactcacagcatcttatggagtccatagattgcctagtagtccccctttgacttagtggatacatgttctgtgttggtgcatatctttaattcagacttgatcgtatgtttatttaactgttaacaccgttctcgtcctaattggcgtgttttggtttttagtttcttatgtcaatagagttatccgatttttcatggaatcctttcctttttacgtgacctgaatccatgccattgcgtgtgttggtgtttgatgttcatttcaggtgttgttgatacaagaacaactttcgaagaacagaattattattgattctgataaaaaggggaa

SEQ ID NO: 177322 - DNA, 1150 bp, Arabidopsis thaliana landsberg
atggctctaaacaactttttgactttccaactactccttcttctacttcgtgtttcatcggaatctccatggatcgtcgccggagatgtgtctcgaatcccgatcaatttcctcgaattagcaaagagcccggaggttttcgattcaatggtgagaatcagaaggaaaatccacgagaatcctgagctgggatacgaggaattcgaaactagtaagttcattaggtcggagcttgaccttatcggagttaagtataggtttcccgtagctatcaccggtattatcggatatatcggtaccggagaaccaccattcgtcgctgtaagagcagatatggatgctttgcctattcaggtctagtaccaattcacagaactctcatcgattagttacatttaggtctatggttcagaaatttggattaaggattagaacataatttgatttgataattgaattcaggaagctgttgagtgggagcacaagagcaaaaatcctggaaaaatgcatgcttgtggacatgatggtcatgttgctatgcttcttggtgctgctaagatacttcaacaacatcgccaacatttgcaggtctatgcatatttcccttttatactactttcatcagtaacattggtctaacacatttttttgtttttgtttagggaactgtggtgcttatctttcagccagctgaggaaggtttgagtggagcaaagatgatgagagaagaaggagcgttgaagaacgttgaagctatttttggtatacatctttccccccggactccctttgggaaagctgcttcacttgcaggttcatttatggctggagctggagctttcgaggctgtaatcactgggaaaggaggtcatgctgccatccctcagcatacaatagatcctgttgttgcagcttcaagcattgtcctcagtcttcaacacttggtttcacgtgaaactgacccttcggattcaaaggtttcattttttactctttgatgatttctctcctggtctatgcttaatttgtagtataacttattaaggtttcttctgtaggtggtcacagttactaaggttaatggaggcaacgcgttcaatgtcatccctgattcaatcaccataggaggaactcttcgagcctttaccgg

SEQ ID NO: 177323 - DNA, 490 bp, Arabidopsis thaliana landsberg
gtagggcaacacaaacttcaaactgaggatgaaacagaaaaacttatgggagcaagtaatggagaacgacttccttctgcaaatgaaaaccaggttggttcttactttaatttactatgtgactactatagtgaagaaaatatgatagattgtaacataaatcccaactccatggttctgtagcttctcagctgtataactgaaacatatgacgtaaaacaaatctcggatgatgactccaagaagacagactttgatattggcgagaaggaggcattactcaaagaaattgaggatctgaaaagaaaattgcagacgcctgtaaccatgtccaccaatgaactgagatcatctctgttggctcgttcgtttcaactccgtagcaagaatgctgaaaaagatatcgaggaagaaagacttaggtgcacagaaatggaaagcgagtggatatcattgactgacgaattcagagtagagattgaaactcaac

SEQ ID NO: 177324 - DNA, 1780 bp, Arabidopsis thaliana landsberg
atggcaatggagaagtctagctcaaagtacagaacccagttctggtacgtggcaatggcctcattcctcctttggcttgtcttgctttacctttttagttcttccgctaaaaccgttcataaccacgagagattgttccggcaagaaaatatcatcgatctccctgtcgaaaacgtcccacaaaaccacgaacctgatgaagctcctgtcgttaacgttgtctctgaggacatttccgttgataacagctctcttcctgtttctgtcgattctcctccggatgatcagatgtcagaagacaagaaggttgtgactgatctcgttgaagaacttgagaaagaaagggttgaaaatgagaagaagagagttgattcggttgtaattggacggtcatctaaggcaaggagaggacatcgagagccacgaaaggcgagatcttcgggtagattggaggcagagaagaaaagggttcgtcgtaatgatgctgatgagagcaatgcggagaatagtgatgagaatcatcaagcattagacaaagaaccgaactttttcgaggctaagaaagacgtggaaccaaagaaagcgctagttgatgataatgacgacgatcttgagaccaagagaggcaaggagttgccgaatgattcttccagtaatgttgttgaagatgataatgacgacgatcttgagaccaagaaaggcaaggataacatctctaaatctgaaccaaaaactcagagaaattttgtattgaataagaataatacttccaaggcgaaaaacagagtaatttccaagagaaaccaacctagtagagtcggtaaagttatgttacggccaagagaaacgcgaagtaacgatccatgtaaaggaaaatatgtgtatatgcatgaggtgccagctttgtttaacgaagagcttctcaagaactgttggacattgagcaggtggactgatatgtgcgagttaacgtcgaatttcgggttaggccctcgtctaccaaacatggaaggagtttctggttggtatgccacaaaccagttcacattggaagtgatattccacaacaggatgaagcagtacaagtgcttgaccaaagactcgtctttagcttctgcggtgtatgttccttactatccgggtttagacttgatgcggtttttgtggggaccgttccctttcatgagagatgctgccgcgcttgatctcatgaagtggctgagggagagtcaggagtggaagaggatggacggacgagatcattttatggtggctggtcgaaccacttgggactttatgcgtacaccagagaatgaatccgattggggaaataggtacgccaccatactatttgatgttttaatgaatgtcatactaatatttcatacatcacaaaaaacgagttaaaagatcgatagctttttgcttttactagttatactatattgcatttcaataacgagaaaagatgaaaacttgatgaattatgtgtatggtaaaatagttgcatatacagtactcatattttgaatacgtcaaaatataaaaaaataaactggtaacattttggatagaatggaatcacaaatggttaaggaaagaattcttttattggtttgactttaatcttgcagaatttcatgaatgttttaagttgtttttcattggacaagtcttctcattgttgtttctctatctacctagccaggttaatgatattaccggaagtaagaaacatgacgatgctactaatcgaatcaagcccatggaactaccacgg

SEQ ID NO: 177325 - DNA, 401 bp, Arabidopsis thaliana landsberg
atggtgcggggcctggtcccgacggtcggcgcggtcgggacaccgtacacgccgcccacggtgtcagagaaggtggccccgccgtcgtgggccgcacgatggcgaggagttgttccgccgcggcaatctgagcagcgatacggtcggcggcttcggctcgcctcccacacgagggccgcttcccgcagacgtgcctgttgcgccgcgtgctccgcgtgggcagcggcgagggcgacgacggtgtatccctggtgggcgaccgatggaggaggcggcgaatcaacgacaggatgtgtattgacgaccagcgagggggattggcgggggagggtctccggatctgcaaccccgtgggaaccccagtcgccacagcagtcagggcagaggcggtgctcgcggcg

SEQ ID NO: 177326 - DNA, 129 bp, Arabidopsis thaliana landsberg
ggtaaaggtgttcttctatcaacctatgatattgtgcggaacaatacaaaggctgtgcaaggtgccgaccattatactgatgagaatgatgaatatggaaagaaatgggactacatgattctgcacgag

SEQ ID NO: 177327 - DNA, 499 bp, Arabidopsis thaliana landsberg
atgaattatgcgatcatatacagtaatggtaacacacggatcgagagacaaagacaaacgaaaataacaagaaatgcagaaatcaagcaagttcaagagctgagacataaacccaggtagagaagctgagattcaaacacaggaatccaacgaaagatcagagatttagaaacgagagattcagaaactaaccgacgagacttgcggcggcggcggcggcggcggcgacggaagaggatttgtctggctttggggatcctctgctcgctaaaacgtctgcaattgttatattactaagttacccttaatgttcctgacaacatcgataaagaaaaggttatttacggaaaacattgatttgccgagattttgggttggtatgcagctatattatttggtttgtggatttcataaaccgaaaaatctagtttttagatttttcggtttaacagtaaaccggattgaaccatcttcctatgaaattaaaccaaaagcctga

SEQ ID NO: 177328 - DNA, 458 bp, Arabidopsis thaliana landsberg
atgctgcggggggcccaagcccatacctacataacccggatcggcgagcagcagaccgtcgttctgcccgactacagccgcgccctgctcaacgccgattcccggatggacgtattgttagaccgcgaccggcggatggtcacgctgcgttatggccgcgccaatttcaccgtggtgccggaccaggaccgccctttcatcgtcgaggcggccgagggccgcatcctcgccgacgcctcgaacttcgacgtgcgttgcggcggccggaacgcctgcgtcctgctgttttcgggccaggtctcggtcaatctcaacaatgaggtccggcggctgtcgcccggcgagcgcatgacgctggcgggcgaaacggtcgccagcatcgaccggccgagggcccccccagccccggcctggcattcgggccgtaaaatcttaaaaatacccgcctgtcggacgcg

SEQ ID NO: 177329 - DNA, 111 bp, Arabidopsis thaliana landsberg
gctaaccaaaggaaagtagagataaacagacttccagagcagattgtattatctgaagtccgccgtatggttgaggagatgcagaatttgaataagcagattgagaatacg

SEQ ID NO: 177330 - DNA, 95 bp, Arabidopsis thaliana landsberg
atgatagatcggagtcggaggagtcggaggagtcgtcgtgtgtatgctcgaacaattcggaaaaaaaacaagagaaagtggaatgaatacgggag

SEQ ID NO: 177331 - DNA, 1144 bp, Arabidopsis thaliana landsberg
gaatgaccataacttatgcagacagagaatttatccatcatccacaactacgatggatgttcttttgagcggcattatatcgacccgaatattccagatgggtaggttagcttgtggtttccttgatttgaatatatatgtgttctgagaatttcgtgatatcttactctactttcatcttcttgttttcagttttgtattaacaaaagaacagagatacaggttgcagtgttactacaccgaatcaggtttttcccttctctgcacttactttgagatcaaaacacacttgcgcataatattcaataccattacaatagttgggaatccgttactcgatttagtttggaataataaactgatagaaagtagattcaaatgtgtttatcaatcaagaatgaaagttttacaagaattcccttttctctttctcggtctctttgtggtcttaaccaggtttcctcgccgatgtattcgatgttgcacggttttggaagctgcaaaagtttctccagccgaaccggtgccttgaagcctggttgaggagggagcttcaagctctgatgcaggtttgcttctgtacaaaatccctttcatggatatttctgcctttttgctgttatcttcttgttcagttgttcgcaaagatgattttgttctttgtttgcttcaattttttcccttgtctataggaggaagatgttgatattgttctgcatcatttggtcggtgtgatggaatccttctgcaacaggtaattgttttaaggagaatgtaaaaacttagaactcgtgggtatatattttgattggctagagttttaactggtcaaagtagaagtttgatgttttgctcatgaatagtctctatttctctcatattcagaatcaaacagagacgcaaacaagaaacaagaagcgcagagacaacaaatcaagaacaattcaaagcagttgtctcagaagcagcacgtccatttgtaatggcgagaacagaccgatttgtggatgaacttgaactctttctggccgcgggactaaacttggaggcttatgatgcaatctataagcagcgtttagaggggaaaaaccgaagagagatcggtgcagctagtgaagaaagagaagaagtggaagaacataat

SEQ ID NO: 177332 - DNA, 107 bp, Arabidopsis thaliana landsberg
atgggtgttgtccagggcctgccggtgggcctgagctttatcggccccagatggagcgaggccacgctgttgaagacgggatatgcttttgaacaggttcggaagag

SEQ ID NO: 177333 - DNA, 902 bp, Arabidopsis thaliana landsberg
aatgatgcacttgagcaacttaatacagtggaaagagaaatgcaggattctttgagggaactggaggcgattaagcctttgtatgaaagtcaagttgacaaggaaaaccagacatcaaaaaggtaagcatatatataatgtcattgtaacacggaaatagctttgttcatgtttacaatgaatgggttgtatgttgctataggcctcctgtttgagggaagtaatagtattaatatcctagaaagactacaacgatgattttgggtaaaagcttaaatgttgaattaaaatgtgaagttctactgtttggagtgatgcatattggaattttgtttctggttttctgttagagtcatcttacgttgataatcttgtttatggtttcttcttacagaatcaatgagctggaaaaaacacttagcattctttatcagaaacagggacgtgcaactcaattttcaaataaggctgcccgagataaatggctcaggaaagagattgaagatcttaagcgtgttctagactcaaatactgttcaagtgagtttgcataaatatggaagatgcatcgtagcataattagatcacatgatcgcacaatgtttaaaagttgagggtgtaaaatgtatttccttgatatttagatctctctatagtttcatcttttgtcagtaaatatatggaatcagtttcatgtgattggtgagctaatacattcattctactataggagcaaaaacttcaggatgaaattcttcgcctcaatactgacttgacagagcgtgatgagcacatcaagaaacatgaagttgaaattggtgaactggaatctcgtatttccaagtcccatgaactattcaatactaaaaagagggagagagatgaagaacaaagaaaaagaaa

SEQ ID NO: 177334 - DNA, 1020 bp, Arabidopsis thaliana landsberg
ggcctgatcctaagcaacgcactaagagcccaaaagagcgccgaagatgaaagctatgaaattgcgtttaataatttacgctccgaagttatcagactgagaaacgaagctttggaaaaagataaaattctgcttacactggtagataaagtgaaaaaagacgaagctgcttcaaaggcccaggccgaagctcaaaaacgcgagattaaagatcttcagaaacagctggctagagctaaagaggagcgcgcgcttgaggaaacgaaacgagaacttagtgattttatggtcagcaaattggaatcaaaagttaaggagcttcgcacatctcaggggaaatgctatgtcaaatctgtagaatgtgtgaataaaattaaatccagcttcgccagcgtaggcgccttttccagcgaagagaatttctctcgaggcaatcccgaaggtccgctggaatggattagccacgaagcagaggccttcgaagagattctgaacagtcgtggcgacatatgcgctttttcgggcgccagaggaattgcttgtgtcttagagaagaagggttgcgaacatgtaaaatttttagctcaatccgaagctaccttatcttccgaagacatcaaggacccctcggccgaagcgagcgcagttggaggcaaattttttactgatatctggaacgactgcggccgaggaatggcacaagagattattgagagaagcgaaaaacgcattcatgatgctagaagagtagcagacgctgccgaaaagagtagggagcccgaaggacagttaggtaccaactagtcgttcttgttgcgctgtaattttcattttaaactttgctcacgatttgtaaaagtactgaagaagtgttctcttcgctcagaaactgttggacgatctgccgacccccacacaaaaggggatgaagaaattaatcaaatggccgaaactatcatggacaaggtcgttgaccaacttctgaataaagccgccgaagcagtattgagggaagattag

SEQ ID NO: 177335 - DNA, 525 bp, Arabidopsis thaliana landsberg
aacgagctcgaacacgaagacatttcttacttcgaccacgaatttctccagagcatgggaatctctattgccaaacaccgtctcgagattctcaaactcgctcgtcgagatcgcaagaactctcctcctctcacctctcgttccatctccagagtcgtgactgcgattaagaaaaccaggaaatgtttatccgatcacgtacgcgcctggatccgccgtgaagaagagtcggcgtcgtctcgagctctggtgttggtgccgaagaagactagcaacgggattgggaagtggagaggtggattcctgaagaggaacaagagatctgtgatgccgaggaatggaaatggtggattggagaaggaagagaggttgttgttgaccaatgggactccttgtagaatcgatagcttctcaagtcccatggttttcgattacagtttcaaggatgagaaactttacgctcaagatacttattttgaagatatcaaatgggattcaatgtttcagaatctcaaacctacttag

SEQ ID NO: 177336 - DNA, 105 bp, Arabidopsis thaliana landsberg
agtagaattagaagtggcttcaacggaaacgacatcgataattcaaaaacatatcaaaaacaaaagtttggtatagaaaatacaccagtcacgatccaaatctag

SEQ ID NO: 177337 - DNA, 50 bp, Arabidopsis thaliana landsberg
atgaaactttatcgacaatcggatgaaaaatcccatacgcagcgcccaag

SEQ ID NO: 177338 - DNA, 583 bp, Arabidopsis thaliana landsberg
aaacttcgagtttggtgtcgggtatctaatgggcagtggcatctggggaagatacagtctacttccgctgatacgtcgcttgttatgttgtccactgcaaatgtgagttttcttaacaatgttgcactttccatctgtgatattgaagagtttctgcagtctgactttcaggtttctgtgatttggtgttatcaaaggttgtgaaagtgtctactgaagagctttttcctgcaaacccagatatattggaaggtgttgaagatcttatacagctcagttatctaaatgaaccatctgttctttataaccttcgtgtcagatatttgcaagacgtgatttatgtgagttattgaacatcatttggctcatccgattagtttctcactctttggtgcttaattcctaaagaactttcatgtttttcttatacagagtaaagcaggacctgtattgattgcggtcaatccattcaagaatgtagaaatttatggaaatgatgttatctcagcttatcagaagaaggttatggatgctccacatgtctatgctgtggcggatgcagcttatgatgagatgatgagag

SEQ ID NO: 177339 - DNA, 421 bp, Arabidopsis thaliana landsberg
atggattaccgtttatgggattggggcaaagacggtttcagtcaacccatagttagcatacgcgcagctaaagatgatacgatccagctattattaggggaacaactagacgctagtcatcggattaacaggactcctcctggaacagtacgtttccgtcaaatcgtgcttcctgtcaaaaaaggaacccataactaccggattcctattgaatccgacaaaagaaatacaaaaaggagtgcgattaagatgccagcctatattggagaagttcttccctttcgctatctggccattcaaggggatcttagtaaaaatgttcctgtagccgtcaccagagatcttatccatattctttttgatcagaagactactaattttacaagttcggactcagttttgaatcaggtctgggatttat

SEQ ID NO: 177340 - DNA, 315 bp, Arabidopsis thaliana landsberg
atgcagcgtaagtttgccgaagctacaaaaagtcgttctaagcaacgcagtgtaagtttgctgaagctacaaaaagtcgttcctaagggagcgcagtgtaagttttctgctccaaagtcgttccaaagggaatgcagagcatacagcgaaaagtcaacgctgataccgcctaagtaaaaggcgaagcgcgaaaagtcaacgcgaacaccgctgaaagtaaaaggcgaagaagctcataagggaggcttacagcgaaaaataaacgctgattccgctgaagtaaaaggcgaagaagctcctaagggaggcttataa

SEQ ID NO: 177341 - DNA, 542 bp, Arabidopsis thaliana landsberg
ttttccggcgatgtgtgcgttctcgacaattaggttcgtttggatctactgtgtttaagacagtttcaatttctccacgactaaggttaggtcaaagctcgtttcctatgcaattaagatatgcctttgctgttcttgcaagagatttaattgttagacaagtttgaactactcagttttctctaatttcttttacccatttttgccgaatcttttgtgattcttgcaatcggatgagattaggagattgatgtttgttctgtaacttttaatcggtgattaaaaagaagtctcgttgaccggtgattttccgacgacgtttctgattcaccaggcttgagtctcatgtgcagtggaggttaggcctggacacgaagcgaatatcgggaaaaattgtgatatttgttattcgattcgttttaaccgaatacttgattttattatttgctttgattcgaaactttccggatatccggaatttcgaatatccggatttttttgtgatatttgcggatatccgctttgatacgtataaatattaa

SEQ ID NO: 177342 - DNA, 932 bp, Arabidopsis thaliana landsberg
gaaaagcgatatatgaaggaagatctttcaaaaggatcagcagaatctggagctcaaactggctctcagagatcacaagggttaaaaaagtcgttatctggtcagagagctaccatggctagactttgtgaagaaggtataaattttctcatggattgagatctttttagcttgatattcttatatttcgcttcattgtgggagaaattaattgacaccttctctacttcggttttagtcggaattcagaagatcttacaactcattaagtctgaagacttggaagttcaaattcaagcagtaaaagtggttgctaatctagccgctgaaggtgcagtttcatcgctctattaacatgtgtaaatattctttgtttgtcacagcacctaaataacttgcattatgtatgtgtatgtatagaggctaatcaggtaaagattgtggaggaagggggtgtagaagctttgcttatgctagtccagtcatctcaaaattcaacgattctcagggtggcttctggtgcaattgctaatttagcaatgaacggtgagcacttctcttggtggtccaattgcttttatgatatcataaatccgttaaacttactactgagaagcagagctgattcagaacttaagttcccttgtggttgtgtcatttctttacgaggcctgaatgttagatatgtaagatgcaatagacggttcttcatgccatggttttccctgctgtcaagttattaaattttggaatggaaaatatgtgattggtttatttatatgttttcattgaattattaaccgcagagaagagtcaagatcttataatgaataaaggaggtgctcaactcctagcaaagatggtgactaaaacagacgatccacagactctaagaatggtagctggtgcgcttgccaatttatgtgggaacg

SEQ ID NO: 177343 - DNA, 373 bp, Arabidopsis thaliana landsberg
atgaaagaagagttgaaattgtatgctcgtcgcaataacatggatgggcttgctgatgctatgaaggaactttcggaactgtacaatatctctgaagaatccaatcaggtgcaggtctcggagactagctctgttgtagctgaagaaacagctatgtctctgaacaacgataatgatgtccagagttcattctccactcctggaaattcgaacatcacatcagagatcacgaaagacgatgctttgcaagattcaaccgtcacaaaaacaactaaggaaaaagatgctttgcaagattcatctgtcacagaaacaactaaggaaaaagatgctttgcaagattcatctgtcacagaaacatttaaggaagaag

SEQ ID NO: 177344 - DNA, 261 bp, Arabidopsis thaliana landsberg
atggccacagacaaactgtcatcgtctgtacagctccgcgaacgaaagttctcaaggttgggcacattaagaccgtccaacaaactgacagtgatgcttcctttgctagacgacatctgcaaaacgaggtaaacctatcccccacatagtcatctaaaagacgaacaaccggaatctaatgttgcattctgcgactcaaatttactctctaaaatcattgaaaacccaagtgaccacgagcatcgcataaccatgctttga

SEQ ID NO: 177345 - DNA, 318 bp, Arabidopsis thaliana landsberg
atgctgatcgagcacttccaactgcgccaggagatgtacctgctcgccgacggcctggtggtctacggcctgttgctgatcggctacgaagcaacgctgacattacgtccggtgctggcgcaaaagcgcggcatgctcggccacgtgctgggcgacctgcacgtgatgcccgtggcgatgcgccaactggcctgggtgcaactgttctcgtggttcgcgatgttcgcgatgtggatctacaccaccgccactgtgacccaggtgcagttcggcaccaccgacccgcattcggcgctgtacaacgagggcgccaactgg

SEQ ID NO: 177346 - DNA, 306 bp, Arabidopsis thaliana landsberg
ggcgtgccggcgttacgaacacgcgtctatatcgacggctacaatctctattacgggtgcctgcgcaagacggccttcaagtggctcgacgtccttgccctgttcgagacgcacatcctgccgacgatcctctaccggcccacgccagacactgcgccggcgaccatggccctgcatccggattgcgcgatcaagtattttaccgcgaagatcatcgaaagcgcctcgaagggcgaagattccgtctcgtcgccagcgcactatcacaatgcgctgatgacacaatgcggcggccggctcgccttc

SEQ ID NO: 177347 - DNA, 287 bp, Arabidopsis thaliana landsberg
atggtgcaggtcatcaaagttctacgagcacatcaggtcattcccaatgctttcgctgcttcatttctttccaatacaatataaaacaaagacatacgatattttcaaaagaaataatcccatttttcttgtcttgaccacaggaaaatatgcagtgtctgagcaacatggacgttggaaaactattgatggtggatggaaaattcatcgttaaacgcccagcaaatagacaacgaattgactatcctctcttcttaccccctaaaatgaacgagttttttgtttga

SEQ ID NO: 177348 - DNA, 189 bp, Arabidopsis thaliana landsberg
agacaagcgaaggagagaggcggaggagataggacgatgtcgtccatgtacctgcctacgcacgtcgacgtgctagtctacgccgcaacctacaccagagcctacgcccaccaagagaatatatctgtaacacctcttgtgtcaagcatgcttatacatctcatatgcatcatgaaagcatcctcataa

SEQ ID NO: 177349 - DNA, 178 bp, Arabidopsis thaliana landsberg
agcacggatcgggaaaaaggcttgccgtggccgcgagtgcttgccagcggagatccaagcgaagacggccggcaaccgaaggcggccgtcggtgctcgctgcttccaactcgttccggggggtgcacgacccacgacgccttgtctttgcttggacgcggccgcacgaacaaacataa

SEQ ID NO: 177350 - DNA, 69 bp, Arabidopsis thaliana landsberg
atgccgcgccgacgctcagctgcggacgatctgctcgtcgggcgtgaagccgaccgcgcggaccgcgcg

SEQ ID NO: 177351 - DNA, 1873 bp, Arabidopsis thaliana landsberg
atggctttagcttccatgggaatgggagagaattattgtagtacttgggtttggaacagagaggaggaagaagaagggtacatcagtgaaatcatgtaagtgagagtgttcttgggccgggaaagagatgcacgtggacggttggtattatcgttaattgtagcaatgatcatgtgctcttttgtattgatcctagattttgttttcttcaagtttcggtaacagaggatataaaaattgagtcaaaactagaagaaaaattcaaaaacacgaatatcttttgaaatggcttgaaacccaatagctttggctagagaaaagtccattatgttgtgtaagcccattatctcacaaacgtcttttgccaaaaacacaattctcaacaactacacaatcgaagtcgaactctcaggattcaatcttgataccaaagagaaacagaaataaactaacatcatcgctactgtcgcctataatcttgtgagctctttatcgtcttcaatggaaggtagactttcttaaatgaattgcttttgataattttcagttttcattagtcgattgtgtagtcgagcttccaaagctggatccttcaaaattccttagtgttggtgtttgattcagttcgatgatgtaaaaactcaaataagagtgattctagaatgggaaattttctatagaaaggtagactctgttctgctgtctcattttgaagttttcctttttggattaccaaacctgctagcttcttactcaatttcacctttttagcaatcaattttttcatctgttgacttgaaaatttccgggaagttttatgtttgaaattgagagaaagtggggttttttttttgttttcaggaaaggttttccaaaactttaatgtagtacagagctgctaccgacaaaataagcagtttaagacacgataccaaagagaacctgacctgttcatgtctactttacttccctgtccaagagagaagatggcatttaacctcaactcttgcatgcgtgctcacactttgtctaaataccagtttgttctttcaaagcaaagaactttttactgcaatggtccgttctaggcttctttagtatttttttcccggcatcaaattttttatagccctgcatttgtgtattgtttccctattttgcttggcaaagagatgtggtgttccttaaatctcttttttcttgttgaaatgggtgccttactttggagttttcatttgcagctacttcgtcaagtgctactgtgccatctcttgacaaaaatgattttctgaagctccaaaacggcaggtgaaccatacatcacttaccagctaatcatatatttctctgttcaacaacatttagaaagtactacaaatatccacattttagaattccatgttgactcacgctacgtttcattgttgaatccccagtgatattcggggtgtagcggtcactggggttgagggggaacctgtaagccttcctgaaccagtgactgaagccatagctgctgcttttgggcaatggctgttacacaagaagaaggctgaatcccggcgtttgagagtatctgttggccatgactctcgcatctctgcacaaactttgctggtatgtatctatttccttgatttgtgggacgttttccatgtggcaacagttgagacattaagtattaacctctaagtatttggtctacatatctctttactcgcaattttagcccaagacgtttttgcacttctggaaacagtgtctctttatgcaatgaataagtaatttatccactggaaatttcattgtttactttgtaggaggcggtttctcgaggtcttggtgtttctggattagatgttgttcagtttgg

SEQ ID NO: 177352 - DNA, 266 bp, Arabidopsis thaliana landsberg
aaaaaaaaaaaaagaacaaatcggagggttcagatttcagaaacaaaataccgaaccgttaggtcgttggttttgccggttcgtttgcaccgggattttagagctagacagggaccaaataattaagcggatcgtgggtattaccggtccgggtccggaaaaacatctgttagaaactaatctcgtttggcccaaacccaaaaaagctagcttcacggcgtttgttgttcttcctcgctcttcgccgccttcactcgcagtcgcag

SEQ ID NO: 177353 - DNA, 1380 bp, Arabidopsis thaliana landsberg
gtgaaggatagtctgagaaatgaaccaagatatagatccgttgcgcacgaggatagggaggttttttattatgagtacattgcggaactaaaagctgcacaaaggggagatgatcatgagatgaaagccagagacgaagaggtaaattaactttttatattcacaaattacaattcatgaaaagcgctagaaagttccacaatgtttaagcagccctcttatactttcttttcaaagtgagaatattcacgtattccctgttttctggcatgttatattacttgattgtttgttctaatttgagagactttggaaaatattattatcatcagattctctgcatgctattgctagtggtgcaggaagaaacaagttgtaaattagcgaatgttatagtttgctatacaagatttttggatctcttttgtttatgtgcctggaatccagcgtaaaaaaataaaaatgatgttttactggctataaatgtggtaaactacatagacacataatgtatttacgtctgtgtgattcctgaatttgggttcaggacaaactgagggaacgggagcgtgagttgcggaaacgcaaagaaagagaagtgcaagaggtggaaagggtacgacaaaaaattagaaggaaagaggcaagctcctcttatcaagctttgttagtggaaaaaatcagagaccctgaggtatttctacttcttttatgtagctagctaaaagtttcatttgggctaaagatgttagtttgtaaattgtttactctgtggggattctgattggttttctttgttactttcttcaacatctgaaggcatcatggacggaatctaagccaatacttgagagggatcctcaaaaacgtgcctctaatccagacttagaacctgctgataaagagaagctattccgagaccacgtaaagtcattatatgaggtacgtgtactactcaactgtaacccttaccaaatcaaattctcagcattttctgcaacaagatcagaacaaaacttagtgtcaaggaccttttcggcttatctcctttttggttgatttgaggaaggaaatatactatggttgcctatttcgtctaaatgtttttcttattgtgcttcacagcgatgtgttcatgacttcaaagctcttctagctgaagcgttgtcatctgaagcagctactctacaaacagaagatggaaagactgcgcttaattcttggtcaacggctaaacaagtactgaaacccgatatcaggtacagcaagatgccgaggcaagatagggaagtcgtatggcgtcgatatgttgaggatatatcgaggaaacagagacatgaaaactatcaggaggagaaacaacgagattacaagacctaa

SEQ ID NO: 177354 - DNA, 529 bp, Arabidopsis thaliana landsberg
  unsure (1)..(529): unsure at all n locations
atgggaaaggtgtactatatatccaggggatcacttaagcttgctaataagcagttcaagacggttcagaacgattatgagatgaccctaaatgagaattctgaggttgaagaagctagtaatgaagaaatgtttacccctgaaactaaattcaactttgtacccattgatgagttgggtacatacgtgaatcagaaagaccttattggtaagagctgttatctatattgaactctttttgtttgtaaacattggtttatgatgaaacttagttagtgactttaatgtttctcatttccagatgttatcggtgttgttcaaagtgtttctcctaccatgagnnnnnnnnnnnnnnnnnnnnnnnnnnnnnnnnnaaagagagatataactttggctgatgagacaaagaaaactgttgtggtgtccctttggaatgatctagcaactggcattggccaagaactgctggacatggctgataatcaccctgttatcgcgattaaatatcttaaagttggagcttttcaag

SEQ ID NO: 177355 - DNA, 108 bp, Arabidopsis thaliana landsberg
ctgtccaacgaggtgttccacgaataccgccgaagcaaaggacggatgcttggtttcgccggccagacggataaggagactgcggatgtaacggagctggaaattgag

SEQ ID NO: 177356 - DNA, 82 bp, Arabidopsis thaliana landsberg
atgacatttgagaagttcagggaccaggtgctggctgatttcaggatcgcctgcatcagcagggaagcatcgctgctgggac

SEQ ID NO: 177357 - DNA, 922 bp, Arabidopsis thaliana landsberg
gattgtggaacctgcagctggagaaatcaggatagatggaataaacatcttgaccattgggctgcatgacctgcgttccagactaagtatcatacctcaagaaccaaccatgtttgaaggcacggttcgcagtaacttggaccctcttgaggaatacgctgatgaccaaatctgggaggttagttggctcttgtttctttcaatgtttctgcagatagaaaaaggaaggttctcacacgatttttgttgctctgatttcaggcactcgacaagtgtcaacttggggatgaaataaggaagaaagaactaaagctagattcccctggttagtacggctaaaactatagtcgacaagagtcatctcgaatctgttaaaacacatctaatgaaaggaatctctaatattgcagtaagtgagaatggacagaactggagtgttggtcagagacaactggtgtgtcttggacgagtcttgctaaagagaagcaaagtattgattcttgatgaagccacagcttctgtagatacagcgactgatactctgatacaggaaacactgagacaacatttctcgggctgtacagtaataacaatcgcacacagaatatcatctgttatagacagtgatatggtactgctcctagaccaaggtaatgatcatacacttttttaatacgtttgttctatcagaaggaaggcttagatgaagattggttatgtatctaaaaatgcagggttaatagaagaacacgattcaccggcgagattgctggaagacaagtcctcgtcattttcaaagcttgtggcagagtacacagcaagttcggattcaagattcaaaagaagttcaatgaaaacaaactagttataataaaattaataatcttgccttgtcgtgtttgtttcagaaagaaaacagtaa

SEQ ID NO: 177358 - DNA, 675 bp, Arabidopsis thaliana landsberg
aagttcacacctttcattgtgaattctctgtttctccttactatttcctctgccctcctcgtggtcaacactgattcggaaaacacagcaaaagtgtctagagtaaaatatgtgatagggataatatgtaccattggtgcttctgctgggattggattgctgctatccctggtacaactgatcctcaggaaggttttaaagaagcaaacattctcaacggtcactgacttggtcgcttaccaatctctagttgcaagctgtgtggttctcataggacttttcgcaagcggggagtggaaaactttaacaagtgagatggaaaactacaaactggggaaagtgccatacgttatgactttggcctcgatagctatttcctggcaagtctacaccattggcgtcgtgggactgatctttgagtcatcttctgtgttctccaattccataactgctgtgggattgcctatagttccagttgtagcagtgattgttttccatgataaaatgaacgcgtcaaagatcttctccatcattttagctatctggggattcatttcatttgtctatcagcactacctcgacgaaaagaagttgaagactagccacacaagtcctgtaggagatcctcatctactacctgctgaggaaggtcacacaaacatacatagtgtatga

SEQ ID NO: 177359 - DNA, 143 bp, Arabidopsis thaliana landsberg
tgatattgagacaagacgatgaagaacgaaaagggaagattctgaaggaagagaaaacagcttgtggagaagacgagagacgacaagaaggatcatcatcaacgacggatgagaatatttggttatggtggttaatggagtag

SEQ ID NO: 177360 - DNA, 98 bp, Arabidopsis thaliana landsberg
cgaagggcacagagagctacgatcgatttctccgggactcagatgggatggcgtcggaatcgccgaacagtcgttttaaagacgaaacgattcgttaa

SEQ ID NO: 177361 - DNA, 456 bp, Arabidopsis thaliana landsberg
atggaggatcatgagaagattgatgggaagaagaagaagaagaagagtgtggctttgattccggctaactacgtctccattcttcagcttcaggaacgttggctgaaggagaaagagaagaaacaaaaggaaaaagactttgtagagagaggagtgaaacagcaggttgatcagagacaacgaaggagagaagaagaagaaaatgtagtgaaggccatggaaacaaaagtgaagctcgaggaacatagtttaagcggaggtgttcgtatgcattgtagtgtgaatcggtggaaaagggatcaagtatgcgttaagaaagaggaaattaaggtttctggaattgtgagcaacaaggacgaagatggtgtagattcgagggagaaaaagaagaagaatccggtgaaagagaacactaggagggttttcaagtccaaaggagagaatgctgctaaggaa

SEQ ID NO: 177362 - DNA, 2502 bp, Arabidopsis thaliana landsberg
atgagtcgcctttctccggccaccggaatctcttcccgcctccgcttctccattggtttgagttccgatggacgattaattcccttcggattccggtttcggagaaacgatgtcccgtttaaacgccgcttgagatttgtgatcagagcgcagctctctgaagctttttctcccgatttaggtttggattctcaggttacttacttacttctctcgacttccttgcttgttttcattcactttgttcgatcaatctaaacttagagagacagagtttgcgaagctgaatttaattgttcttaggatctttagattatcgaatcgtttcatgatttttaagcgaaacttttgctgatcagagttgcttatttagtatttcgactgacttcatacactttgatattgaaggctgtgaaatcccgcgatacatcaaacttgccttggattggtccagttccaggggacattgctgaggttgaggcgtattgtagaatttttagatcagctgagcgactacatggagcgttgatggagacactatgcaaccctgtgactggtgaatgtcgagtaccgtatgatttctcaccggaggaaaaaccattgttggaggacaaaatagtatcagtgcttggttgtatattatctcttttaaacaaaggaaggaaagaaattctctctgggaggtcatcttctatgaattcatttaatttggatgatgttggggttgcagaggagtcgcttccaccacttgctgttttcaggggtgaaatgaaacggtgttgtgaaagcttacacattgctcttgagaattatctgacgccggatgatgagagaagtggaattgtttggaggaaattacagaagcttaaaaatgtctgctacgacgctggttttccacgcagtgataactatccttgtcaaacactttttgcgaattgggaccctatttactcgtcaaatacgaaagaggatattgattcctacgagtctgagattgcattttggaggggaggacaggtaacccaagaaggattgaagtggttgatagaaaacggatttaaaacaattgttgacctgagagctgaaatcgttaaggatacattctaccagacggcacttgatgatgcaatttcccttgggaaaattacagtggtgcaaattccaattgatgtcaggatggctcctaaagctgagcaggtcgagctgtttgcttctattgtatcagatagcagcaaaagaccgatatatgttcacagtaaagaaggtgtttggagaacttctgcgatggtttctaggtggaagcagtacatgacacgaccgatcacgaaagaaattccagtttcagaagagtcaaagcgtcgggaggtttctgaaactaagcttggatcaaatgctgtagtatctggtaagggtgtacctgatgagcatactgataaagtctctgaaatcaatgaggttgatagtagatctgcttcaagccagagcaaggaatctggaaggtttgagggagatacatctgcatcagaatttaatatggtgagcgatcctcttaaatctcaagttccaccaggcaatattttttcaagaaaagaaatgtctaaattcctgaagagcaaaagtattgctcctgctggttatcttactaatccgtccaaaatattgggaacagtgccaactccacaattttcatatactggtgtgacaaacggaaatcagattgttgataaagattcgataagaagacttgcggagacaggaaactccaatgggacccttctacctacaagttctcaaagtttagattttggcaacgggaagttttcaaatggaaatgtgcatgcgtctgataacaccaacaaaagtatatcggacaacaggggaaatggcttctctgcagcccctattgctgtgcctcctagtgataacttaagtcgcgctgtaggatcccattcggttcgagagtctcagactcagagaaataatagtggttcctcctcggattccagtgatgatgaagctggagctattgagggaaatatgtgtgcttctgccactggtgtagtaagggtgcagtcgagaaagaaagcagagatgttcttagtccgaactgatggagtgtcttgtacaagggaaaaggtgacagaatcctctatggccttcacacatccaagtactcaacagcagatgcttctttggaaaactaccccaaaaactgtcttactgctgaagaagctcgggcaagaactgatggaggaagctaaagaggtaaacgcgttgctttttaagtctaaaagattctattttctttgttccacatttgaggttgcctgcaatttaggaagtccatgaaaagttgttggtctttcaaatttgtttccaggctgcctctttcttgtatcaccaagagaatatgaatgttctggttgaacctgaggtgcatgatgtatttgccaggattccagggtttggctctgtccagaccttctacattcaggacacgag

SEQ ID NO: 177363 - DNA, 391 bp, Arabidopsis thaliana landsberg
atggcgcgagcgactacgagtggctttcgatcagccggcgcgcgccgcgcttcaggactggtaacgtaagtagcggcgcctcgcccggaccccaattgaaggcttcgcccaacgcaacgcgcgccgcgtaccgccagttgtccaccagcgcgtaccgaagccgatcgcgcaccagcgggtcacgagaggtcaccggccagtcctcgcccatgacgtcggcgagcgcggcctgccgacgcgacggcggagtcgccagcttcgttggagcgtcgagcccgagacgggtcgcttgcgcgagcgcaacagcgagcgcgacggggcagtcactgtcgtaggacaaacgctccccccggtcccagtcgtccgcggcgtgaagcgcaaagacagcgag

SEQ ID NO: 177364 - DNA, 506 bp, Arabidopsis thaliana landsberg
gtggtgtacaatgcaaatgaattggctaaattggtagaagacaagaagaaaatgcagaattggttagattactaccagttgaagtatacaagaaacaaggaacaaaggccacgggtaaaggtaaatactttgacaaacccgaaaagccgacacacatattgagaccgaaacttttttttgattcgcagatgggatttctcgggctatggggcaaaaaagtagatgcaatggatcattatacagcagagatcgagaaacttagcgagcaagtaagtatctttcttgtgtaggggtgcacaatgccccaaacccctaaacccttaacctttcttgtgtgaatttgattttcatagataatggaagaaaggaagaggataaagaaagatgacacaagtgtaatgccagcagcttttgtgtcttttaaaacgcgttggggcgctgcggtctgcgcgcagacacaacaaacgaagaatccaactgaatggttaaccgaatgggctccttga

SEQ ID NO: 177365 - DNA, 70 bp, Arabidopsis thaliana landsberg
ttttttcactcatcgtgcacatatggtgcatggatccttctccatgcctacggaaagcgcaatgcagtga

SEQ ID NO: 177366 - DNA, 76 bp, Arabidopsis thaliana landsberg
gaaggatcatccaatcattcccctaattaagcgactgaaagaaatctacaaaacatctcaaggaattggatcgtaa

SEQ ID NO: 177367 - DNA, 296 bp, Arabidopsis thaliana landsberg
gtggtggctccagcggtaactccaacgacggcggtggttccagcggtgagtccggcgacggcggcggttccggcgaatactacagcgacagtagatccggcgatggcggtggctccggtgacaatgggaaccccaacgataaagtaatggctccggtgatggcattcattccggtaaaaatggtggcggcagcggtggcggcggcggcggaagtggcggtggcggcggaagtggcggtggcggcagcggtggcggcggtggcagcaactatggtggtggtgatgattattgtgatg

SEQ ID NO: 177368 - DNA, 111 bp, Arabidopsis thaliana landsberg
tgcctgaactacgatgaccctgagcgtactgcatgtcaggacgagcaggagaccttcatgctcgatcctttgatcgacatgatcgcgcagtcgattgggaccacgtcataa

SEQ ID NO: 177369 - DNA, 165 bp, Arabidopsis thaliana landsberg
atgaataggcccctggaaggtgattgttccttagaggttttcggatttgacagcgaccaaggccgtaatactttctggcattctagcgctcacattctaggccaggctctcgagcaggagtatggatgcaagctatgtattggaccctgcgaacccagagatgaa

SEQ ID NO: 177370 - DNA, 2214 bp, Arabidopsis thaliana landsberg
ggttttgtgtgatcattcttcgagtaaggtgaggacccaagagccatcttgccccttcaaatcttttgttggccgtacattcatttacacttaattaggatattcttttcttaaagcaaaaatagagtttaacaaataaaatataaaaataagataactctagtctttgatctttatcgactcttctaatgtcggattgattcaagttttatagtatgattattaatgagaacgtcactaagataatcaagtgctaatcataatcctttgcgaaggctgttttttgtaaatttaaacgagactttggaggagctagaaaggatcagtgttgaagatttgggagagatcgcgacaaggacgtgaaatggatgcgacacgtgactttcacgtgactggttccctcatcgctggaacacataatccactctttcacctattgggtcctacaatagcttcttatctttgactaaatcatttttcatgttgtaataagtaactagaagatgtgcatatacgatacgaattagagaatacatacgtcctgataaaaatagaatatatatataccgacaaattaatcattttgtattcttggaaaaattatttcttctgctcacctaacattattaaccactcaataaccgttaatatagtttgtcaattgtcattgagctgaataactagttaaatacatagtctctaaatgtgtatagtgtaaattggaccaatcaggaaaatgagatctaattattcattccttttccacagggtccttatttcttcgtcttttttttttttttttaataatcctttatcaaatgtacatgattgtaaactgcaatattttttatatattaaaaaatatataaaatatctgtaaaaaatgattccaagattccctaatatattataaaatgttaaattaaaatcacaaatctttaagtctaaatttttgaatgacgtaaatgcaattctctttgtataatataattcattaaaatatttaaaattcaatttgtaactttatttatagatgaatttttatatattgtatgatatttatatagcttttttaatttaaaatatttagcttacaaaatgtggttttaacatttttggattaaaactttgagttttagttataaattattctatcataaaattatatagcataagatttacccgtacatagcacattttcttacttagcttattttttttgaataaaatgtaaaatttattcgaaaaaacatgtttacatcaagtgcaccggaaatttaatcgttttaaagttacagacactgaaaaaataaaagagaacccggcctctttatcttgttgcaaaccagactgtcatgtgcttctcatatcttccatctccttgatcttttagggaagatatcctattcctaacatccttgtctagctttctcattagttgagtcggggagtgtgcttatcgccatgtcttctacagtttctttctctccaaattgagtagattacaatctgaaaagaatatcttagtagaaataagcgaaccttatcaagcgtgttgtccgtgagcagccttagaatcacgttcctatcggtagagaattttgcagctaggagtttagaggtgaggctcgaccaaactattttagagtaatggcagtcgaaaaacaagtggtttctagtttcttacctagttattttgcttaaaaatcagtaattactacaaatttctaataaatgaataaataggggggggggctatggatcaaagagtttaattgaattgaattggatacataattacagattttcagtcattgcaaaagattttaaatattcttttcaattctaacgattacattttcagcattttattagaattgaatagaattaaaaagtactaataatttttctaattctctgtttctaatttcagttttgctaacaactgaacctatttcttctccacagtctccacttgtaaatctctaatcatacgtttcaaaatctacaacatttcctcctttttcttcgtcttaaaaccactctcaatactgctaagtttaacagatcgcataacttctccgcttttctcgctaaatcctctctgatcattgtagatttccaaacatcttctttgtattcttctcggagttcacgtcgataacgagagctatctccgcagctaagggcgtcgatgatgattatgcacaatga

SEQ ID NO: 177371 - DNA, 1889 bp, Arabidopsis thaliana landsberg
atggccatcttcgatccgtttaagctccaccataagccgccgtcgatttttccggcaacaactgtaaaaccaagccatgttctttccctcgtcgctaagttcttcttcaccatatgcatcttcatctccgttgctatgatctccttctacataatcttcttcggttgctccgattgccaccacatcaccggcctccgtcgcttaggtcctgaaaatgtaaacttaactaccaactcctcagcctcctcctcgactatccgccggccgaatcagtcctcggaggctactgatatctcccacatagctttcgggataggtggctccattcaaacgtggagagatcgcagccgctactccgagctctggtggcgtcccaacgtcacacgcggcttcatatggcttgacgaagaaccgcctcttaatatgacatggctctcaacttctccaccgtaccaagtctcggcggatacctcccggttcagttacacttgctggtacaaactatttctacttctataacatcattatttcaacgagatgatcttagtcaagttaagtcaagggtcaatgtttaaccattgtgaaaatgtatttggatgaatacctaaccatacaaaacctataattttattcattcgatttccactttttgttttaaggtatggttcaagatcagctatacgaatggcgagaattatcaaagagacttttgagctagggttaacggacgtgagatggttcataatgggtgacgaggacaccgttttctttgtggataatcttataacggttctaaataagtatgatcacaatcaaatgtattacatcggaggaaattccgagagtgtggaacaagacattgttcactcttacgccatggcttacggtggtggaggaatagcaattagctatccattggccgtcgagcttgtaaagttactcgatggttgtattgatcgctacgcatcgttatatggatctgatcaaaagattgaagcttgtttaagcgagattggagttcccctgaccaaggaactagggttccatcaggtatattcacattttcctttttgtttttctcatgattactggaaattcacttattttgacctaatcaataaatggaaatttactattaattggtttctagtttttagctgcaaatactgaatttccttttatttgaaattttgaatattcagttttaaatttcaaatcgttcaaaatttttatcccttgccagatttaagattaaaataattatcaaaaaaaaaaaaaatgtttagacgcttcaatgctcagatttcggtgtcctgtttttatcaacgatttacttcttactatgtgaaattttaaatttttagtcttggtgtaactatataactaactaagtgacatttctaattataagatcgggatttaattatttttctttgcatggtaaaatccaggttgacatacgtggcaatccatacggcttactagctgcccatccggtggctcctctggtttctttccaccatctcgactatgtagatccaggggtttcggggacgactcaagtagacgccttaagaagactcgcatcgggctataagacggatccaagccggatcctgcagcacagcgtgtgccatgaccagacccgtaattggtatgagtccgttgcatggggctgtaccatccaaatttatccaactgtggtcaccgctaaggagcttgagacgccatttcttacgttcaagtcgtggcggacttcgagctctgagcctttctcgtttgatacccgacccatcattgaagatgcgtgcgagagaccccttgtctatttcttggaccgggtttatgaggtcggttcgggtcagacgcttacgacgtatcggatatag

SEQ ID NO: 177372 - DNA, 83 bp, Arabidopsis thaliana landsberg
  unsure (1)..(83): unsure at all n locations
atgctgctcccgnattcgtgctgtcggcgagccggccaggtcgccgtcggcgcactgctcggcggcattgtggcaaccatcgc

SEQ ID NO: 177373 - DNA, 2380 bp, Arabidopsis thaliana landsberg
atgccgagggagataattacgcttcaggttggacaatgtgggaaccagatcggtatggagttctggaaacagctttgccttgagcacggcatcagcaaagatggtattctcgaggacttcgctactcaggtcctctttcttcgaattcgtttctatgcatcgattaattgaattccatggttgctggtttgttgttgttgttcatagaattgtggatttgattgatgaactacttgtatgtatgtagggaggtgatagaaaagatgtgtttttttaccaagcggatgaccaacactatataccaagagctctcctcattgatttggagcctagagttatcaatggtattcagaatggtgaataccggaatctctacaatcatgaaaatatcttcctttctgaccatggcggtggtgctggtaataactgggccagtggatatcaccaagggaaaggtgttgaagaggaaatcatggacatgattgatcgtgaagctgatggaagtgacagtctggagggttttgatctttgccactctattgctggaggcactggctcaggtattttactttttattgccaatccctatcttcgattagcttatgtttattcactgaatgacttttttttatgtattttcacatgaaggaatgggatcttatttgttggagactttgaatgatcgttatagcaagaagttggttcagacatacagtgtatttcccaatcagatggaaacgagtgacgttgttgtccagccctacaactcactgttgacgctgaagcggcttacgttaaatgctgattgtgttgttgttcttgacaacactgcattgaacagaattgctgtggagcgtctacatttgactaatcctacttttgctcagaccaattctttggtgtcaactgtgatgtctgctagcacaacaacgttgcgttatcctggatacatgaataatgacttggttggcttgcttgcatctttgatcccaactccaaggtgtcacttcctcatgactggatatacaccgttgactgttgagcgccaggttagatatctcaatcagttttataactaatatcatcaaaccatttttatgggaagctgctgttatctggaacatgacttctgaatgttatgattgacattttcattgatttcctactctcttatgtgaattgttcttggcaggcaaatgttattcgtaaaactactgtgctggatgttatgaggagacttctacaggtgagctgtttgctttctccagtcttttttcgaaaattgaattagattttcttctaacatgattgtattcgcagacaaaaaatatcatggtttcgtcttatgctagaaacaaagaagctagtcaggcaaagtacatatcaatattgaatataattcaaggagaagtcgatcccactcaggtacttttatgtactagtttttttgttcgatatattgaggatgaatcggtaattctttcttgttgatgttatctgctctgttgtctcactacttgatattaggtgcatgagagtttgcagaggatacgagaaagaaagcttgtcaatttcatagactggggaccagcaagcatacaggttctaaccgaattgcgtcgtcaaattaattattgcttttggatttaccatggacttgcatcacaattttttccatatcttactctcaacaggttgctctttccaagaagtccccgtatgttcaaacttcccatagggtaatcttatatcactctatatatatctgtcatgcactcatgctgagagttggtactccttacagttaatgtctaaggctgcagttcctgctttagtagatacatcgaagactcttaagtttggtggtgtatttgatatttcaggtcagtggtcttatgttagcaagccacactagtatcaggcaccttttcagcagatgtttgagccaatatgacaaattgaggaagaagcaagcttttcttgacaattaccgaaagtttcccatgtttgctgtaagttgactgctcaaatatatcggctgatgtttagtgcaacccaccctattattagcattgacagttaatgttgaaatcatgagaatctacatgttgatatggacaggacaatgatctttcagagtttgatgaatcaagggacataattgagagtttggtagacgaatataaggcctgtgagtctccagattacatcaaatggggaatggaggtatataagctaagcttttgccatctatagtcacacactaaaggaagaacttataatgattatcgaatatatgtgactctctcaggaccctggacagcttatgactggtgaaggcaatgcttcaggagttgcggatcctaagttagcgttctga

SEQ ID NO: 177374 - DNA, 379 bp, Arabidopsis thaliana landsberg
atggcaaaaacatgtagtcgacgtcaattggagatcgtcaataagctactattggacgaaatgacgagtcgtggccaaatggaaaacgatgcttattgtcaaagtttagcgctcgatattgctgccgggaatggcaatttgacgagggttaagcaactgtgtgaaccccatctcaaccagccgcttgctcataataattcagttcgatatgggctagctataccggttgtgcgggcatctaatgcagggcataaaaaggtcactgactacctttattacaatcattataagatagcccttcctcttgttttgaagaaggataatgatgtatattgggctacatgtctccttctcgatgccatattttatggatttcttg

SEQ ID NO: 177375 - DNA, 245 bp, Arabidopsis thaliana landsberg
atggcttggccaaacgcgcacggccggccgggcgtccattgcgacgacacggatcgcgtgcgtttgcttcccaggggcgcccggcccggcgcgcagccaatccagggtgcgccgagcgcggcaacggctaccaacggcttgggggtcagcccgctcccccggagcaatattgcgcctgctgcaaacgcgaagtggacagttgctgctggagggcgctgtcgcccatcacggcctgttggccataa

SEQ ID NO: 177376 - DNA, 93 bp, Arabidopsis thaliana landsberg
tgttatgtcatgtttgttctggaacatggtggcaaagaccttgaaagctttgttcttttgaactttgatgaagcaaggagcttactggttcag

SEQ ID NO: 177377 - DNA, 243 bp, Arabidopsis thaliana landsberg
atgaaagctttgagtgtgatagccaaaacggatgaacaagagcagcgagagaacctgtttcattcaagatgtatggtcaatgacaaggtctgtagcttgatcatagatggcggaagttgcaccaacgttgctagtgaaaccatggtggagaagcttggtctaaaggttatgaagcatccaaggccatacaagttgcaatggttgaatgaggatggagagatgagcgtggacagacaagtgaag

SEQ ID NO: 177378 - DNA, 562 bp, Arabidopsis thaliana landsberg
atgagcgtgtctaaaaacacaatccattttcttcatcgtggaaataggtaaaagggggcatcacaaacactggggcacccggatgttcaaatacggtgatttggatgttcttcattttctcatatcaaatttgaactggtaaaggcagctacattattaagtggttgttaataatgtattggttgtactcactcttttggtatagtaggaaagtgttgcacactttttggttataggaatctgatgctgttgcatttggcttttgcaggtggattacagagtatcaagttgatggttaccaatttcactcgcttgcctcaatgatttacacgcacaatgggtttgcttcatttaacaacgatttggatgagtaaggcatctatgagactacacacctctttgtataattttgatttcagtgacagttggtcaaactgttgacgtctttcctgttggcagctattgcaatcagtatgttgaccgagatgctctgatgtacctcattttggccaatgaaatcctgcatgttcaacatccaaatataataacaattgctgaggat

SEQ ID NO: 177379 - DNA, 62 bp, Arabidopsis thaliana landsberg
atgagtaagacttataaaccgttgaataaagaaaccgtgaagttacaagcaatgctacaaag

SEQ ID NO: 177380 - DNA, 76 bp, Arabidopsis thaliana landsberg
atgacgctagaacaagcgaaggcccctaaccggaagagtgcgctaaccgtatttgacaatcaaagtagccttacag

SEQ ID NO: 177381 - DNA, 109 bp, Arabidopsis thaliana landsberg
ggatatagatacgttccttaaatgggaggaggcccttaggccctatactctagcccttaaaccccggagtcgtacgcttaatagcggtctttcggcgctaagtctttag

SEQ ID NO: 177382 - DNA, 134 bp, Arabidopsis thaliana landsberg
atgcgtccgtccagcatccgctacagcgtacgtaccgcggcgggcgcgccggctatctcggtcaattcgcgttccagcgcgcggtttcgccgatcccggaactgttccagccactccggcgtgagcgcactccg

SEQ ID NO: 177383 - DNA, 405 bp, Arabidopsis thaliana landsberg
atgagattcgttattaacaatgcagctgaagatcatggcccgcaggccagcccgttagaccaatgggcaatgcggggcggatatgggcttcgttttgtcgcctgcggtccttggcggaccgaactgccgcggaatgaagagaagggaggtccgtcacgaagtgcccgtttagccgcggactcgcccgtctgacacccctacatgagactatgccgacctgccgcctaattgtggtactatcggctaatgaacttgttaacctttataaaatgtgctatctttgttgaaaactttgggcctgcgtaagtttatccttttctctcttcttaagaaaactttaaagacctattcaacaactatacaattgggccaataagtaacgcattatccatcaacaagtactga

SEQ ID NO: 177384 - DNA, 214 bp, Arabidopsis thaliana landsberg
gtacattagaaacaccaaccggatcaacacagaacccggaattctcagaaccgggttgaatcctgacatcatggatcccaggcgtacccggaatcgcctcagccacatgataattctgatgctgctcctctgccaatgccatcgccaccacaaagaaccaagagatggacgaattcgaagggttttaaagaggagcccttttcacttatcataa

SEQ ID NO: 177385 - DNA, 1060 bp, Arabidopsis thaliana landsberg
gaaaacaaagtttttagcactgatgcgtttctgaagagacggtctcgttccacaaatcagccaccagagcctatggtaagctaactgtttcatgtatggaaggcatatacctacacttactgcatttcataactcaacattactatccattgttccaattagtgtggtaaaccgtcttttcacatattactttcgagtttttactgcatatttttattcatccaaaagatgttgaataatttaagttacgttttatctgttgaataattacttttattggtactcttccgattgttttcagttggttcaattcttgggctcttttgcattcctcgattaccttgaaaggcgtctaagctctgatgagaagagtactaatctccttgagaagttacaagatgcagttggaaggggtcaagatgcaatgtcgattctgcctaaatcttctatggagcctgaaataatcacaatagccgagccagaagttgaagaatcaggtatattttgatttgttggtagaatttgttagatagcagaagctgaatgataagagattggggttgttcatttataagaaactcccgagaatgaaaatatatctaattgatggtataccatttttcataatctcatgggggttttggctggccaccagtatttggaaagagacaaaatttacaagttggtgtagtatgcataatagtagaaaaagtactaagactctttcactctgttatatttttctggggaataatcgtccgtctactgagtttgggatcatgttctgatttatctctattcttttttgtcagccaccaggtatacctatgacaggtttcctgcgagtgttcggtcagaggaacaagaagaaaagcgaaagcagatccttgcagcagcaagcggggctcttgaatccaatggaaggcaccctccaaggtacatcctgatttgcttggaacagcggtatgattcccttacttattttctactatcttccaattgtagctcaccgccagggaagaacaccaaagaagacaatttcagttcaatggagagggct

SEQ ID NO: 177386 - DNA, 105 bp, Arabidopsis thaliana landsberg
gcccattatgggtttaggcccattcgatttggatctagaattgattgtaagagtgatcgtcgaaccattccaaaacctcttggagatgttgagtttgtaaagtaa

SEQ ID NO: 177387 - DNA, 1109 bp, Arabidopsis thaliana landsberg
tcttcctgcaaaagcaacagagattccaacatttaatttagcagctactcgtagtttgaacaagaacaaagaaactgtttcgagctctcctttgtcaagaacttcaagcaaagcagatgtggtctctactgctaaatcatattcagatgattgtgatgatcctccacaagtttttgttactgggaaaggaaggcaatttcatttctctatctacaagtggcctaataaaggagttcctgttgttatttggggaagctctagattgagttctatgtctaaagctgaggagacaacacctgtaccattgagtgattatcgaaaaacttcagttgttgagaaattgggtaaaaatgaagaaggagatggaaaaagtggtttatctggtttgaaagatgtgaagaagacctcgctaaagcgtcctggtgtccagacaaaagaagagaaaacagaaacagatttgaagtctgaacaagccttctttggtgtctcaaaagcacgtgaggctaatgtgaagcctcttgattcagttgagtctgaacaggccttctctggtgtgtcaaaagcacatgaagctactactgtgacgcctcttcattcaatttttcatgaagaagatgagagacaaggttggtttctgcagacatgtatatttgttacatttggttgggttaacttccttttgttgactgtgcatttggttctttgtcattgcagatgagaaaatagtatcagagagagaagtgagaaaaggtaaaagcaaagcgaagaacactcgaagttttaccgaagattcaagaaccaagaagaaatcacaaggcactaaaagttctttggatagtagcccgatacccgataaatccagcttcgcaagttcatcagcagcaccagaagttggcaaagatggagtcaaaggaaaagtgagtgacttcgttaagattttcagtaaaggagcttcagttggagcaggtggggaatctcttggacaaagctctagatggagagctaaagaaactcccaagactgatatcattcatgatggttctaatgccaaggaaactgtaaacattcctgatcaacaaaagaaatcgactccagatatccccgctatg

SEQ ID NO: 177388 - DNA, 508 bp, Arabidopsis thaliana landsberg
  unsure (1)..(508): unsure at all n locations
atgatcaaaagctacgagaaggtagttagcataatcgcgtctcagaaacagaattggtaagggagaggtatggattaaggctgcagattgaagctctgatgaaggaactaaggaatatagagaagaggaagagacatagcttactggaattgcaagaaagattaaaggaaaaggaaggtttattggaatctaaagataaggcaatagaagaagagaagcgtaaatgcgaattgttagaggaaaggctagtgaaagcagaaaaggaagttcaagatttaagggaaacacaagagagagatgtgcaannnnnnnnnnnnnnnnnnnnnnnnnnnnnnnnnnnnnnccttgagcttgcttctagccagagacaacttgaagctgaactgagtcgtgcaaataagcaaattgaggctaaaggacatgaacttgaagacttgtcattagaaatcaataagatgcggaaagatttggaacagaaagatcgaatcttggctgtgatgccgaacaa

SEQ ID NO: 177389 - DNA, 213 bp, Arabidopsis thaliana landsberg
aaaaaagacagcagtttggggggatcaagcctcagtgacaagtcgagtgcagtcaagtccaacagtacaccgtcaactcctcaaggagaaggcagtaattttcatacagaatctagactttcagaaggctccgcattggcagatcaaattatagagactatggagaatagagaagctcatgaagacagttttcatgagattgagacacctgag

SEQ ID NO: 177390 - DNA, 288 bp, Arabidopsis thaliana landsberg
atggatgaagatattcgatctgaaggcgacggtgtccataatcagcaagtgagcgtggtgtatattgatttacttgattaagctaacttatagtttagtagttagtgttcttagataataattgtgaaatagaacttgaaatagatagtcttttgtttgctatgtgtgcgtgctgtgtaacaaacattctgatatattgttttgtagggaactaacaatgtttcagatgatgttgactctcctctacattctgaccatgaagataatttcgatgttagtgttaattaa

SEQ ID NO: 177391 - DNA, 248 bp, Arabidopsis thaliana landsberg
gtagaaataactgtagatatgtttctaatgtggacgtcatcactccatcagaattgcccgagcaactgtcgagagtggagctcctcaataaaagttatgttggtaagaaatatgctaaacttgattcaaatgaggatgaaatgagagatgatgctgccatcgtgatgggcgaatgcgaggaacaaggaaaagaactaaatgaggcaatagtggaggttgatgatactcaagatcctgagattggataa

SEQ ID NO: 177392 - DNA, 79 bp, Arabidopsis thaliana landsberg
atggctagtcctcatgctctgagccggaggtgggtgcgggagagcgacgacgatgatgagtgggagcaacacaaccgaa

SEQ ID NO: 177393 - DNA, 114 bp, Arabidopsis thaliana landsberg
aaagaagaacgtgttttgagtgtaagtgacgtaagcgcgactttcattaaatgtcttgtcagctataagatggttcgatcaatggctcgtcagctggatcattttgagaagtga

SEQ ID NO: 177394 - DNA, 508 bp, Arabidopsis thaliana landsberg
atgcccgccgatttggttctacctcttcaaccctctcaagtgaattcattggaagtcatcacaccagaaacagctgaaacttggaggtgctacttagctacttgcaaatcattatcacactccattgggcaagagttgcaacaggtatgtatatatctattgcattaatgttagaatctgccaatctggtacttctaaagaaatccattgttttcagacttttgactaatattttctgcaaatttttgttgcaggtggtggagaatgatttggttgcagctagacaaacagatcgtagtttaggcagccaagacttgagcaggtacaaaagccctccttagggtttatccttgtcaaatatgtgcaaaacttacaattatgttgtttggttccacagattgttgacaatggctcgtatgatatctgtgagttatggtgagactacgctttcactagagcactggcaaatggtgttggaactagaaagacttagaaaggagaggctcaa

SEQ ID NO: 177395 - DNA, 1726 bp, Arabidopsis thaliana landsberg
atggttcaggctccacgtaaaggaagacagataaaccagcaaaaacacatggtaaaaggggttttacctgatcaattagaattgttgcagaaagattgttgtactttgaaataagacaagtggcatcgtattcctgaagatttacaaaaggaacaatgcatcaaatttggggaaaaggaactatgataatggttttagtttgggttggttttacctcccaagcagctttgttgtcacctagataattggtgaatgccttctgtccccatgcacaatttatgggattcgtgattggtgcaaacgcagatacagactgaacatgttacacagatgaagtggttaaattaaaagaatgatataggagtaacaagtatttggttcaagcacattatccaccatgaaagacaatctatctttagatttgagattccacgtttcaagcatctaactcacattgcattgccacaagaaaactctttgaaatgaataccttgtatttatcgaggttcctcaggtatatagtaagagctccatgtccacccatggagtgtccagatatagatgcttttgttgtgtcaagctgggaaaagttttcactcaggagttttggcaactctttgacaacatagtcatacatacgccagttcttccacttttccttagtagcattgaggtagaatccggctcctagtcgaaatcaaacaggaaagaaagaatattttatcacccttgatcattaactgaatacttaaagaccagaccaataggtccaaagctacaaaaaggagtgtgtgaaatgcaaaccagaagcatgtaacgtgtgcatacttacaccaaagtcgtaactgtctgcctccccttcaacatttagtcctcctacaatatcaaaaccatcacagagtgttaaaaatacacatcaagggaagatgataaatcaaaaaaatgaaaatagtgttggctcacttggagaagtgtctggagcaacaagagcaatgccgtgagtagaagcagcacgttgagctcatgatttgataataaagttctcgtccgtgcaggtgaggccagaaagccagtaaagcacctgtcaatcaacaacatggagaatcattcatccaaaaatccaatcagttgttttggcatcccaacgaaatcaaggcaataaaaaatcccaaaaccaatcatgcaaaacttaaagttttcgtctttagacaaatatgggagaaacccacaaatatcagtaatacttggttcaaactagagacatgaaatcagatgagtgaagataagagtgaaaatttgagaaaagtcacaaaagagcccttttttactgtagaaacaatcaaatctctacctcagaacatgaatcgtgaaaactacaacaagaaatttagatcaaagtaatgaagaagaaggaatatcattgcatacaggagatttatgggaagaagaagcagaaggagggaagtagatggaaaaggtcatggaacatccaagtgtctcactgaagtgtttgtatcttttgttgtagccatcgaacatcttcgtgctcccgatctcgcttagtccactcgccattatcactctctctatctcactcactatctctgtgattgcaaagtctagaagaaacaacagatgcaggctgcagcgaagacgaagaagaagaagaaatgatcgaatgagagaggtctatcggtttctacagtggatccgagagagcccatag

SEQ ID NO: 177396 - DNA, 152 bp, Arabidopsis thaliana landsberg
agaaaggtctctccgtgaaggaggaaggtctctccgtgaaggagaaaggtttctccataaaggagaggagtctcagagacaaatcggtggaaacaccgcaaagagctcctgaaagaacaacagtgaagccaacaacagaaaaaggcttatga

SEQ ID NO: 177397 - DNA, 147 bp, Arabidopsis thaliana landsberg
atgacggccttcatggaaacaaaaataaacaacataaaggctgaagataaagaggactacgtcatgaagagagaagagctagggagacacaagaaagagaaggtgaagaacgtgaagataaaagaggttttgagcaattttgtgaag

SEQ ID NO: 177398 - DNA, 462 bp, Arabidopsis thaliana landsberg
atggctttgaaatgtcgaggagaatctctgatggatggtgtttacacaaaaatagactcacgccaaattatggctacaagcaagatggtacgtaactaactagatattgaaatttcgatatttatatgaaaacaatgatgctaatatttggcctttatatataataattgactaaaacgtaaattcttgcgcaggttcaagagcataccggcatgtatgttcaaccacataagccaatagttggagacaactgttttgttcatgagagcggcattcaccaggttccatatatatattacttatgaaaattgtatatgagattgttgcgttgtatgtgtataattgtccaaacattttgcaggatggaatattgaaaaatcgaagtacatatgagatcttatcaccagaagatgttgggatcgtaaaatctgaaaattctggcattgttcttggaaagcttag

SEQ ID NO: 177399 - DNA, 960 bp, Arabidopsis thaliana landsberg
gctactgaaggtcagtggaggaaagaggatttaaagctagagatgttgtcttgtatgctggatgggaattcagacatgtctcacccgttcgtggattcaaaattgtggttccggctccaccatcccagggtactataacctctaatcttagttatgtgaataaaattttttatttactttttgcgcaagactgagggcttcttataaataataggctgctgtacgttgtgccgcgctttctagtctaaatggtgttctcaaggatgatagctctaaagcagaggtatgtgtggggtactcattccaagtattttttgtttctttactttgacttcatgtcatcttactgttcttcaatatcttttttaccctctccatccagaaccttgtcacaattcaggatgctatactgcgtcagctttgggatgatgatctggctgttgttcaggctgccctctctttcgataagttgcccaatataataacctcttctggtcttctggatgctttgcttcatgtggtgaaacgatgtgttggcattctcgtatcaggtgaataaagatgctctgttcttttcttaacttgtttcaagtgtggaattttcatatgttcagttagtttacctcgcactatccattcttgttgcaggagtatcacataatgttcaactggcagttgatgttgttgctttgtctcttaaaattgctgtctcaagcttcggtaatcaaacagactctactgagaaagttacctctgcaatgttcccatttctcttaattcagccgaaggttctttcttgttctcttcattttctacagctatggcgaaagtcttgttacttctactaattgctgtaatcatgtcttttaatagacgtggaatttaaatctacttgtgctaaagttgggaaaggatgttaactggccacttttcaagaatcttgctgctgatgatggaatg

SEQ ID NO: 177400 - DNA, 391 bp, Arabidopsis thaliana landsberg
gtatttatgaggaggcatcgtgaatgcaacgacggcagtggagtggcgcttgcgcggtgagtggtttgacgtgtgcagctgcaaactgccctgcccctgcagtttcgcccaggaaccgacccacggagactgcctgttcaccctggtttggcaggtccacgagggccattacggcgacaccgacctcgccggcctgggcgtgatcgcccttggcgagttcgcgggcaacatgtggatcgacgatcccaacgccacgatgaaactgatgctctacatcgacgcgaaggcggactccgaccaacggtacgccctcgagcgcatattaaccggacaagagggcggttggccgggcgaattcggcagcctgatcggcacgcgtggacaggatcga

SEQ ID NO: 177401 - DNA, 189 bp, Arabidopsis thaliana landsberg
cggccccgtgccagcatcgccaagctccagctgaatgactccgccattaccctgcgcgtgcaggtgaaagtttcccaacatcacgcgccgaccgttttcatccaccgacgcgttctgccattgcgcatccgcatccagctgcatcggccagatgccctgcacgcgagcgtccacgatatggacgtttag

SEQ ID NO: 177402 - DNA, 39 bp, Arabidopsis thaliana landsberg
gtcctagttggcattcgtcttaagacgatttgtgaaaag

SEQ ID NO: 177403 - DNA, 81 bp, Arabidopsis thaliana landsberg
tgcgttttccgttttcgaaacatttcagaaaacggaaactcttggaaattcgatggaaattcacgaaaacgcgtttcctaa

SEQ ID NO: 177404 - DNA, 322 bp, Arabidopsis thaliana landsberg
attcgttcagttatgttattcaaaagaagtattggaaaggacctcttccattaattcattgctattgtttcatccgtgcaagcgaaaccacagagtttataattgcagtaagtatcaaccgctcccctcctgcttgtcccttctagttttgttgtcttcactatatcatatctttgtaccaaagatctggtagcgtttttctgcgagcctttaaatctgatatacagcttctgttgatatttttaaggaagctgaaactgctttgaagttccatatagaagatccagtcttccacaaggttagagatgttgctccaaacaag

SEQ ID NO: 177405 - DNA, 73 bp, Arabidopsis thaliana landsberg
aacttgtgttgactccaacactcgcaattgcgatgttacgctgtacgaacaatcacatgctgcatgtgactga

SEQ ID NO: 177406 - DNA, 663 bp, Arabidopsis thaliana landsberg
  unsure (1)..(663): unsure at all n locations
atggcttgtgaagttgatactgatttgagcaaggctggagattcgacaagtttcaatcctccactgccgaagaagccgaaaattaatgtggagaagacagatttggatgcgatggtcctaccagggctttgtccagctggcgataggatgctccgctacggcaaattgagtgatcctgaatatgtgagacaacgtcaagtctttgacgatcaatttgaagacagtgaggtataaatatctattccattacgtattagctaagatatctgttacgtgactcaagttatgtcaatgcttaatcgtgcttctctggtatntgtactcataactttctctttctatttggttcntgctcaattatttatttttagggttttgatgtggagtgggatagttttgactacaagttcttcgccatgaaattcgagtgggcaggagaaggagatcttgattatacacggagcaatttggagttgcgtactctgctcatagacgcagctatgaaggatcacgacgacgattatgtaagagcttggtcttacataaactcagctctcttcttaatttagttatacttatgtttttgttttccaggatacaaaacttgagtttgtggattatgtcagtgcaaatgtaatgccgtgcaagggttatatgttttaa

SEQ ID NO: 177407 - DNA, 411 bp, Arabidopsis thaliana landsberg
aagcaacaagtggttacgctatcttcttgtgaagctgaatttatggcagccactgaggcagctaaacaggctatttggctccaagaacttctggctgaagtcattggtactgagtgtgagaaggtaacaattcgagttgataacaagtctgctatagctctcacaaagaacccggtgttccacgggagaagtaaacacatccaccggagataccatttcattcgggagtgcgttgaaaatggacaaattgaagtagaacacgttcccggagtaagacaaaaagctgatatactaacaaaggctcttgggaagattaagttcttagagatgagagagcttattggagtacaaggagtgtcaaaagaagatttcaagcttaaaggggagattgttggagtaagcttgaaataa

SEQ ID NO: 177408 - DNA, 50 bp, Arabidopsis thaliana landsberg
atggtcaaacgttgtcttagatcctccgaaatctatgcaaagccacacac

SEQ ID NO: 177409 - DNA, 166 bp, Arabidopsis thaliana landsberg
taaactcatcaggacgaaccgctgttcccgtgacctcgctgaaacccggggatcaagttttgatcagattacagggcggtgcacgccataccggtatagagattcaggaattcattgtcgagaactgatcaaaaactttcgggtaacattgaaacatatcaaataa

SEQ ID NO: 177410 - DNA, 755 bp, Arabidopsis thaliana landsberg
atgatattgcttaaacacaaagttctgaaggacatccttttaagacgtactaaattgggccgggcagctgatcttgctcttcctcctagaattgtatgttcctttctctcctttgtttgatgtaaatgaagtttggtatagttgcttctgagtttcatctctacctataaatttagcttcttacagatttctttaaggcgtgatactctagatataaatggggctgattaataagaatcgctaaacaaagctttacctcaactttttaatttgacttcttgtagatcactttgaggcgggatacactagatgtaaaggagtttgattactatgaatcactatacaaaaacagccaggcggaatttaatacgtaagttacttctactagatggatttccactggtttgcgtaacagaattttattgtcgactatgctatgtacatttttgtgtgcaggtatattgaggctgggacattgatgaataactatgcacatatatttgatcttctcacccgcctgagacaggtgagtggcatctacagtttttttggttcaactaaccagccaatgcacttttttgacgatatagatatattggtttgtgatttatttgctctgcaatttgttccaggccgttgatcatccataccttgtggtgtattccaattctagtggcgctaatgctaacttggttgatgagaacaaaagtgagcaagaatgtggtctctgccacgatccggccgaggactacgtt

SEQ ID NO: 177411 - DNA, 280 bp, Arabidopsis thaliana landsberg
ccgcgaccgctcaactggattcctccgaccaactatcaacgccgtacagaatgtctttcgggaagacgccgataatggcggctttgagtggcggtggttgtggagtgtggaaggtgaggcttgtgataagtccggagcagttggcggaaattcttgcggaggatgtggaaacggaagcgttggtggaaagtgtgaggacggtggcgaagtgtggcggttacggctgcggcggaggagttcattcgagagcgaattcagaccagctaagcgttacgagtag

SEQ ID NO: 177412 - DNA, 387 bp, Arabidopsis thaliana landsberg
caaggcgtccgtcatgtcttgctgatcgtcgacaacatcgcggcgcaacccatcgtcaccgagctggaacgcaacctgccaaacgatcaactgctggtcgtcaacaaccacgttgtcgaaaacacgcacgcacacagcatcacgcttccgcgcgacaccgaactcgccagtcttctggctgccacgaacgtcgttctggtcgccaacgggggacaaaaactcactaccgagcgacaggcactcgtcacggcggccctactgatgggacgccgcgtcgtcaccgatgccagccatgtgacactcgattcgagcaacttggaagctctcggtgaacgcgactggccaacaaccgctcgcgccgctgccgcaagcgaggattacgcctaa

SEQ ID NO: 177413 - DNA, 1263 bp, Arabidopsis thaliana landsberg
atgagggaagaagaaattgagaagatccgtggtgttgttcgagactgcgtcagtaagcatttgtactcgtcggccatcttcttcgccgacaaagtagcagctcttaccaatgacccatctgacatatatatgcaagctcaagctcttttcctcggccgccattaccgtcgcgcttttcaccttcttaacgcttctaagattgtcctccgagatcttcgattccgttacctcgccgcaaagtgcctcgtaattccgaattccactatctatttcacttgttttgattgggactggtttaggaatctcagattgtttctcttgatttgagggttttagggtttatcggtaattaatttctatgtgttctcaggaggaattgaaggaatgggatcagtgtctattgatgcttggtgatgcgaaggttgatgatgatggaattgtgtatgatgctaaagacgggaacgtgatagattttgataaagatggagaggaccgagagattaatgtaagttttttcacgacttttaaatgtataatagagatctaggtagtattatcttctcgattctggaaggtttgttagcgaaactgttggaattacattaactggttgactactacttggttaggatagtagctgaactgatatatggtgatttacttttgcagatatcatcggcgatatgctttctaagaggaaaagcatacggagccttacaaaaccggtctcaggctcgacaatggttagtgagccttctttcacctatctttcttgttcagggatcatttgttcatctgcattttgatgattgtgagagagtgatcttattgatttagtggtgttacatgaacttagcatgtgtataagatttactcaagtgctagtaggaaatattgtgaacttgtgtgtatgttggctgatccatctattaggattgagtgttgtgtgggaatcttgaacttcatagctatttaactcatcatttcggtttgtttgcaggtacaaagctgctatcaaggctgatcctctgtgctatgaggtacttctagcgccctagtcaatttgtgcatgttatttttacttactatgggaagttgcagagctaatgtgggaagataaaattcttttaattattgtatagtagtgaaaacctgatgtacctctgtagatatcagaaaactgacatggacgtgatttctataatctatcctttcaggctttggaatgccttattgagagccatatgcttacatctgaagaag

SEQ ID NO: 177414 - DNA, 368 bp, Arabidopsis thaliana landsberg
atggagtttctagtagagagcatcagctatccatcagttccaactgagcgagcagaggacgcaaagccttttgctccaatggtggtcactgtaagttcattcatcaaactcgttctctgaaacttttccacttgtatatgcattataaacaacgctagttaagtaaggtcagataagcctcctgattccctcctctcttatagatacttaacttttattttgagacaccatgattttttgttttggttttcctacgtcggtccagtggtcaatcaatcttgtgtactgcgcaggggaatatggatgatgatggtttgggtcctgtttcttggtgggattcttatgaacaggttgatcaagaagagtga

SEQ ID NO: 177415 - DNA, 400 bp, Arabidopsis thaliana landsberg
  unsure (1)..(400): unsure at all n locations
atgattttcagttctggactgatcgaatcaaccacacccgtccttattgacatgggcgatgttaccaaattttctattcaggaagtcatggagctccttgagactgcgtatggccagatgaagactttgggattccaggacataatcatgagcgggagctccatccctgactctattgagaaagccgtaaaggaccgcgactcgactggcttggtgcaacgaaaagaaatgattgcttggaaaggctttctttctgcgaaccccactgcanaactttacttcggcgattacggcgtaagaaacccaagggcttcagacaacatcgccccaaacatgaacgtcaagataagatacacggtaaacaatgcttacttcgttgctcgcggccactccgtaaaag

SEQ ID NO: 177416 - DNA, 364 bp, Arabidopsis thaliana landsberg
gatcgcaaaggctttgaccgggccgccttccacgaggagttcaaccgctccgtcgtcagcttcttccgccagcatttgaggggcaaaaacgttggccggtaaagtagctgccggtacacctgtggccactgccggcgggtctccggtgaccgggcacccgctcagaaccaagcggctgatccttcggcgggcacggattgatgatctggacgcgatgaaccggcttctgagcgatccacggtcgatgcgctattggtggacttcggtgcactcctctcttgaggagaccgaaggatggctccgcgccatgatcgatgctccgccggaccagagcaacgatttcatcttagagattggcggccgc

SEQ ID NO: 177417 - DNA, 839 bp, Arabidopsis thaliana landsberg
gtgaccttcctccgcgcttacttgccctggactgctacccttcacatcctgtccgcatcaactcatattccaaggcaaaatatcttattgacattttcaatatcttgtatgggactcctgagctacaacttctgctccagtctccgcttgggtctcttttctcccttcctgtcagatactgttctttgtctggtcaacttttgcatcagttattatgtaggcagctgtttactgaggaaatagatgcaacatggtttgtgtttgctggacagccattacgcttttccctcaaagaatttgagcaagtcacaagtttgtgttgttctgaatacccgtcagctgctaaagtacgttctgctacttcatatgctgatggtgaatctccttactggtacaaactcattggggggcaactcggttcggcgactgtgaaatcagtggttagcggtctcaaatctgattgtgccatgccttcctggcgtaaattccaaatatctcttgttgttattgttgaaggtgcccttctaagtgcatcccaacctatgcgtccatttgtcgaagtagtagagattgttaagaatattgatttttttctcaattatccttgggaacgacactctttctctcgcactctccggttaatgaaagttgggtctcacattcagtcagaagagtgtctcatcaagaaactcaatcagttatctcttgcacttcatggctttcccctggccctgcaactgttcggtttccgatatattcctttgcttcgtacccatttgcaacatcctgtgatgaatcgactttctgtgaccaggctgtgcaaacattgcggaaattga

SEQ ID NO: 177418 - DNA, 369 bp, Arabidopsis thaliana landsberg
ctgctcggcctgacgagtgagactcatggccccatcaagtgtctccgggttgtggatgcgaacgacgtggctcaacaggggaagaagaccgcctgtgtagagttggacgcgctggccctctgtgaggcgacccgcgcgcggcagcagggcctggaaccggttggagtgaattccacggtcccggtgcggcgacactccgccaactcgaacaggggcgctgagcggagtggtggcccgaagcgaagattgaggaggtccttgaaccgcccctaggatggtgtgccctcgtcgtcctgcagctggatgaaccacgagtgcgcaacgtcctccagattataagaggccatccacacgcgttcctccgccatg

SEQ ID NO: 177419 - DNA, 624 bp, Arabidopsis thaliana landsberg
atgaacacttccatcccaaatgtgattctggtccatggcgcctgggccgatggctcgacctggtcgaaggtaatcccgctgctggcccgcaacgggctcaccgcaaccgctgtgcagctcccgttgactggcttcgaggccgacgtggccgccgtgcagcgtgccatcgcgctggcagaaggcgacgtggtcctggtcggccacagctatgccggcgcggtgatcggcgaagcgggcaacgacccgaaggtggcccgcatggtctacatcaacgcgttcgcaccggacgcgggcgagtcggcgggtacgttgttcgagaagttcgagaccgcaccgctcaatgacgaaatccgccctgatgcacagggccatctgaagctcacccgggacggtattttcaagctgttcgcgcaggacctggacgacaccgagaaagctttggtctacgccacgcaaggtccgctgcatgcctccgcactcggcggcacgctgaccgaagcggcatggcgcagccggccgacgtactacttcatcggaaaccaagatcatgcgattcctcgtgtggagcaggagcgcatggccgctcgcatgaacgccaccgtggcacacgccgacagcagtcac

SEQ ID NO: 177420 - DNA, 9 bp, Arabidopsis thaliana landsberg
atgactaag

SEQ ID NO: 177421 - DNA, 361 bp, Arabidopsis thaliana landsberg
atgaacatctccgatcgtttaatctttgtacgatctgttgaattcgaacctgccacagccccattcatggttaggtttgttttcgctaaactgaagaaattctgctttagatgtgggtcattgctgcatgatgaattagcttgtaaccatcaaagcactgtgctccagttgaacgttgaagcaactagacaagctatagaaccgatgcaaggcattaatcaaggggatgacgaacctatgcaggaaggttctagttcctcaacacatgttgttggccctattcctttagttgtcagagaaactggtgaagcatctgagactcttacaattcgcaccagagcaactaatttattgactgctg

SEQ ID NO: 177422 - DNA, 226 bp, Arabidopsis thaliana landsberg
atgttcgtgatccagaagaacggtgttggagatttggtaagctattttcccttttggtctttgacttgttcaacttgggttaatgactaattgtcttttccagcgccttccgactagtttaacgtgtttcggtcgtctattgctgcccgaatactcctcgaaagaggcgctggcggagaagctcgacaaggcacttgaaaacgcacgaggattcggcgttgcatag

SEQ ID NO: 177423 - DNA, 349 bp, Arabidopsis thaliana landsberg
gctgcaagtactagtggtgtgaaggtgcaggaccaggtgcttatcagacaattaattgacctacgcgataaattcatggtctacgtcgatgagtgttttcagaaacgcagcctcttccataaggtgtgtgtatgtgtgtgtgttcacatgtctatcttgttttccacactatattatttaatgcccatagtttctttgaatatattgtaggcattgaaggaggcatttgaagtcttctgtaacaaggcagtggttggagtgtccagtgcagaaattcttgcaacgtattgcgataatatcatcaagacggtagggggaattgaaaagcttgaaaatgaagatgttgaac

SEQ ID NO: 177424 - DNA, 385 bp, Arabidopsis thaliana landsberg
atgaagaagccaagacgaaggtggataaagccgctgcagacgcccaaattacaggtgaacccggaaacatggtactggaagtcgcgcatttatgccgcactctccaaaacaccggccatgctggagaaatatcccaacctctatgacgatgctgccgcggcattcaaaaaatacgaggagatagatccctcactggcactggtgaaatccaaaggttccgacgcttattttgatatgtataaatccacattcgaaaacggcaccaagaatttcaataataagaaatgggatgatgccgccaaatattttgagattagtaaccagtacatcaacactatcatcaaaaacaaatggattaccggccatatctctatggatactacag

SEQ ID NO: 177425 - DNA, 348 bp, Arabidopsis thaliana landsberg
gaaaatacgaattggtgccgcattataagggtgagaatccggtctttgatgtttcacctcctgttatgcctgtatctgtagagcatcaacatgtcactgttccccaaaaatttcaggtcagatagaataactgcaaactcttataccactctgtgtttctataatcggactctgcttacatgttctgtccactaaatattgaactgaatgctcctttaggtaacaggattctccattgggggtcgcgtagttgacggtcattcagtgggagttgagggcgttaaaattttagtagatggtagtctaagatctctcacggacaaggaaggctattacaagcttgaccag

SEQ ID NO: 177426 - DNA, 645 bp, Arabidopsis thaliana landsberg
atgccgggagtcccaagagaactggccgagcacaaactgaaggtctacccccaggcgaggccaattcggcaaaagctacgtcgcttcacgcccgacaagagagaggccattcgtgccgagttagctcgcttggtcgcggctggatttattagagaagtattacaccccgagtggttggccaaccctgttcttgtactcaaaaagaataaagtggattggcgcatgtgcgtcgactatactgatctcaacaaacactgtccgaaggatcccttcgggctcccaaggatagatcaggtggtggattccaccgctggatgttctgtgctgtctttcttagattgctattccgggtatcatcagattagtttggcaaaagaagacgaggaaaaaacggcgttcatcaccccgtttggtgctttctgttatacctccatgtcgttcggcctcaaaaacgctggagcgacttatcagagagccattcaaacatgcttagccgatcactggggcaagcgtgtggaggcttacgtagacgacgtggtgattaaaacggagaatccggaaaacttcatcgaagacttacagctggttttcaacagcctgagaagatatagatggaagctcaatcctgagaaatgtgtcttcggg

SEQ ID NO: 177427 - DNA, 182 bp, Arabidopsis thaliana landsberg
atgtggtgtaactacggtttggtcgtggagaaggtaaccgggtgggtttaacctgttaaccacagtggtgcagttgacattggtttggttatggtttataggatactcggtttgatgagagtttgagaggagatcttccacctttggaacgtcttcatcatgatgatgatgatcaaagttaa

SEQ ID NO: 177428 - DNA, 194 bp, Arabidopsis thaliana landsberg
cactcgcactctgtgttattgtcatcgtcgtgattgcaattccagacggagaggaaagtgtcttcagaggatttgagggcagcgatggcgtcggatacggaggaggaagaggaggaaagacaacgaagaggaggtttgccgagacagaggtcggagacgttgtaggagagaagggacagtgccatcaaagttaa

SEQ ID NO: 177429 - DNA, 318 bp, Arabidopsis thaliana landsberg
atgaccgaggtcggccacggaagcaacgttcaagcactcgaaaccactgccacgtatgacgattcgacccacgagctgcgcatcaacacacccagcgagagtgccgtgaagacctacatcggcaacgcagcacgcgacgcccggatggcggtcgtcttcgcgcagctggtcaccgacgacggcgaccacggcgtccacgccgtgcttgtgcccgtgcgcgacgaagccggaaaaccattgcccggcgtgacgatcggcgacaacggacccaagggtgggctgcccggagtcgacaacggcaccttctccttcgcccag

SEQ ID NO: 177430 - DNA, 592 bp, Arabidopsis thaliana landsberg
ttctctgcgatgaataaactaaagcagatggctttacgggtaagcccccggccgcaagccttttggcctttattgtgaacaattttccataaatgtcttctgctgtgattcaggtaatagctgacagtctctcggaggaagaaattgctggactgaaggaaatgttcaaagcaatggacacggataacagtggagcgattacgtttgacgagctgaaagccgggttgcgaagatatggttcaaccctcaaggatactgagattcgtgaccttatggaggctgtaagcactttgctctgatctgatctgtgtgagtacctgcttgaaatcagtatgtttagtattaatctgtgactgtgatttaccaggcagatattgacaagagtgggaccatagattatggtgaattcattgctgcaacaatccatctgaacaaattagagcgtgaagaacatcttctgtcagccttcaggtactttgacaaagatgggagcggttacatcactatcgatgagctacagcacgcatgtgctgaacagggaatgagtgatgtctttctagaagatgtgatcaaggaagtcgaccaagacaat

SEQ ID NO: 177431 - DNA, 676 bp, Arabidopsis thaliana landsberg
atggcgttactctctcgaatccgttcatcaacatctctcttccgtcacctcaacgcatcaccacaaatccgatcactctcctcggcttcaacaatcctctcaccagattcaaaaactcctctgacaagcaaagaaaaaagcaaagcagctctttctcttctcaaatccgagaaagatccagatcgtatcctcgaaatctgccgtgcagcttctcttactccagattgccacatagatcgaatcgctttctccgccgccgtcgagaatctcgccgagaagaaacatttctccgctgtatcgaatctcctcgacggattcatcgaaaacagaccagatctcaaatcggaacgtttcgctgctcacgccattgttttgtatgctcaagctaatatgcttgatcactctttaagagtttttcgtgatctcgagaaattcgaaatctctcgtacggtgaagtctttaaacgcgcttctctttgcttgtttagtagctaaggattacaaagaagctaaaagagtttacattgagatgcctaagatgtatggaattgaacctgatctcgagacttataatcgtatgatcaaagtgttctgtgaatccggttcagcgagctctgcatactccattgttgcggagatggagcggaaagggataaagccgaatagttcaagctttg

SEQ ID NO: 177432 - DNA, 117 bp, Arabidopsis thaliana landsberg
cttgccatcgccatcgagaaaacaattcgaagccgtattatgtcactgcgctattacgaatcaaagaaattacgaggactgcttcaagaatggttccggtctagaatcaacagatag

SEQ ID NO: 177433 - DNA, 187 bp, Arabidopsis thaliana landsberg
atggtacaggttgcagggcagaaagccatcgtcgtgggcgtgatcgaggattctttatggcgtattccaggaagaattgatgcctgcctttttgaggacgcgcatgccatggcagctttgccgtctgactccaatggatacgtagtggccgacgtgaagccatccgattttccgcctccctctaatg

SEQ ID NO: 177434 - DNA, 314 bp, Arabidopsis thaliana landsberg
agctagaaccaggcatcgagtgtaaactcacagttgagtattgtgattatggagaaactggtgatggctttgagcatctgggagtgaacttaagtgatgctgtcgctgctgacttagctgatgatgtaattcggcgactttctgcttcaaccttgcgacatcagcttcagcaagagcaatctcctcaagctctgcccttgtctttgcattatattgtgatgttagaactaaggaaagcaagagatagaaccaaaaaaaaaaaactgctttctctagctaaagtgtatactgactttggaatccgcagcttgtga

SEQ ID NO: 177435 - DNA, 160 bp, Arabidopsis thaliana landsberg
atggcattatacggtaaagcgacatatcaggccacaaaggattttatagataaatacggtactgcgatagcaactgctattcgtgataccggtttatttttcacagctgtggtagcccagaaagcgtatgaaagcggctatggtaaaagtgagctagcca

SEQ ID NO: 177436 - DNA, 526 bp, Arabidopsis thaliana landsberg
cgctgggatgtcgtcgtcgatctgcgcgcctcggccattgcctatctgctgtggggcaagcggcgctacgtcgcgcaaaagcgtcaggtcggcgagcatcgcgtcaagcagatggcgcgcatcttcggtctcgacacggtgccatcgccgcgattgtggatagcgcccgcgcgggaggccgaagccgcgagtctcgtgccgcccctttcttcatcaggtttgggcgcgccggtgctggcgatcggccccgccgcgaattggcgcggcaaggaatggcgcgcggagcgtttcgccgagctggcgcagcgtctgaccgcgccgggcgggctctttccgaatgcgcgcgtcgcggtgctggcggcggcgcatgaacggccgcaagcgctgccggtgatcgaggcgctgggcaatcgcgcgatcgatctggtgggcaagattcatctgctgacggtggcggcggtgatcaagcgcacagcgttgttcatcggcaacgacaccggtcttatgcatctcgccgcggcgaccg

SEQ ID NO: 177437 - DNA, 104 bp, Arabidopsis thaliana landsberg
gtgtttcgtagaagagatgtcgccaaacaaagtttcgaaacgtcacacgtggctaatggttttgatgcacgtctagagatttgtgttcagaaagaaaccatgag

SEQ ID NO: 177438 - DNA, 31 bp, Arabidopsis thaliana landsberg
atggacgacgcggacgagcaggaccggatcg

SEQ ID NO: 177439 - DNA, 367 bp, Arabidopsis thaliana landsberg
gggaaaaactatgctcttgctgtttgttggcttcttggcgttggatgccttttagcatggaacagtatgctcacaattgtggattattacgcttatttgttccccgtaaggccaaaacgtttttgcttttatgaaaatacatatgttgcctttctgcctataatcaacttgtcacttacctcgtcttgattgtttgtttttaacttcctagtggtatcatccatcgagaatccttaccataatttatcagtcattttctattggagcacttagtgttcttgttcacaaagaggcaagactcaataccagacgtcgaaatttgtttggatatagtcttttttcccttggttctcttgctgtcctagtg

SEQ ID NO: 177440 - DNA, 83 bp, Arabidopsis thaliana landsberg
gactggacgacccaagcaacatcctgatcacgcaaaatgacactgcctccgatgcatcagcggctcaagtccgatcaagatga

SEQ ID NO: 177441 - DNA, 1561 bp, Arabidopsis thaliana landsberg
atggagagttctagcaaggaatcggccgccaaatttgttcgcttgggtaagcgaaagccggaagatgatttggagaccaaaccgtttctcaggaaacataaggaaacgtctgaggagaaggagacaacggaaggatttgcttgtagtcttgagcaacaagataatctaatctcagcgaaggctgtttccgtaacgctctttgtatccgggctctctaggcaaacaaaaatttcagatatcatcgatttcttcagtgatgttggagaagttgttaatgttcgaatttgccttaagccacaaggggaagctgttgcgttctggctttgttgagttttcttctgctagtgaggcaaacaaggcactggaaaagaggaatggtgaagttttgcacgatcaagagatttctcttaaagttgctcagacaagtccataccggccaatcaagttttgcatcgagcacatggtttggaaccaagactcctttcaactagatagccttctcatcgaagaagatgagacacctcctgattttgttgacgaagtagtcattgtttccaatctctctccccaaactaaaatagcacatatcaaaggtttcttaaatggtgttgcacaagtcgttagcgttcgacttgttgtaaaccacgagggtaagcatgtgggctatggatttgttgagtttgcttctgcttacggagcaaacaaggctctggaagagaagaatggtgaatatctgcacaatcataagattctgttgatgaaaggacatgaatctcctggttttgctgaggaagctgccataacaaaaacgctctttgttgccaatctccgtgactccattcagatatcagatatcatcaatttcttcaaagatgttggagaagttgttcatgttcgacttattgtaaacagccagggcaagcatgcgggctggggttttgttgagtttgcttctgctaacgaagcagagaaggcgctggtaaagaacggtgaatatttgcacaattacaagatttctcttgacggagctaagacaggtccacaccgtccacccaagttttgcctagatcacaaggtttggtacgaagactaccttcgaagagagagccttctcattaaagaagttgagggagtggaaggacttgatgaaactcctgattttcttgaggaagttgctggaagaaaaaatacagtttttgtcgccaatctcccttacaactgtcgtctaatagtaccaactatcatcaatttcttcagtgatgttggagaaattgttcatattcaaattattgtagaccacatgggtgagcctgtgggctgtggctttgtggagtttaattcttccaacgaagcagagaaggcgctgcaaaagaagactggtaagatttctgttgacgtggctgagatagcttcataccctgttggacccaagtacaacgttgctaagaagctttggtacgaagacaaccttcgacgaggaatgcttctgaggaccaaaccggatctgaagaaaccttcactgatgagtttatgctgcggtcagagggttacccttctctga

SEQ ID NO: 177442 - DNA, 198 bp, Arabidopsis thaliana landsberg
caacattacaaagctgctaaacagaaacctgtcaatgacaaactggagaagacaaaaacatctgtggtatcaaagaaagggcttatgcctaatataagtgcaatctccaacagaaagaacaaacaagtggaatgggggtctccttcatatctgcctggagagaaaccctttagaagattacttctctatggaaaatag

SEQ ID NO: 177443 - DNA, 462 bp, Arabidopsis thaliana landsberg
atggaggcaaacgaagaaagtttgaagggaaaaattgaaaagctagagggaaaggaggttattgtggagtcaaaagaggatgagatggatataataatagaagaaaatagggaagcagaacaggaggtaatggaggtgaaagcaagagatggaagaggggagcaaaatgatgtactgatggaagaaaacaacaatcagggtgagcaaaaagatgaggagatgcaagatgcttctagtagatctgaaagttctgacttcaattcagatgaagatgaacaaattctgtcccggcgtgatgatgagttggatcttgaggtatgcatcatggatatctcttgtttacttggcggaggaatagtgtatgtttatctaatatttcttttttcaattattgggcagaaacctttgagcgaggaagaaatagatgagttaatttcagatcttctggcagttgagagcaag

SEQ ID NO: 177444 - DNA, 378 bp, Arabidopsis thaliana landsberg
atgacttgcatcattcttgttagaggacttcctcctggtttcggcagcctggggaagttgcttccggcgaacaagaacacgacggctatagccattgcgacggtgggaacacctaaaccccaaccccaaccaacattcatctgaatccaaacgagaacagaggaagcaatcattgcaccaacgttgatcacaaagtagaaccagttaaagaaagagctcttagactctttctctttttcgtctgtatcatcaaactgatcagcaccaaaggaagagacacaaggcttgatccctccagttccgagtgcgatcaagtaaagcgctatgaatgtaatagcggtttgacccgctgttgcgtgacaggtttctccgctgcag

SEQ ID NO: 177445 - DNA, 178 bp, Arabidopsis thaliana landsberg
cacccgcaacgcggaactggtgcagcgttctgtcagcgccccgaccgagttgctgttgctggacgacagctaccacatgatcaccatcgacaagcagcggcgcctgctggtcgatcgctcggccgcgttcttcgaccgcgtggccgaaggcgtccccctccagcgcgtcgcggcctga

SEQ ID NO: 177446 - DNA, 446 bp, Arabidopsis thaliana landsberg
cccttcgtcctgacctcgatcgtgtgtcaatcttcacagatgccgcttggaagcatgagactaaagatgtgggctttggatgggtaatccgaaattgcccggaactgacagctctccaccaccaatcagcatcccggaatgtcagatcgcctctcatggcggaagctatagcgttgttcctcgctctccaatacgcccaatcgatcggtatcaccaaactctcaatggcctcagattcacaacaattaatcacaaccatcacctctgagtctccttcaaccgagctctatgggatcgtctttgacatcctcaatttatccctaggatttgcagatgttagcttttcctttgttccacgaagtgagaatcgtgtagcagatgaactagcaaaatcaagtcttatctctttttctattgtacccggatcaaccggtttaaacctttga

SEQ ID NO: 177447 - DNA, 258 bp, Arabidopsis thaliana landsberg
ctggatgatataacttgcgacataatccatgtcaatctcctcgacaatccaacatatgaagcagtatcctatacttgggccaccgaatatggcgacgcctcactatcagcaaccatccaatgccgtggtaaggacatcgccgttacgcgaaattgtgaatcggtactgcgagcatcaagactaaaaggtcgaaatagaaagatatgggtggacgctgtctgtatcgatcagaataacacatttgaaaggaaccatcag

SEQ ID NO: 177448 - DNA, 103 bp, Arabidopsis thaliana landsberg
gctcttgcttaaagagaagacagacgttgttggtcgtgaaaacatcaataggccgcaccgctgtgagcaggtcttcaccttgttgcacgactatactgtctag

SEQ ID NO: 177449 - DNA, 155 bp, Arabidopsis thaliana landsberg
atgcttgccatcaaccagctggaaaaagaagaatacgacctgaacatagaagccgaagtgcggatgcgttatttccggtatgtgaaggaggtgaccatgctgaaagccatgagccagggactggtggatgccgagaatgcaatgaagcagatcag

SEQ ID NO: 177450 - DNA, 96 bp, Arabidopsis thaliana landsberg
atgtacgaggttgcaactactggttcagaagatgagaagatagccgtggcttctattctctgtggagcatctctgtttcgtggttggagcatacag

SEQ ID NO: 177451 - DNA, 882 bp, Arabidopsis thaliana landsberg
accgaatcagaccggacatttcggttcgggttttagaagcaactctgttttgttgcctcaacaagcgaacaatatagtcgcacgtcgtatctctctcgctgcctcacttcatcgtcccaaaaaacgcctctgtttcaccggtacgttcctgcagctctctcttaccaatactctcttagatattctcacgcggattcgtttgccatcttagttcttcgccgtataagctcgtctctagccatggctcttccgctcgggaagctcaccatcctcatcggtgcaggtcggtacttttatagggtatttcttgtagtgactatgctctagttctccattgcttttttattggtttcgtctatgggtaatcgcaattagaggataagaagttagtgtttttcataaaccctttgatcagtgtacttgactggctcaaagtttaagactttattggagtatagctattctctgaatacatctgaggagaagtttatgtttagtttctctgtgaatgcacctactagtacaattattgtgaacttgctgagtcgattgatttcgtgtacatgcttaatgttcgtccaagttactgcaattactaactatactgtgatttttgcaaatgttactttaaggtcttattggatcagcattttctaaagaagggggcttaccagatgtctccaatttggtttctggtgcttttaaggtattctaatttctatattgtgcaaaagctttggcgacttcacatgtgtatgatgcggtttggcaaaatgaggcaatgggttttgtttatgtggacagatggtattcaggcaactgaaacaagacgaacctagcaaatcagctagcaaaccccacgatgatgtacttgtggcccag

SEQ ID NO: 177452 - DNA, 371 bp, Arabidopsis thaliana landsberg
atgcgctctatacggctcaatccgttcatttaccagtcgtggtataatataggcgtcttggtaggtgatatcattcatgctttgcattctacagtgcttataggaaaaaacagtacgatacgtgtaatcggactagagatgcatacgagggctttgagaaatgcttagaactgaatccggacttaccagatgtccaggcgcggtttgatgttctggcttcgtttcaaaatggcgaaaaaaatgtatctgatgattacaaaattaaaaatatgctgcagtgcggcctaatggcgacggtcgatgaatcagacaatattggtggcgctgaaattgtactcaatcgaattatatacgcgaagaataatgaataa

SEQ ID NO: 177453 - DNA, 955 bp, Arabidopsis thaliana landsberg
atgaatcactacgaatcagatcttcctattcaggattttatcaccaagaatctgcgattacttaaacctcaggttatagaaagctttcatctccaatgttttagttcatcatttaaacctgaggatattaagcattgggttggtactactatctctcgccgcgtgcgtgagctgattatcaactattgtgatttgtcttggcttgacaaacctgttgtgttattagatttaccaaacagcttgtatacttgcacatcgctcgtcactttgaaacttataggccattccattattgttgatgttcctcaaacggtttctcttccttgtttgaaaactttggagcttgattctgtggcatactctaacgaagaatctcttcgactacttctatcgtattgtcctgttcttgaagatttgactattcatcgagatatgcatgacaatgtcaaaactcttgtgattattgttccgtctttgcttagactaaacttaccgatagacggggcttattcgtgtgatggttatgtgatagttactcctgctttgaagtatttaaaagttcctggcctttatagagaagatttctcgtacttgcttacgcatatgcctaacgtggaagaagcagatcttagtgttgagcaagatgttgagaggctttttgaatcaatcacatctgttaaacgcctttcgttattcgtattactcgacattgaagacgaggtatacttcttataactatcacttacaacggctaaattgttttttcttttcttgagactgaatcataatttttttttggttatgtttttgtgtgcagtctatgtatcataatggtatttacttcaatcagcttgaacatctgaacctacatatataccgcgataactggtccaaattacttgttcggttgctcgtagattctcctaaactacgagtcctcaagattgttgtcgat

SEQ ID NO: 177454 - DNA, 93 bp, Arabidopsis thaliana landsberg
atgaccaatcttctacgcatggtcgaggctccaatggacgtggtcgtggtggttctagtccgccaacatctgcttctccttctcgtggtcgtg

SEQ ID NO: 177455 - DNA, 101 bp, Arabidopsis thaliana landsberg
tgctcctggagaagaatctagaagaagaagaagagcatcaaacgaagaaggatctctcttctctctgtgactctgtgtatacgtctgatgcaattgaatga

SEQ ID NO: 177456 - DNA, 62 bp, Arabidopsis thaliana landsberg
gtgataatatcgagttccttaatgaagacaaagatggcgagggagaagaggaagaagtttaa

SEQ ID NO: 177457 - DNA, 121 bp, Arabidopsis thaliana landsberg
aagaagtgttcactatgaatcaatcgagtatgaaaaagaaaggaatgctggatttatttctccttttggatattcagctgccacagtgtctgctgcaactgatgctgtatgctctatggag

SEQ ID NO: 177458 - DNA, 156 bp, Arabidopsis thaliana landsberg
gaccagcctcgaactcaacaaccaaaacagatacgttttgctgtattcgcctcagacataaagaaagcaccaaacagacgagaaagggaaaaagaccgccggaaaattaaggactcaccggagagacgacgggagaggacgaacgaggaaccgtga

SEQ ID NO: 177459 - DNA, 618 bp, Arabidopsis thaliana landsberg
atgggttctgatttggattctgactctggtggatccaaactcgagaggaaatctagagctattgatagaaaacgtaaaaaggaggtacaagatgcagacgatgaattcaagatgaacattaaggagaaacctgatgagtttcagctaccaacccaaaaggttacattttcctttacttaattgtggatttgttcatattctggatctctggagctatttgttagctaatcttttctattactctacattgtttaggaacttgaagaagaggcacgtcggccgccagatcttcctagcttgcaaatgatgtataagagagagtgagtaacattttcaaattttattcctttttaagaattctggtgtaatgttattattatgattgttttaaatctcctaaggaatcatcctctcggttcttagtttaatggtactaatttgcgtttcagttgatagaatcctgtcgacttttaaggacttgccaccacaaggaggacaagcacgagaggaatgattatgttggacagcttaaacctgaccttaaattctactaccagtatgatgaatcccttattggaactttaattgaggctattccctatactctgactctactct

SEQ ID NO: 177460 - DNA, 106 bp, Arabidopsis thaliana landsberg
agatttgagtttagaaaagaataagcaagaagaagattcaagtagcctttgtgtcgagaagaaggttcaaggagctctctttgtgggctatagaactgttgtttaa

SEQ ID NO: 177461 - DNA, 36 bp, Arabidopsis thaliana landsberg
atgaatgctcgacctgtggtagaaaacatcgacccg

SEQ ID NO: 177462 - DNA, 179 bp, Arabidopsis thaliana landsberg
gttgcacaatatatcgaaggaggctggattcagcccttgaggaatacttcatataaatttcctaatccaaaagaggcactggctgatgcaattgatgcagcaggtcccacgttggggcctactctactttcaatgagcgaatttctgatgtctagttttgatcagtcctaccagtcaag

SEQ ID NO: 177463 - DNA, 138 bp, Arabidopsis thaliana landsberg
gagcaagatggctcccttgatcgccttattcactggcctttgcggcttcaagaaaaacgctcggccattgggaacgatcgagacaatgaatcagtcatctccacgggagaccaaagaaagagaacccacaaggaatga

SEQ ID NO: 177464 - DNA, 402 bp, Arabidopsis thaliana landsberg
atgggagctagggttcaagtacaacattacaatttaggatcatctgattcctacatcgctacttctctccacgatctcaactccgtcgatggtccgccgagagatatcgacggtatcggaggcgccgttggtcgtgacggcgatagtttagataatgacggcgattcctcttctgcggtgtgtctcaatttctagggtttatgattaacttagctcaaattagcgaaatgaatcaaaattagggttttatgaattttgagaagttatcaatagatttggattttgtctttcttcaggactgtatgcatgaatcatacagaaactctatgcaaatcggagtagaagaaggtggatctaacatggagaacaaaggatctgcttacattatgttaaacattgaag

SEQ ID NO: 177465 - DNA, 347 bp, Arabidopsis thaliana landsberg
ggctattgtggattgccgcctacctgccgcaaaaccctgaaaccgaccactggctgcacctggcctgccgtgaactgctgcatgaaatacccctgcgcttttacgctgatggcggctacgcggaaggctcaaccccctgtcaccggtttgcggctgaaatggccatatggggcgtaagcctgctgctggccttgccggccaaccgtgagccaccggtaaagcctgacaccgtggtgcttgagcgcctgtacaacatggcgcggttcaccatggccatcacccgcccccacggggccatagcccaggtgggcgataacaacggcagccgcttcttcgccctgcagcag

SEQ ID NO: 177466 - DNA, 59 bp, Arabidopsis thaliana landsberg
atgcttaaaaaagtattgggtccgtataagccaaatccgaaaagccaaaaagtcttaag

SEQ ID NO: 177467 - DNA, 180 bp, Arabidopsis thaliana landsberg
aaaggaaaaaccccttactgtgctcgtgttggttcttgaaatcgcctgcatcaccgtccttcacgcaattaagatcaatcagtcagaaaaaccggcaaacaaagagatcaccaaaaatgtcgttcctgagcctgttgaaggaaagggcaaaactgccgcttacaccctggcggttttcag

SEQ ID NO: 177468 - DNA, 498 bp, Arabidopsis thaliana landsberg
atggacgacgaggttgttcagcgagttttccaagaaggaggacgagatttcttccagcaacaaccttctacttcttcttcctcttcttcgattcttcaatctcttcctcttcacgtggtacgcttcttctccctttcctaatttccagaaaaatttacaagttgaagaacatcaatcatcgcttttgctgtaggctttcgatcatggctattatctgttggtgaagtccattcaagagcttagagagaagaaggacggcattgttactgttggtattggtggacctagcggctctggtaaatctaggtaatccattgtttatgtttagcgtcgaatttctcaagaggcatgctcgatttcatggttttttgtttggttgcacgaagcttggcagagaaagttgcatctgtaattggctggactgttattgccatggaagattaccgagatagtttggacgatggttctgagttggaaacattagattttgatgcttag

SEQ ID NO: 177469 - DNA, 365 bp, Arabidopsis thaliana landsberg
ccacttttggtttgttctcgcgtgccaatgaagtcggtatgtagatatgttgtagcaaacgatgggctaactataatcttatgtaatatgcaaagaccaaatacgttttagtaaccagttatggtgaacctgcagctaccattttgtgttttctaaaactaagtcttgactttttttaatttgggaaagatcagattagaaactcaaatcaacaccagtccactctctaggttagcaaaatactcatacctgttctgctgcgcttgttcttcacagatggatccgagttgcagagacctcaacctgatgatggtaacaaggcaaaaaatgtgctagagagagacagcatcaaactctacaattat

SEQ ID NO: 177470 - DNA, 212 bp, Arabidopsis thaliana landsberg
ttgaaccgtactgcgctgtaataacgcttttcccgcacaacaaaaaccgcggttaccatttagacccatatatgtgggacaagtgcggtttgtacaaaataagcggtacagaaaaatgtttgctgaaagaacttattgagtatatttatgataacattgaaaatgtgattatgaaacaaattatgaaaaaatatttaaccttcgatcgttaa

SEQ ID NO: 177471 - DNA, 1229 bp, Arabidopsis thaliana landsberg
gatgagatcacaagtcctctcaccgcacagatcttcgatttctgcgattcacagttatttcaagaaaccttcaatcaaacttctgaagtgacctctgcttcaaacggttgtggctatgtcgaaaacaacaacaccaacaactttccagacaaatccaacagtggttcgaatcaagatcatgaagacaacaacgacaacgctgatttatcaatcatattcgattcacaagatgatttcgataacgatatcacagcttctatcgatttctcttcatccatccagttcccagcctccgatcaactccaagagcagtttgatttcaccggaattcaacttcaccagcctccgaacactctctactcttcctcctctggtgaccttctgcctccgcctttatcggttttcgaagaagattgtctttcttctgtgccaagttacaatcttggttccataaacccttcttctccttcttgctcttttttgggtaataccggtttaccgacttacatgaccgtaaccgggaatatgatgaacaccggtttaggatctggtttttactccgggaatatccatctcggttctgatttcaaaccatcacatgatcaattgatggaaattcaagctgataatggtggattgttctgtccagatccgattaaacccatctttaatccaggagatcatcatctccaggtatatattccaaaccttatatataaataatgaaaggtattgctggcaaacaaattgtgtaatgaaaccagattagtaaaccggtctgatactaaccggttatggggtttgttttcttaatagggacttgacggtgtcgagaaccagaaccacatggtggcagagccggttctcccgcagttagggacggagataaccggtttagacgacccgagtttcaacaaagtcggaaaactctcggcagagcagagaaaagagaagattcataggtatatgaagaagaggaacgagaggaatttcagcaagaaaatcaaggtctttgtgcttaaccatcataaccggattaaaccagtggtgatccatataccgatttgttcacatgttttttttgttatattttgttgtagtatgcatgtaggaagacgttggcagatagtcgaccaagagttagaggaagatttgcaaagaatgatgaatttggtgagccaaatagacaagctttttcaagccatcatgatgatgaagatgaagacgat

SEQ ID NO: 177472 - DNA, 503 bp, Arabidopsis thaliana landsberg
atgaatgctggaaggtaactttctcacttttgatattctcatcgcatcaattcaaatccaaagcttcttgatcgtaaaacaatatatagttgtatagcacagtatcgatctttctcggtcttattgtttgcagatatgagtatagatgggcagatggaactactatggtttcagcccctgaatatgttgagcgtctcatgaattggattgaaactcagatagataacgaacacatctttccgaaaaagactggtatttgtgaagataattcatagttttaaacatgatcatgaagttggtttttagtttgtaacacttgtttctttctttcccattcaggagaaccattccctccaaactttgaggatttcgtgaagcggattttgagaaagttgtttcgtgtctatgcacacatctatcattctcactttcctaagattgtcactctcaatgaacaagctcatctcaacacttgcttccaccgttaccttctcttcgtatct

SEQ ID NO: 177473 - DNA, 179 bp, Arabidopsis thaliana landsberg
gcgtccattttgataaagttggtttatttggagatttggaccaaattcacgtaacatcacaattgtcttcattatgggctccgcagccagtcccttttcggccgttagtctattttgaatttgttcatcgtcggtttgattccaggaaagtcacaaagtttaatttagcaaaattttag

SEQ ID NO: 177474 - DNA, 149 bp, Arabidopsis thaliana landsberg
atgtccgaaaacatattgctacagatttgcgagagaagttcacctacaaaccaaagccggaaaattatttaaaacgtgatgacctaacccgccaaggactggcatcagataagcgagtttcaaatcaaagcagtatagtcaagttgtaa

SEQ ID NO: 177475 - DNA, 350 bp, Arabidopsis thaliana landsberg
aacactcattgtctgcctgtttcttgcacctgcacaagctctcaaacctcagtatcggagtccggttcctgaactcctcaaggtaactctctggttggcagacccggaaatcaaatggctctgaagttgatgaattctctgaagataccgtcaccgaagaaggcgaggatgaagacggcgagagactgattcctactatgccaaggaatgatcttacaatgcctttgacaatggagatcgataatgctgtattaactaatatcacacataacattccttctgatggaccaggaagacttgatagacccatctttcacttgttggattcgatatcaaatctttgtcggtag

SEQ ID NO: 177476 - DNA, 267 bp, Arabidopsis thaliana landsberg
gcgcagacctacaagggcaagatcccgaccgctgaacagatcgccaacatgctcagcgcagataagcgctatacggtcttcggcacggcgccgtggcgcgtcgaggcggtttatcaggacaatctttacggtttaaaatctgatattatctttcgcatcgaccctgatggcgtcgatatacgttccggaggccgtgataatccccgcgatctgggcggcgatggccgtcgcgtgctgggtttgctcattaagctgaaagccatgtag

SEQ ID NO: 177477 - DNA, 147 bp, Arabidopsis thaliana landsberg
atggcacatcttgctaacatcgctcaaaccaccaagctcaccctcgacagtcgagaagattttgtggtcgacttttcctccgagttggtagagaaggatttgcaggtggaaaggctgagccagcgcattaccaccttggagcagcag

SEQ ID NO: 177478 - DNA, 263 bp, Arabidopsis thaliana landsberg
ggcgtaaaaccagacgtggtcacttacacaacactcatgaaagctctcattcgtgttgataagtttcagaaggtattcatcattgattatggttgataggggaatacctgtaagtaggattgaccttttgagatgtgatggttttacaggtaccggttgtttacgaggagatgatcatgtcaggatgcaaaccagatagaaaagctagatccatgttacggtcagctctaagatacatgaagcagacgttaagagcctcatag

SEQ ID NO: 177479 - DNA, 1719 bp, Arabidopsis thaliana landsberg
  unsure (1)..(1719): unsure at all n locations
atggcgaagtgtcaccggaacaatgttgatcctctcattctccatcgtactccctctgcttcttcttcctccgtatccgcaaacaccttctccggttcgtcattgcgcaggatcatcttcgacgccattagttgcggcggtagctcccgttaccgacgtgaactccgagaagaagacgataaagattgttcgaaatcgacaatgatcggagaggattcaatgaggaaaccggagaagctcagcgatctgttaaacttagcagtgattgagagtggtgtagagaccaagaagaaggaggaaacacttgagattctaaaacgtgttgttaaagatttacaagcggaggcggaggcggaggcggcggagaagaaaatagcggcggctagtgaggttaggttgttagcaaaagatgatatagaggcgagagtaacacttgcgatgcttggtgcgattccgccgttggttagtatgatcgacgacgagtcacaaagcgaagatgcgctaatcgcttcgctttacgctcttctcaacctcggaatcggcaatgatgtgtaagtttcttcaagtagattttgagttttgtttcctttgcattgcatgtttctcttgcatttcaaatctctcattaggttttgtgaattttatttgtgaatgttttttttgttgttggtttgttttttttaggtgaaatgatagatagagtttaatagttattttcagatatgtcactttcaatgctattctttgttgttggtctgttttagtnacatgtttttctgaagccaagaatctgaaaaagttgaagcattaaattcaatcatttgtttcaatgacatatgtttaaattctctgaatttcaggaacaaagcagccattgtaaaagcaggcgttgttcacaaaatgttaaagctaattgagtcatcaaaacctcctaatcaagcaatcgcggaggctattgtcgctaatttcctagggttaagcgcgttggattccaacaagccgatcattggttcctcgggtgcaatcatcttcctagtgaaaacgcttaaaaacttcgaggaaactagcagctcacaagctagagaagacgctcttcgagctctttacaacctttcaatatatcaccaaaacgtttccttcatactcgaaactgatctgattccttttctcttgaacacattgggagacatggaagtgagcgagaggattctcgccatcttaaccaatgtagtatcagtccccgaaggaaggaaagctatcggggaggtgattgaagcgtttcccatattggtagatgtgttgaactggaatgattcaataaaatgtcaagagaaagcggtttacatcctcatgttaatggctcataaagggtatggagatcggaatgcgatgatcgaagcgggtattgaatcttcattgcttgaactaacacttgtaggaagtccattggcgcaaaagcgagcctcgagggtactagagtgtttgagaatggtggataaagggaagcaagtctcagctccgatttatggaatatcttctacttcttcattgggaagagagagaggtcatgatcttaggatgacggatgagagaaaagcagtgaagcagttagtgcaacagagtttacagagtaacatgaagaggattgtgaagagagctaatttaccacatgactttgttactacttcacagcatttctcaaagagcttaactttctga

SEQ ID NO: 177480 - DNA, 245 bp, Arabidopsis thaliana landsberg
cacgtgaagcaggacagtcttacaccggagctgtgcttgtgacaccggatggttcttacccggcagagaaggacaaggagagattgcagtcagcattggagaaatgtgggattaaggaatgggaactctttgctgttgataattgttcttgtgaaaacccgccgctagggattccacagggttctagacttcattcgagaatcagtatcatagaggaaccagactcggaagaaaaattcaactaa

SEQ ID NO: 177481 - DNA, 56 bp, Arabidopsis thaliana landsberg
atgataattggcacaagcggcccaacgcacaagacgataagacgaaaccataggag

SEQ ID NO: 177482 - DNA, 533 bp, Arabidopsis thaliana landsberg
atgtccaacaaggttcacgtagggaacattgagatggaggaaggtttgagcaagacgaagtggatggttctagaaccttctgagaagatcaagaagattccgaaaaggctttggagtgtcggaaaagaagatccgaggagagtgatacatgcccttaaagtaggtctttccttgacactcgtttctttgctatatctcatggagcctctcttcaaaggcattggaagcaatgctatttgggcagtcatgactgtcgtcgtcgtcctcgagttctctgccggtaagttataaacattaaacaatttatctccttatatatacatacatattacaatcaactatagtaatgtaatatgtgttttaactttttgtttaacttcttgattctttaggtgcaacgttgtgcaaagggcttaatagaggattagggacactaattgcgggatctttggcatttttcattgagtttgtagctaatgattccggcaaagtccttcgagctatcttcattggcactgctgtttttatcattg

SEQ ID NO: 177483 - DNA, 1220 bp, Arabidopsis thaliana landsberg
atgaattcgagaaatttttccaatagctattacccaaatgtaaatcatgggtcaaaccgcggatcacatttctcaactgaccgctacacgcctaatgcatcccaaatgcatggcgagccttggcagtcttgctcgtctaatggaggagcttatcggaccgatcattactctaatgatcactctgccgccttcattgagaatcggctgcagctaaccgctcggttagcccattccaccactgcgtcccatctcctggagatcaacacatgggaggacctcactcttctcatccttatgaagttgcccgacatgaagatttcggctatgaccaaggatacttgcaagaggtgattagtgtagatgttcatccgaacaactatacttaccaaaccaatgagtcctaccaagccgccgagctagaagataaaatcattggtctcatccgaaacttcgttgatgaccatcaagaagacatgaggaggatcaactcaaggatgacggagatgagagccgaatttggagagaagtttgacaacctcaccattcgactcgagaacatgggggaggcgcttgttgagatcaacaacactctccttaatcaccaagaggatattcaagaccaaaacactagaatggtcaatgtgggtttaaccgttgataccgttgagagccttctagattggaagattgaggagctagagaagaaactcactaactcaaatgagtctttggattggagaagcaaccaatcttgccaagaagaagatgggtttcctaaggcccaagctctttatgaagaggaaacgaaaaaggaaatcagattcctagtggaaaagggaaaagacctagtttcctattccgaaaaaggaaatcccgaccctataaaatctttaagggtttcgattcctttagtttctcttcaagacaaagtcgatcaagaagagggtttagaaaaagaagaaaccgcctctttcgatgaagactctatggccgaacacaaccctagagaagaaggttccgaaaccgaaagagaagaaggttaccttgtgagtcaagaaaaccaaatcgaagaactttcagaagaagatgacgaactcaccaacatctctagtgaagaaagagaagacgaagagctcaaggatgtccactcttgcatgacaatccgactacctagcggggggatatcgcaaaccctagcttcgggcaactcatgtccatag

SEQ ID NO: 177484 - DNA, 527 bp, Arabidopsis thaliana landsberg
atgcaagagtactggtttgagtcttctgatgataacaacaacgagaaggtgagggtaagtgtctttacttggattccaagttattaggattcgtgacttttggatttattgtgttttgttttggttggtgtgtataggtggatcatgctttgtgcaagatttatctgactccagcggcagcaaagaagaagaaagctgaggaagcagagaatgagaagctgaagaaagaagaagacgttgagcagctggatttgaatcaaccagaccaattgcagctgcaacagcctcatgatattgtgtatcaaccgcagtattgtttacttccagaacatcatcagccgcagccttttcctgataacttttctgagttgatcagctttcaacagcaaccagtgatgatcccagacgattttgaagatttcttggctgaattcactaaaccacattcactggatggagatgaagaattcaacaattatggtttgtttgaaggcttctttgacacagaaggaatgataaaacattaa

SEQ ID NO: 177485 - DNA, 984 bp, Arabidopsis thaliana landsberg
cattttatctgcaacttttcaacttctgatggcaagagtcgattttctgggcaatttcaatcttgagaggaccaactggatcgtgtatgtcaagttattgagcatctggaataagaggggagacattgctggtgaaccgatgaagatgattctctgtgacgaaaaggtaagtcatttcaacctattcttcttctttgcatgtctttaggatccgttttttgttgaacaagattagaaatagtagaagatttggtctttaatttggattagggttcgaaaatcgatgcaatccttccagttgggaactacatgtataagtttaaggtagtctcgtagaagggggttggtactacatggctgacttccacgtgaagagatccactggccctatcaagtacgcgtactgtctctttcagatcgagtgtacttggccaacaaaaatgtggcctagaagtcctagatctactcgctccttcattgactgcatgtacccaaatgagttacaagatgccggtgaacatgacaaacaatttgctacaggtaagttgatgaactattaaatattgtcaatttgtttctatatttatcattctttaatattcttctctaccttcttggaagatgcaatgtgagtcatatcaagtgtctcaaaattcaagcggtttccatatgtctttcgtcaaggagagtctgactatcacgtcagatatgtcactttcaacatgaaagataatctgtaagtgtagacatgtcatatttcaaatatattgaatataaaattctagatttaattttttggagtttaatatgtgttggtttggaatcttgtttgctttagcgatatgatcataacctgtgttgctgtggagaggatgtgtgaggtattattaacttctaagttttatcgccttattagtgctccaacttacaactacgagccacttgtggttatcaactggttatggaggattgtggaatttgaag

SEQ ID NO: 177486 - DNA, 552 bp, Arabidopsis thaliana landsberg
atgattaatgatgagaaagatttagatttgagtagtagtgtaagagttgtgacttcagagctaggtgttgctaaggaatcgattcatagagtagctgaagaggagagtgagctgtgtatgttaatggagtctcttaagctcgagcttcaaaacgtggagaaagcacattcagagcttaaagagattgagcaaagagagagggatcatcaagccattgaagatctgaagaaggaaacaaaagatgcaaaaacccaactctcgttgttagaagaagagctcaagattgctgtttttgaagctcaagaagcaaaagatgcagaggaacacgccagggaacggctaaatgttgcagttttagaatctgatttcagatcattagctgtggtgaaagaaagtgctgctgaagaattaactgagacagaagctttaagagcttgcagagatgaaacactcaagacattagagatgagtgagagagaaattgaagatatagaagctgcaacacaagatggtttgaagaaagctgagatggctcaagaagctacaattgtg

SEQ ID NO: 177487 - DNA, 241 bp, Arabidopsis thaliana landsberg
atggaggggaaggatgatgtttcattacctaggaaagatgaagaaccagaatttgacagggaaaagcttgaaacgtcattgtcaagttctgtcttaatacaaaatgataacgtagctcaaggagttatttcatcagaaactggagatgtacctagatgcacatgtaaagctcaacgtaccagaaagttggttatatttgatttaaatggaatccttgcagatattgttcagggttttacag

SEQ ID NO: 177488 - DNA, 130 bp, Arabidopsis thaliana landsberg
atggggacaccgggaatcaatgggagaactactacaagtaacaatgttgtcgaagtaagcaaaacacttggaatcgaggctgcaaggacaacgattattgatgaaatagggacagttatgggaaaccatg

SEQ ID NO: 177489 - DNA, 433 bp, Arabidopsis thaliana landsberg
atgggtgttgcgggcggactgaacgataatgctgccatacctgctgaagtaacttcctttatgcccaatggttatgggctgtacaatatgagcggtaacgtaagcgagtgggtgaatgatgtatatcgtcccatcatcaatgccggcgatgacgactttaacccttaccgtggtaacgttttccagaaagtggatatgagcggcggacagggcaacctgcgtgatgacaaaggccgcattaaaatgataccggaagacgattctaccctgcgcagcaggaggaactaccagcgctcatacgctaccaactacctggatggcgactcttccagcaatgtattgtacaactacggcatcaccacgctgatctcggataaatccagggtatataaaggcggcagctggaacgacacggccccctggctcagtcccg

SEQ ID NO: 177490 - DNA, 109 bp, Arabidopsis thaliana landsberg
atggtccccaagaaacaagctttgcttgccatccaaagatccaataaaatagactttcaaccaaaagttatcattcgagatgaggaaggacattttatacttatcaaag

SEQ ID NO: 177491 - DNA, 198 bp, Arabidopsis thaliana landsberg
agcatcggcttaattgtagacggctttcaaaatcagctaaacaaagagctgacactagtagataacatcatgaatgatcatagaagaacatgttaccgttttcacaaacataatcacaactcaaacagagaatgtggatctaaaccaggccgtctaatcagggaaaaaatcagagatggcagacatgtcgatccatag

SEQ ID NO: 177492 - DNA, 254 bp, Arabidopsis thaliana landsberg
ggtttgcaaggcccttagacactcccgaggtgaatggctagggatccactacgaggcctttacaaagactcccctggtgactagctgctcgttagatttcgccaatcgtacaaacttagtacacctccccaaggtgggtgactaacaaaatcaaatcgaatgaacctctgcaccccccttggtagagcgagccgcatacaccgagccccattgacggcacgacggctaagccaactacaccccggatcctctaa

SEQ ID NO: 177493 - DNA, 370 bp, Arabidopsis thaliana landsberg
atgtacaaggaagccatgtaagaaatcaaattccaccatgatcgaaactcatcaacctaaaaaccctatctattcatcatacattacgatcaacaaacccctaagcaacttcatacatactccaaaatcctaacaaaaccacaattccagtttcatatataatccaacaatcgcgtaataatttacacacaaattaagaatccgatcaaacaataagaactgcgaacatttcctgattcgaacacaaaaacacaatgagattgaacaaaatcctcaccgattagaaaacgaaaacagcgagaagaaccaaaagcgatctttgaagaaggaaaatgctgcttcaatggacgacgaacaatctcgatcctga

SEQ ID NO: 177494 - DNA, 150 bp, Arabidopsis thaliana landsberg
gatccctttggctttggagctctggtgtctgcggtcaccgatggtatgaaatcaaataagagacaaatgccattgaatcagaatccccagccgaaagccatgatacaagctgtacggccactgacattccccgccgaggcggtccagtga

SEQ ID NO: 177495 - DNA, 243 bp, Arabidopsis thaliana landsberg
atggaattacctgaaaccaaaaaatccaaaaaggttttacggatggaaaggaaggaaaaaaaccaacaaaaagccaaccaaaaaaagaagctgcaccgcgaattactcaaaatttatcctcctcgacaaaacgatggattatcttcaaaaagtggtcaaattatcaacagcctgtgtgtctctgactttgaaaggaacaggacagagtatgcacctcaaccaaaacgacgaaaaaaaggacag

SEQ ID NO: 177496 - DNA, 192 bp, Arabidopsis thaliana landsberg
ccggcggtggtcgagcgttatcggaccagggggatccatacataccgttcggatcgagacggtgccatcctgctcgattttgccgtggacggaatccatatcgatcgatggcgcgtgatgcgcaagcgttattggcaggatgtgaccgcggattgcgcggagtgtcttgctgaaaaaggccttgcacgctaa

SEQ ID NO: 177497 - DNA, 176 bp, Arabidopsis thaliana landsberg
ccaccgtgaattcagatggtacgaaagcaagggaaccgtcgtcggatcctaaaagaacctccatggccatcgcatttccagctaaaacgatcgaagctgctgttgccactgcgatgacaccgaaatccttcaaagaggacttcaaagcgagcttaggtggcgccctggtggcgtaa

SEQ ID NO: 177498 - DNA, 409 bp, Arabidopsis thaliana landsberg
atgcgaccgcccagtcgctccaaaagcaacatcgacgtcaccaaggacgagacgacgcggacggtggccgataacgccaccgcagcagcagcaaggcgctcgagtgggtgctgcagaatcctacactgcaacgagctgcagcaaagacatgaaacgcgcttggtccacagacttcgaacaaatccaagggtgtacggagtacgcttggtgagtgctcaacggctgacggctgacggatgacgggatggcgaaatcgagtaggctactagtatagccgcacttacaccggaacttgcccatacagcaaacaaccaaccacgagctgctgtacacaaccaaccatgccggacgcaagcaaggacgaggcaagatacgatgctgcatgccagtgacacgaaagcagtttatg

SEQ ID NO: 177499 - DNA, 402 bp, Arabidopsis thaliana landsberg
atgcccttcgatggttgtttgttcggtagccgcatgatgatcgccaaggaggctcacacttccaagaacgccaagaaggccatcgctgatgcccccggtgtcgataacgaggagtgggagaagacttacaagggtgctgccggtggtgtcatcactgtcctctccgagatgggtgagcccatccacaagctggctactcgtggtgtcctattctggcaggagatggatcagaagatcttcaagctcgacaaggccaagcgtgtccctgagctcaagaagcagcgcaactacatcatcaagaagctcaacgatgacttccagaaggtgtggttcggccgcaacgccgctggcgagactgttgaccttgaggacatgacctatgccgaagtcgtccgccgcatg

SEQ ID NO: 177500 - DNA, 563 bp, Arabidopsis thaliana landsberg
atgctggacaccagtaattacggtctgccgcagacgcggaatcgggggtacctcattttcgttgaccgcacggccctccccgcggccgacgggatcaccgccacgtgggtgaagctcatgaaggagatgcagtgtcgcacatccgctacaatcgaccactatctcctccccgtgggcgatccgcacctcgacgcggcacgatccgacatggagttgtcgaccacaaccgccacggcgtccgaagagtctgcaaatccgagagctgtgtcgtgggagtatagcctaatgcgccatgaaaagttccgccgggaaaaaggcatcgaaaagggcatgaacccagtcaccggcctggaagtgcatcggggccaaaccgtccacgtccaacctcggcaggaatcgtggatttcctggctgatcaagcaacccccgagagttctggactgcatcgacatcctctttcaacatggacggctccagaaggactctcctgtcgactataagtacaagtcggcaatagtggacctgagccagaacgtggaccggactcgcccccagattgggaa

SEQ ID NO: 177501 - DNA, 405 bp, Arabidopsis thaliana landsberg
atgacaggtaactttgtctctgtgaggtctaagctattttctagagttttcaatccgtccctttgctcatactttctttctgtggaatcagctgtgtctgcgatagacacaagcgggcttgaagcggtgtttgaacttaggaggagactcgagaagcaatctcttcaggttataatttttactgaaaacaaagatcaatatacctatcaaaaagaaaaaccaactaacttttgtcaaactctcttgttcaaatagcttgtgctggtgaatcctgtggggactgtgatggaaaagctacacaagtccaaaatcattgaggcattgggtctgagtggactttatctaacagttggtgaagctgtggctgatctctcatcaacatggaaagctaatggccagccttga

SEQ ID NO: 177502 - DNA, 121 bp, Arabidopsis thaliana landsberg
tactgcatcttcaatgtctctcatggatgagctgaaagagttagatctactagacctgggcacaaggcaagtacttgctattttacaagtacttgtgacccgccttgactcgtacgagtaa

SEQ ID NO: 177503 - DNA, 471 bp, Arabidopsis thaliana landsberg
atggacatcgcatacgccgtcggctacctcgtctccgaccagaccgccttcgtcaccggcgcggaactggtcgccgacggcggcttctccatcaacggcgacgccgtctccgacgccgaggcggcagcggctcccgcggccgagtagccgtcagccggcccgtccgttaatccgttaggagacgcgcagggtgacgggcggctgaacgcggccggcggtgccggccagcaccgtcatcgactccggccggagctgtacgccgctctccgcccgcgccgctggcatcgtgccctccgccactgacggctgttccagcccgtagctgtgggtcgtgagcgtgcctgcggcttgcaggccgcgcacggcgacggttactggcgccgtgtcgtcggtgttgatcagcaccaccgtgtgcgacgtgccggggaggaacgaatggaaggccaaaacgttcgggaccggggatggcag

SEQ ID NO: 177504 - DNA, 550 bp, Arabidopsis thaliana landsberg
gtatccatatgatgtccatgatcgtctatgggacgcatacgatgactttcaggatgaatggacttatataaacactaccacccctgtaaatacaactgttagtgcctttgatctgccacaagctataatttcaaaggcttccataccccaagttgcaagtgatacatggagcacaacctggtcgatacaaaacccggacgacgacgttcacgtgtaccttcactttgccgagatccaagccttgaagcccagtgataccagagagtttagtatcttgtggaataaaaacacaatcattagtgaatactacagtcctctagagttcatggctgacactgtacctataagaacctcgagtaaatgcggtgacgatggtttctgctccctagatctcacaagaactaagtcgtcaactcttccaccatattgtaatgccatggaggttttcgggttactccagcttcttcagaccgaaacagatgaaaacgacggtttgtcaactgtacttaattactatgtagatatacaaaccctttttggttgttcatga

SEQ ID NO: 177505 - DNA, 96 bp, Arabidopsis thaliana landsberg
cgcacactcctgccgatcaagaagacgccgattaacaaaatcatcgtgctcatgggcgctgtagcctcgccgccgttttcggagaaatcactctaa

SEQ ID NO: 177506 - DNA, 144 bp, Arabidopsis thaliana landsberg
atggatgcagacgtgatcacttacgatttctcgcgctccgacatggagctggtggatggtttcgattacttcaggtacccgaacgacatcggccccggcgtctacgacatccattcgccgaacatcccgacccaagagcacatc

SEQ ID NO: 177507 - DNA, 133 bp, Arabidopsis thaliana landsberg
agtactccacgagtgtgaagtgtcaatcggaggagggggtaaaaccgtaaaagcttccgacacgtcccacgaaaaaggattatacgagaaggctcttctcatcatccaccggctcacgattaaacaagactag

SEQ ID NO: 177508 - DNA, 550 bp, Arabidopsis thaliana landsberg
acatcatcatctccatataaggttgatgactctgagaagagcactgtggttaaaataatgttcccttctgagccaccagtaagttatttttgtctttcttaactgatcgacaatacaatttggtagtttcatttttaatcaaacttacttttcctttgtgcaggttgaatgtgaatatgactgggtgaaaagcgtcattgaggtgcagtatctgacttttccaataaaacaccttacttgaattacttctcatctcagtttattttaggaattcaccgacagtctgatcaatgaggaggtattactcccggaacaaaaggttgcgttcgaggtaagcaagcaagagctggaattgatttgatgaattcatttgagggaggtctctaaaatcactcacccatatgtttccttttttcaggagtttgtcaaagagaaaagtgacaaagctatggcagcttatgacacggtatcatgtttcataccctctgctacagagccgcacatatacttaacaatggattctacaattggcaggcacaaaaagccctag

SEQ ID NO: 177509 - DNA, 280 bp, Arabidopsis thaliana landsberg
gcatcaagctttgtttagtaacattgtagaggttaaacctaaacgtccaaagatctcaacaccatcaagcccaagcttatctccccctgttagaagtgatagaggtccaacagaggcaaaagttcacagagataagcagaaagaagaagctatgccagtgttgaagaaacctggcgcagacagaaatgacggaaaagctacggaaagcaatgggcaaggtcaaaatgctccgaaaggcttgttgggattagcatatgatagttcagatgaagaagactga

SEQ ID NO: 177510 - DNA, 123 bp, Arabidopsis thaliana landsberg
aaacagacaaaacaggaagcaaagtggagtcgtagctccaataactacaagcaaggaaaatatgaacgagatggttatgatcctaaacataaggagaacagattctctcttatttctaattga

SEQ ID NO: 177511 - DNA, 122 bp, Arabidopsis thaliana landsberg
ccaagtgtgctcgagatgtcatgctggttctaggaaccaaaacagaaagaggcaataaaatcagaaaagagccaataagacaacaatgtaatataccgagaagattaaaacgacttgagtaa

SEQ ID NO: 177512 - DNA, 86 bp, Arabidopsis thaliana landsberg
agccaggctaccacacgcgatccagcgagtcggtccacccgagcagtcgaattaccagccggcgccgagccctcatccggccatga

SEQ ID NO: 177513 - DNA, 236 bp, Arabidopsis thaliana landsberg
atggcgaaccggcgcgcatggctggctgcgcgcggcatcaccgaactgccactggccatcgccgcggacctcacgccacacgtgtgggacgacgtgagcggtgccttcgaggccggcttcgcgacggacgtaaacggcagcctggcgcgccggccgcgcagtgacgagccctggtcggaggcggagaaccagaactggccgcaccactaccagtggtccgacgagcgctgggactg

SEQ ID NO: 177514 - DNA, 357 bp, Arabidopsis thaliana landsberg
ggagacagtattctcgcagactccggcactgagcagctcgagtttattgccctttcccaaaggacaggggacccaaaatatcagcagaaggtagatactaattttgagtttgtccaacagattttctttatatcctaactcggtgtgaaaaagtgggcaatcaatctgcattaatgctgaagaaaatattggctgctcaagattgacacgtttgctaactcatgtctctcaggtagagaaggttattacagaactgaataagaactttcctgctgatggtttacttcccatctatataaatccggataatgctaatccatcgtactctaccacaacatttggtgccatgggagatag

SEQ ID NO: 177515 - DNA, 60 bp, Arabidopsis thaliana landsberg
atgattcatctaacgatacagaaagcaatgaccaacatccgtgctgaaaagttacatgag

SEQ ID NO: 177516 - DNA, 49 bp, Arabidopsis thaliana landsberg
atgtgtctggaatatcggataagcgttaaatttggcatgagagatacag

SEQ ID NO: 177517 - DNA, 163 bp, Arabidopsis thaliana landsberg
gactagagctgttcaaaagatagttgaaacggctaagagagaggaggagatttcaatcatcatttctgctttgaagcatggcattgtgcatttgataaagaatgtaaacggtaatcacgttgtacaacgatgtttgcagtatctgttaccttactgcggaaag

SEQ ID NO: 177518 - DNA, 450 bp, Arabidopsis thaliana landsberg
  unsure (1)..(450): unsure at all n locations
atgaaagcttccgacgccaagaaaggcaacgtcatcgagcacgacggcaccgcctaccagatccgcgacatcgagcgcagcgcaccgaccgcgcgcggcggcaacgtcacgttccgcttcacgctgtattcggtgcccggcaaccgcaannnnnnnnnnnnnnnnnnnnnnnnnnnnnnnnnnnnnnnnnnnnnnnnnnnnnnnnnnnnnnnnnnnnnnnnnnnnnnnnnnnnnnnnnnnnnnnngttcatggacgccgaggactacacccagttcatcctctcgcccgaacaggtcggcgacaatgccggctatgtcgtcgaagccgaggaagacggcgcgtactacgtgcaactgatcgacgatgcgccggtcggcctgcaggtgccggccagcgtcaaactgaccgtcacagacccggctcccacgctcaagggcgccagaacctaa

SEQ ID NO: 177519 - DNA, 808 bp, Arabidopsis thaliana landsberg
atgcctctcttcgtcctctctaaatcctcagcaaagaagagtcagacgtttatgagccaagagcagcaggggacgtctccgttgaacacagacgaagccttaaagagtcatcatagcttctcgcagaacccaaattacatcgaaagtaataacatcgcagctagcaaatcaaagatatgcttcacatataattcataacatcacttcttctttgttagcaggtaatctgtctagaagataccagactaacttttcgcttggctcacaaagaatctctgggcagtttttgatgatccctaatcctggatttgtcgacacaagttcgatgacaaatactcacgataccagtctagcaaattttcagactgtgcctacaactacaaatccaaagattatctcgaaagaggaaaaagaaaatgaggaggagcaacagtactggaccatcaagaaggaactgaccaagagcgatgcttgccaacggcttactctgtcaaaaagctctgttgaggagcacattctcaagcatctccttccagaagattcccaaaagatagacaaaggcaagcccggaatcacggttaaggtatacgacaacgatacagacactgagcacgagctttgtctagcattccagtgtagctatgttctaaagaatggttgggtgaaaacatttgtcaaaaggagagggttggaggaaggagacatgattggtctcttctgggaatgctctacttctaagcttcattttagtgtgctttttcgtgtaaatgcaaaagctcctgcagcagaagaaaaagaagcttattaa

SEQ ID NO: 177520 - DNA, 76 bp, Arabidopsis thaliana landsberg
atggtacgtcgcttggctgctgcattgaaacaagagatgggcgtttctctgctgtctcatctcaatccacgacaag

SEQ ID NO: 177521 - DNA, 261 bp, Arabidopsis thaliana landsberg
aaatatttgctttatgttgttcttatcgataacaacttacttcgttccacatgatttttcacaaaaatctcatcgtattttcgatgtggaatttgtaacaccaacaaaagtatgtggaagtgttttgtgttttattttcagcgtcaaaatgattatgaattgtcattgacacacgtggtgaatacaaaccgaaatgtcgaatactgttgtatgttgctcttttgccgaaagacaaaaatggagttagtatcggatctttga

SEQ ID NO: 177522 - DNA, 216 bp, Arabidopsis thaliana landsberg
ctacatggcaacagatccgagaaaattgaattcacaatccaccaaggcaaggattctccagggaaagttaagattgtaaatacaaaaatcagaatgttcgattcgatctacgaacctgtattcttcgagaaagcgatcatcgtcgagatctttgtcgtcctcaagatcctcaagctcctcctctgtcttcttatcaaaccatgccctgatccttag

SEQ ID NO: 177523 - DNA, 210 bp, Arabidopsis thaliana landsberg
atgcggctgctccccatccttgcgacggcgatgctgatgacggcaccgatcagcaccgtggccgcggctgcgcccgacgacgcgccggccttcgccgcccccgcggtgagcgacgacgatctgtcggccgcgacgcgcaagctcaccctccccaacggcgtcgaccaagcgctaacggtgaccagcgacaccgtcgtcgacggacagctc

SEQ ID NO: 177524 - DNA, 409 bp, Arabidopsis thaliana landsberg
  unsure (1)..(409): unsure at all n locations
gttcatcgtcaacgccggaaagcgccgccatgacgacagcattggccagcgggataaattgcaggcttggcaggtcgtcaaagtacgacttcatcagcgcgccggcggccgagacatcagccccgccaccgatcaggccnnnnngnnnnnnnnnnnnnnnnnnnnnnnnnnnnnnnnnnnnnnnnnnnnnnnnnnnnnnnnnnnnnnnnnnnnnnnnnnnnnnnnnnnnnnnnnnnnnnnnnnnnnnnccgatcggcagtttgaaaacgcggtcatcgcccccgaaattgagggtgattgcagtcgaacggctcattaggaaccgccgacgttggcgccataagttcgagcaatggcgccggacgaattgagcgtaatcgtggcttcaaccttagcgccacgatcaccg

SEQ ID NO: 177525 - DNA, 356 bp, Arabidopsis thaliana landsberg
gaagctttcaacattgttcaaattcctcaagaataccaagaacgtacatttgcactgcttgcagctgtgttatggctaggaaatgtatcttttgaagtgattgacaatgaaaaccatgtcgaagtggtagcagatgaaggtagagttaatcgtctgtcattaatcatttgaattagtagactggttgtgatctactatgataatataggtgatgcttattattttgctttcttacagctgtcactaatgtagctatgttaatgggctgcaactcaaaaaagcttatggtggttttgtctacatgcaagctccaagctggtagagattgcattgctaaaagactgacattgcgacag

SEQ ID NO: 177526 - DNA, 314 bp, Arabidopsis thaliana landsberg
atggcgagcaatgatttgaagacttgggtttcggataagctgatgatgctacttggctactctcaagcggctgttgttaactatctcattgcaatgggtaatttgatgtttcgattttggatcatggagcttatgtaagaacttttgcttgactgtcccaaaactttaacaaattgtgtgcagctaaaaaaacaaaatcaccaactgaacttgtgggagagttggtggattacgggttttcgtcttctggtgatactcgttcgtttgcagaagaaatttttgccagagttccccgtaaaactgctggtgtaaat

SEQ ID NO: 177527 - DNA, 402 bp, Arabidopsis thaliana landsberg
atgaggaacgtccaaaaccctatcataatcgaccaaaactattgtccgtccaaccaaggttgccctactgaggtatatccatatcatatttttgataaatttaagactaatcaaatatgctatattaacttagtcaaataattaaagatttattatcttttatgtatgtgttagcattcgggggtgaagataacccaagtgacgtccaagaacatacaaggaacttcggcgacgcaggaagcaatgaagctggtgtgtagcaagagcaatccatgcacgggaatcacattacaagacataaagcttacttacaacaaaggaactcctgctacttccttgtgcttcaatgctgttgggaaaaatcttggtgttattcaacctactagttgtctaaatcgatga

SEQ ID NO: 177528 - DNA, 434 bp, Arabidopsis thaliana landsberg
gaatatcggaaatcaaaaaggtcatctcttttagcgatagcattgctgttacaacatcaggagatgttttgttggtctttaccacggctttcgagtcactcggtgaaaggtctaggatcttccacgtctacaagagggatccggaaaaagagctaaaaggaaatatatgtggaaccagtcttgttgaggtgagatctataggtgatgaggccctgtttttcgatttgagtatcaccgtgcctgctgaccatacccttggtattgagcctaactgcatctatttcactcgtaatgaccgtttcggtcacaaggacggttccattccatgcctagtcgacatatgtgtgtacaacattgcaacaaggaccttcaaacgcttccctagtctgtccaacttaaaactcaaggatgctatgtggtttctcccctcttga

SEQ ID NO: 177529 - DNA, 279 bp, Arabidopsis thaliana landsberg
gttgcttttaatcgggatattcggactccaagtgtcacacttgaaggtgacattttccagccaagtggtcttcttactggtgggagtcgcaagtatgtctttctttcttggacgcttatatctctagtgagagtcatctccttataaaagtattttggtcttttttttttcctttgccttaggggtggaggtgatcgccttaggaaacttcatgacctggcagaagctgaatcagaattacaaggacaccaaaaaaggttggctgacgttgaatcacag

SEQ ID NO: 177530 - DNA, 297 bp, Arabidopsis thaliana landsberg
atcgatcacggtcttctgttcctgctcctcctaagagttctggcatgaaacttggcaagtcgggaaagaaccagttaatggagtcccttaaagcagaaggtgaagaggtcattgaagatgttaagcctactggccaatccaaagcagctgccccacctccaactgatcctttcacattaactgttgaagagaagctcaatgttgcattgcgacaaaatggtggacttagtagctttgatatgcagggaaccctgtcacttcaaattattccccagacccggatttgtccaagtccag

SEQ ID NO: 177531 - DNA, 45 bp, Arabidopsis thaliana landsberg
atggagacatctggagtagagaagagagttgtagaagtaatacgt

SEQ ID NO: 177532 - DNA, 669 bp, Arabidopsis thaliana landsberg
ttttcaaagatggaggaaaagaggaaaagaagaaagatctttctacaaagaaagtgaaatgctactttatacgcacggactcaacagctttttatgatatgcaaaatccctatattttaaccggaaagtcaatttatgaagctcgtatgcattttatgcacgtgcatcgagcaccaactttggcgaattatatggcaaggtactttataggaagtatatgaagatattctactgtatcatatttaaactcttctgtagatgtccttttttatcagagtcacctttcttttgctgatgcttcaggttttccttaattctgtcaaagactaaaacgcttgaagttgacatgactgggattacctttgatcaaattgatgatatacactgccatgtacgtccttaattcatgtttccttgaggaacttcgtctctaatgcctgtacttacttgcattcgctatgttctttgacctttttccatttcttccaattgcaggatcaagatgggaaagatgttcttgacaagaacaaaaaaccttgcatacattcagatggaactggctacatctctgaggacctggctcggatgtgtcccctaaatatatttaaagggaaatgtctcagaagtgaaagtattcaggtccttactctgactttgatggttgactag

SEQ ID NO: 177533 - DNA, 873 bp, Arabidopsis thaliana landsberg
atgactattgaagcgaaaaagaagtatgagtttttagaatctattagcgcaattatggatgcccatctgagatatttcaaacttgtaagggctctaatttcacatttgaagtacttaccatgtaagaccaactaagtttgagatttgtgtcatgttgtgatccttaatttggcctctttatgtttcagggatatgacttgttgaatcaactggaaccatttatccatcaggtacaaacttgtagtcaacttgatgtctcaatattttagatgtgcaaaacaaatatgagcttctatagttcccacagggactttaaacgtgcaaatggggaagtaataattaggttagaaggactgaggtcttgaagagactttttaggcttttggaagcccaaagtcatctaattcatcgatttaagttttaatgtttacatttccttacataaaatttgaaagataactttttgtttaaaatcaaagaagactttcccaatcttttagttccaaaaacttggtttatctggatttaaaaagaacacccataggtaaaagcctctcctgtccaagatttagtttttgctctagtaaaatgtgatgtgaaatagccaaagtttcatgatctctaatgaaatccactgatgctgacttgtgattgttcttcttatagatattaacatatgctcagcaatcaaaagaacagtctaagattgaacaagatcgactagcaagacgcattcaagaattcaggacccagtctgaattagacagccaacagctggtcgctaatgcagagtcgtctggtgctaacgggaaccgtgttggtgggaatatcccttacaaaaataccgaaacaagtttaacagcagacaaggaa

SEQ ID NO: 177534 - DNA, 129 bp, Arabidopsis thaliana landsberg
caacgtaagagaataccgacaacggcgattcgacaagatcaaatatctagatcttacacggaaaacaaaaaccatggaaacgacccgaatccaaaaaactacacggacccaggcccaaaaaaattttag

SEQ ID NO: 177535 - DNA, 812 bp, Arabidopsis thaliana landsberg
ccgactagagatggggtggttcggacattaaagaggctgcagaacaagattcacggacctgtgagtacctacttctgttagaacttctgggtctcaattatgttttgcgatgtttctaatcccctgatgtctcaaccttcttaggtactaaaccaattattgtacctaatgagaaccgctgagaagacagtacaaatacgaattgctctggctcttgcacatctttgtgaccctaaagatggaaaattaatctttattgataacaatggtaagcatctcatatattcagaatttcattttctaataaaattttctgtggttttttgtttctgatctattgaagtattacttatgcaggagtagagtttttgttggaacttctctatttctcaagcaataagcagcagagatatagttcaagtgctttatacgagttagctaaaaaagctacatcctttgcaccagaggattcagctccttgttcacccacacaacaggtaaaaaaatctccatttcttctttcaagcatcaaataatttgtgatttgaggtcttgacttgttgttattgattattatactgaaggtgtttctgggtgaaaaattcgtgaacaaccccactatgtccgatgtcacattcctaattgatggtataacatttaaccccatttatgattctatagaatccaccggtgagaacattctttaatgagtatatccatgtcctatgttaggtaaacaattctatgcacacaagattggcttggtagcttcctctgatatatttcgtgcaatgtttgatggtctttacaag

SEQ ID NO: 177536 - DNA, 170 bp, Arabidopsis thaliana landsberg
ctgatcttggtggatggactaggattgttgttgagaaaccatttggaaaggatttggactctgcagagcagctgagttctcagattggagccttgtttgaagaaccacagatttatcgtattgatccctatatgggaacagagttagttcggaacatagtagcgcattaa

SEQ ID NO: 177537 - DNA, 2241 bp, Arabidopsis thaliana landsberg
atgattgctgaggttgtggcagggggtgctcttggacttgctctcggtgtccttcacgaggccgtcaaaacagcaaaagatagatctgtaaccacaagattcatcttacaccgtctcgaagctacaatcgatagtatcactgcgttggtggttcaaattgataagttcagtgaagaaatggaagattcatcatcgaggaaagtcaatgaacgtcttaagcttctccttgagaacgctgtttctcttgttgaggagaatgcggagctgagacgcagaaacgtacgcaagaagttcaggtttgtatatattacatgaaaatccatgtatttctattggttttttttatatatatgaggtcgcctaatttcttagtttaatggtttagagaaaaatatcttcttctttgtaacaattttttttacatgatttcgataatctccaaacactaaacgtacaaaacctatcatgttgtggaaaaataacacgtgtattatgtttgttctgtttatctttaggtacatcaaagcaatcgaaacgatagaacttgcattaagaagcataatagttgtggattttcaagttgatcaatgggacgatatcaaagaaatcaaggccaagatatctgaaatggacactaaacttgctgaagttatttctgcttgtagtaagataagaacttgataaaaaaaaaaacagagactttgttgaaattatttcttcttgtaatcaatttcggaaatctatattttttttttctcaatctctctctctctcttcttccccataataattgaaaaactctaatctcaatctatgagtaattttatcaaaataataactaacaataatctttttatttcgtttcttttgagatctatgtttcatgatttttttttttttttgcataaattgaattaaattaactttgaaagacttgagtttaatgatgtttttactgacaatgatctaaaattgactttaaactatttgatttaattagctacaaaaaagtaaaagactatttaattttgttacttttagttgaattattaataatcatgtatagtttgtgatattaattttacttttgatatgatataatatttaactatttattaatatatatccgtttccaacacataccgtttattaaattttttattaaaaaattcgctttcacatttctagacgtttggctaccgcgtacatgcatctaattgcatggtacttcgttaccaagcggcccacacatctcttattcacactctttcgtaggaagttacggtaacaaagaacatccgtttgactgtacaaactacacggcttaattgttaagcaaaagactgccatgttcatagatttctcattgcattcacccttataatatttgtgtataaatactaacattatgtgaattaatagagcaacactttaccaaatatttgagaagaaaaaggaattataaatattcacctctatataatataatagatggtcttatatttttcttaccaaacaaaataatatcatcaatataactcatcaaaaactcttcacctcagagagctaccaaactaatttcaagaaaatgattgctgaggttgccgcagggggtgctcttggacttgctctcagtgtccttcaagaggccgtcaaaagagcaaaagatagatctgtaaccacaagattcatcttacaccgtctcgaagctacaatcgatactatcactccgttgattgttaaaattgataagttgagtgaaaaaatggaagattcatcatcgaggaaattcaatgaacgtcttaagcttctccttgtgaacgctgtttctcttgttgaggagaatgcggagcagagacgcagaaacgtacgcaagaagttcaggtttgtgctaaatagttcctatatgtgatttccataaactcccaacagtactaaatctatcaaaacctaacatttactatgaattaagtcaataacatgtgtattatatttgtgttgtttatctttaggtacatgagagatatcaaagagttcgaagctaaattacgatgggtggtaggtgtggatgttcaagttaatcaattggctgatatcaaagaactcaaggccaagatgtctgaaatcagcactaaacttgacaaaataatgcctcaaccgaagtttgaaatccacatcggctggtgttcaggaaaaacaaaccgtgcgatccgatttacgttctgcagtgatgattcttga

SEQ ID NO: 177538 - DNA, 117 bp, Arabidopsis thaliana landsberg
gaactgcgtcctccattgaagatgttggttcccatttggaaagcattgtgtgctgctatcggtacagaccaccaaagtgaaacgatagctgaagaagaacatgatgtatctagttaa

SEQ ID NO: 177539 - DNA, 454 bp, Arabidopsis thaliana landsberg
ggggcccgggacgcaccggattcactggaatgtgctgacagatcagggcagccacgaccagaggcagccccagtcgctgacgatagaatacacctccaacccggtgtggtacgccgtcatggcccttcccttcatggatgacgagctcgcgggtcatcagaacgccagcgcgttattcaatcgctactatgccaacgccatcagcgccaccgtggccggcagtctcccgggattcgacaagaccatggaggcctggatacaatcggattccgacgccctgaagagccctctggaacgcgacgagtccctgaaaacggtactcctccaggaaacgccctgggtggccgccgccgaatcggaaagcgcccagcgggcgcgtgtcgcacattggttcaccgacggcgacaggcgcctccgcctgtccgaatccctggaagcgctctcgggcctttag

SEQ ID NO: 177540 - DNA, 1130 bp, Arabidopsis thaliana landsberg
tgccaatgatgagactgttgagcctgaaaatcgtggtggatatctggctttcacttcaaaggtgcatatatctttgtccatgcgcataccttcatcatctttgtcgatatgggttgtttgaattcacatgttttactggtgatcccaaattctagttgtatttctgacacatttgctgctcagaaaagatgctctgattcatcatgttgtgtcatatctcattagatatattggcaggattctgcaggtgtgaaacatcttcagaaattagttgatgcaggtcttacccatctacatcttcttccaacatttcagtttggtgatgttgatgatgagaaggagaattggaagtctgtaggtatatttgatgtctcaagcacacgcttaaacttaatagactgtaaacgattcatttttgggatgcattttctctttaaatttgaggccttatttattgaactcaagttagagatcaaaagccggaagggccttaagtcttcagaccaatagaaacataagcaaaagtaacaaagtcgtctgtcttatttctggtttttattgtagatataatttgacctttttattgtagacaccagtctgctggaaggattacgacctgattcaactgaggcacaagctcgtattacagaaatccagaatgatgatggctataactgggggtagtttgttttacacaagttacttcattcttcataatgaatcaatcaccttcatcacaagttttatgttttgtgaaggtataatcctgtgctctggggagtcccaaaaggaagctatgctagtgatccgactggtccatgccgcataattgaatttagaaaaatggttcaggtttgcatttttcccatgtttggatattgaaaatagtaagtgtatactggtcctggttatttgcaatactaataggctcattgaaagctaaaatttgtagtgattcatacaatgtgttgatgactgcatgataaagcctcatgctatttcgagttggctctttatgtagcttcttttggcaggctcttaattgtactggtcttaatgtcgtcttagatgttgtttacaaccacttgcatgcaagtgggccacatgacaaagaatctgttcttgataag

SEQ ID NO: 177541 - DNA, 112 bp, Arabidopsis thaliana landsberg
aaaccccaaagcagctgttctgaaaagtgagacaatctttaaccagaaagctcctgtcgtggcttcctactcttctcgtggcccaaacccactcattcatgatattttgaag

SEQ ID NO: 177542 - DNA, 120 bp, Arabidopsis thaliana landsberg
atatttgaaagtatggcaatgccagaattacgagcccttgtatcaactgaaagctcgaaacttacaacttgtgtgacgggagaatcagtcgaaatcgactgcaaccgcattggtttataa

SEQ ID NO: 177543 - DNA, 289 bp, Arabidopsis thaliana landsberg
cgggagaaaggccggtgatttcgtctacatccggtttctgcatctggcggaggaattgacgcgcgtatgcggagagcgattcgacgtacttgcgctggccctctgcgaagatcgtgtcgaatgcgagcgaagacttcccggagccagagaggcccgagaacacgaccatcttgccgcgcggtatctcaacactcacgttcttgaggttgtgggtacgcgctcctttgatgacgatcttgtcttctttgttgtccatacacgcaaaacccgcccccgctgtgcgctaaag

SEQ ID NO: 177544 - DNA, 122 bp, Arabidopsis thaliana landsberg
cgaaaatcatcgatgggcagggaacaagtatacaacactgcgactttgagatcagcgacaatgaaatcgagtcatttgagttaatcaaagctgatttttcaatcagtgagatcgatcgatga

SEQ ID NO: 177545 - DNA, 324 bp, Arabidopsis thaliana landsberg
gggttccagctggtggcggacgaccgggtcatgctgtggacatccggcgacgggctctatggcgcgccacccataagcctggccggcctgatggaggcgaacggcgtcggcattctccaagtcccgcaccggccctggactcgcatatggctggcggtggactgtgtggcttccgggaagcctgaacgcatgcctgatccccgggccttcgcggccctgaatcatagtcttccacagctttctctcgcctgcagggaggcatccgcgcctgcgaaactacgccacgcgttgatcggccttggagtccgcgatcagacggcgtaa

SEQ ID NO: 177546 - DNA, 151 bp, Arabidopsis thaliana landsberg
atggccggaagaggaggagagctcacggaggctctggtgaaaaagaccggcagagaagaagaggatgagttggggatgaaggagaaggtttggattgaatcaaagaaactgtgggttgtgcggcgccagcgatcttcacgaagttctctac

SEQ ID NO: 177547 - DNA, 278 bp, Arabidopsis thaliana landsberg
aaatactttccaatcaaacagataaaaacaatcaaaatcacaggcatctgcaaccaaattcagaccatacactcatcaactttggttcaagagtaacaaaatcatcgttactctcgagaaaacgccatcaaaggctcttcgatgatgatgatgatgatgaccaacacatcaaaagaatctgtgaagaaagtcgattcactactcaagataccaatcagaaaccatcaatacagattctcatcttcacagaaacatatagattcaaaagaatagtgtaa

SEQ ID NO: 177548 - DNA, 225 bp, Arabidopsis thaliana landsberg
cacatcgactccgacatcgccgacatcaagaacatcggggcgcccggccaggcgggcaccatcgccggcgccatgttcctccaggagttcgtcgacggcttgccctgggcgcacctcgacatcgccggcccgagtcgagctccggagaacgacggcgagatcgtcaagggcggcaccggcttcggcgtccgcaccctcatcgagctggcgagcacgttccgatga

SEQ ID NO: 177549 - DNA, 195 bp, Arabidopsis thaliana landsberg
agtaaactaactctaaaagctatgaccaacaagtttgaagagacttcagttccgaagatggggaaagcgaatcggaagctcgacgccggcttcagcaacgctagaaaaccccgaggaaagaacgattgtggcgtttgcgttctcatgttgtggaaaaccacgtgttctcgtgaagcagtttgtttggaggcttaa

SEQ ID NO: 177550 - DNA, 628 bp, Arabidopsis thaliana landsberg
  unsure (1)..(628): unsure at all n locations
atgctagatcacagtgaaaaggtaaaaatgatttgcttttcttctgatctctatttttcgattctgacgacgatgatctaataataagctgatcgcctcttctgtgtttgtttcaggtcttattggttgattcagaaaccatgaaaacaagagctgaagatatgatcgaacagaacaacactagtgttaacgacaagaagaagacttgtgctgattgtggaaccannnnnnnnnnnnnnnnnnnnnnnnnnnnnnnnggtccaaaggttcatacataaaccctaatttcactctgattttggggaaaaaatcgaggttgatcatttgatcttgtctctgatctctgattctgatatgttttggttttggttctgtgtagtcgttgcgtaacgcgtgtgggatcagaagcagcaagaagagaagaggaggtccagtagataattagcacttaaagaactcgagttcgggcggcggaaaccgtaaatttggtgaatcgttcaaacagagtttgatggatttgggcataaggaagagatcatcggtgcagaagcaacgacagaagcttggtgaagaagaacaagccgctgtgtcactcatggctctttcttatggctctgtttacgcctag

SEQ ID NO: 177551 - DNA, 1048 bp, Arabidopsis thaliana landsberg
atgacgctttttgtttactgcgtaagccgaaaacctgactggctctccatgtattatgaacatacttcagctctgaacaaagacaacgagatgatggagcgctgctggtctgggcccactctctcatagtcctgactcttttttagcctcaacttgagaatgtaaaaggctcctgttcttgcagctgttaaagaaggcgagatccgagagaagatactctgaatcattgcctagcgagtgtgagagattgaggcttgttaacgagtaatacaactcatcagcatttccctcttcttgctgtgcaagagtctcagcttttcaatttggtttttttttttcccatcctcacaggagaatgaacggtagagagctcgagggtatgtcatctcgtgacctgctctcacttgacaatcagatattaaatgctttgttgggtttgcttgtccaaatgaatagaccaagggaggaacaagttgctgcaaggcagcgcgagaaggtatagatttatcaatgtatacatgttccaagtagcaaatcgaaaccacttcttttattctctaatcgtgtcgtactttgtttaccagaacaataaggaatcaacctcaaggttagctgaacaagagaggtattcatcggacaatgataaagatgatgacacttcctcgccatttctgaagaggaggcgcagagatttgaccaaggatgcgagattgctctgcgatttctgcggattatccagcagccgcaggtatatttctagagttttgttgttgaattatagctcctaggtaattggtatggaatccgttgcaaaatctgattctgcagtttttttttcttggtaagctattactgggctttgtagaagcaccgataatctatctatagagatcatctagctctagcttctaagttttgatctgttagttcatgattctcctctgcaacgtaattactcatcaaaccaaccctgacttcttctggtggtttgcaatctctttccagatacgacgaactaaggccacacaaacaagaacatgaagcactg

SEQ ID NO: 177552 - DNA, 2815 bp, Arabidopsis thaliana landsberg
  unsure (1)..(2815): unsure at all n locations
atggcgagtactagtagtggtggaagaggcgaagatgggcggccgccgcaaatgcagccagttcggtctatgtctcggaagatgacacgagctggtacgatgatgattgagcatcctaatgaagatgaaagaccaattgacagcgagcttgttccttcttctctcgcttccattgctcctattcttcgagttgctaatgatattgaccaagataacgcaagggttgcttacctttgtatgatatctctcaaaccttttcgattttgtgatgtggagtgtggctgtgaatgagtatatcaagattctcacttcacttttgttaggtcgcttccatgcatttgagaaggctcatcgaatggatccaacatcaagcggacgaggcgttcgtcaatttaagacttatctattgcacaagctagaggaggttaattgattacatgatttcgcatactttttttttttctctctctttgatgaattggagtacgcagataaacaaggtttacatttggatgtatcttgagatagtagttcttgaatttttgttttttctctttaggaggaagagattacagaacatatgttggcgaagagtgacccaagagaaattcagctctactatcagacgttctatgagaataatatacaagatggagaagggaaaaagacaccgtgagatctcttcttaatattttgtaatcgttacatgataaagatttaaatgatggtctcctaactcttttgcttctgtcgattttgtcattacagggaggagatggccaagctttaccagatagcgacagtcttgtatgatgttttaaagacagtggttcctcaagcaagaattgacgacaaggttgattagtgttcccttacaatctgatcataaattttcctgaagagggtaattgtgtcacttgacatcttgctggtgtttgaatgtagacccttaggtatgccaaagaagttgaaagaaagaaagaacagtatgaacactacaacattcttccgctgtacgctttaggggctaaaactgcagtaatggaactccctgaggttgcatgtgcaaattttgcctactttacttgttcatcattttgaattctcactgacatttttgcccaatgtaatttagattaaggcggcaattcttgctgtctgcaatgtggacaatcttcctcgaccaagattccattcagcctcagctaacctggatgaagtggatagagaaagaggcagatcttttaatgatattctcgagtggcttgctttggttttcggttttcaggtaactttcaagtttgtttctttgctactttttctttaaaagtttctattccataaaatatgtcttgattagtcttcctattttcatggtgaaagcgaggaaatgtagctaatcagagggagcatcttatactgctacttgccaacatcgatgtgaggaagagggatctcgagaattatgtcgaggtaaatttgtgtacttcgtgggcttccttctcttgaggatattacaactatttactaacttcaaggaaaaatatagataaagcctagcaccgtgcggaaattgatggaaaaatacttcaagaattacaattcatggtgcaagtatttgcggtgtgactcatatttgaggtatcacttctcttcgatatatcaagttattaacttctgagtaattatagaaaaaaaaagcttccctcgcatttcttctactctaatatgtatgtatgttaatggatggttttcctattggcaggtttcctgcnnnnnnnnnnnnnnnnnnnnnnnnnnnnnnnnnnnnnnnnctttatcttctcatatggggagaagcatcaaatgtccgcttcatgcctgaatgcctttgctacattttccacaatgtaggttttccaagttcaacgttcttcatttcctcttatttgtttccacacacaaataacaacgcacacactaatttatgtgtacttatgtttttgaggaacctccttatagtataaatacataagtaacaatgttgttttcttaaattttcctgtgaagatggccaatgaagtccatggaattctgtttggcaatgtgtaccctgtaactggggacacatatgaggcaggtgcaccggacgaagaagcattcttaaggaatgttataacaccaatctaccaggtcttacgcaaggtacgtaactttctgaagcagttttgtttttttcccttgctttttgattctttctgctaagaaaaccgcttcgtttgtgagaaaaggaagtcaggagaaacaaaaatggaaaggcaagccattcaaaatggagaaactatgatgatctgaatgagtacttttggtgagttttctttgatttgccattatatgtatcagtcagtcaagtgttactatctgagcacattcattttactttttcagggataagaggtgttttaggctgaaatggccaatgaactttaaggcagattttttcatccacactgatgagatctcgcaagttccgaatcaggtctttatctttatctttaatgtagactttttcattaccttggaaatatttgatggaaagaatattcttttcttttaaaatacatacttgcgtccattatcatctttgaatggaaccccgtatatttttgtttcatcctttatgagggttaccaatgcattttattaactgcagagacatgaccaagtgtctcatggaaaaaggaaacctaaaactaattttgttgaagctcgcacgttttggaacctctatcgaagtttcgaccgaatgtggatgttccttgtattgtctctacag

SEQ ID NO: 177553 - DNA, 845 bp, Arabidopsis thaliana landsberg
atggagtcccctgttgctcatccggctttaatttttgagtctgatggttctccttacgagtcttctataccaaagagatcgtcgtcagatgaaatttcggagagaattgtggattctgtttctcgtgaaatagattcaagactggatactagtgagttaaatgaaagccagcgttcaagctctgcgacaaatgtttccgactctgctgatgttattctggaattagagaagaccaaaaaggaaataaaaatgttggaaaatgccctgcaaggtgctgcaaggcaagctcaggtacatctttagatcctcatgaaaggttttgctacggatatggtgcttctataccaattttctggggatttgtttacaggcaaaggctgatgagattgcgaagttgatgcatgaaaatgagcagctaaaatctgtcactgaggatttgaaggtacaatagagtatgcggaatatgggatattagatgaaggattacttttttccccagtcttccgcccatcttcctttcatttggaatgattttgaatctacattctaataacctctgctctggaacagaggaaatctaacgaagctgaagtcgagtctttgcgagaagaataccatcagagagttgcaactcttgagaggaaggtattatatcttttatcattcttctctttcaattctcttcttttcattatatatatatatgccttcacagtgcttatctttgtaggtttatgctctcaccaaagagcgggatacacttagaagagaacagaacaagaaaagtgatgctgcggcccttttgaaagaaaaggatgaaataataaatcaagttatggctgaag

SEQ ID NO: 177554 - DNA, 79 bp, Arabidopsis thaliana landsberg
atggatgaaagaagaagcacggtcctagtggacgaattgcatctaagaaaaggaggatttgaagcagagaaagtgagag

SEQ ID NO: 177555 - DNA, 154 bp, Arabidopsis thaliana landsberg
atgagagggattgtggcggtagacgtagctcgagagccagaaggagttcttcaaggaagcgagataactatctttacgatacgtacttaccgagcgagaggatcaagtcatagagtcagggcggccgatatgtttagtgcctatacagcagaaa

SEQ ID NO: 177556 - DNA, 295 bp, Arabidopsis thaliana landsberg
atgaaagcgacccatttcaaaatagatcggaaattcttttgggtagagttgggttgtttgctttttttgtcttttggggtttcactcatcagtgacctggaatacagcgcttatgaacagcacgatataagccggtttgctgaagatatcggctaccgcctgattaccggcagcttttcacttattacttataccatatattactttgggttcctgaagcagtacgtgttcagccgcaaggttattggcattgttctttgcagtgttggctttgtgattgcagatcagttgatgg

SEQ ID NO: 177557 - DNA, 181 bp, Arabidopsis thaliana landsberg
aaagggaaataatggttcatcaacaaaaggcaagaaaaatctgaacaagcaactcattgacgctattataaagatgctcaaccaagtgaacccatatgtagagaagttcagatctgctagagagaggattgattctactaatgatgaaccatttcatatgagaattgtttctgatcgacag

SEQ ID NO: 177558 - DNA, 328 bp, Arabidopsis thaliana landsberg
cctgcccgcggcactcatgacctgatcggcgaggaacagcgcctgttcttacgcgttgtggaggttgcattgtctcgtctatgccacctatggcttctaggaatggatcacccccattttcgaggacacgcgcgtgttcgcccgcaccctgggagagaccttctacgtggtgatgaaggagatgttcacgttccaggaccgtggcggggactcgttcacgctgctgccggaaggcaccgcgggggtctgccgagccctggtgtcgaacgggttgacgcaatcgctgtcgcaaaatgtgatctacgccgggccgatgttccgattttag

SEQ ID NO: 177559 - DNA, 371 bp, Arabidopsis thaliana landsberg
  unsure (1)..(371): unsure at all n locations
ttagacgctttcgagcagcacgtcggcttccccgcttgcgcgcaattcggccggcaccgcatcgagcgcgcggcgcatattgtcggcgacgttgaggatgtcgcgcgcaaaaccggaaatcccatagactcgcgcatcggcgacttcgcgcgcggtgcggcggcgcagattctnnnnnnnnnnnnnnnnnnncaaaagcttgtccttcagttccgcggcctcgcgctccttggcctcgaactggccttccagcgcattttcgggcgcggtatcgccgggagcggtctccggcgcgatttctggcgcggcatcggattcgggcttgcgggcatcaaaatcggacatgtctttgcgctactcggcttgaatga

SEQ ID NO: 177560 - DNA, 453 bp, Arabidopsis thaliana landsberg
acatgctggagtggatcgcgcggccggcgaagaacgttccccagcagccgacacagccgctgcggtgtccatctccaagaagctacgggcgtacgtggaggacaagtatagccgcgccggcgtggagaagggcaagtacgtcgtcatccacggcatcgcctcatgctccgtcgccaacatgaagtccagaggcgacgacgactgccttcttcccctcgggcactgggctcagatagccaaggaaatcaggtgtcttgtatcgctcatcatggtcatttaggcatgcatcgacatgaacagggtgagtgtgacctagctcgtcgtcgctttggcagctccggcgacagggggctcaagcctctgttcgtgatccctcatgagaagcacagagatgaaatcgaggaggaggtgggggacgacacaagcatcctgttcatcaccaccccaggccag

SEQ ID NO: 177561 - DNA, 104 bp, Arabidopsis thaliana landsberg
atgatcttcggtggaccaacaacgaacctctcagcgcgacaacaaaaacaagagcgcacatatgtcttctcggtcgaagtggcagcgtcggtctacctagactg

SEQ ID NO: 177562 - DNA, 278 bp, Arabidopsis thaliana landsberg
atgcgtcccgagcgtgggtacgtgtccctggtgagtgtccgctccttctcctatcttgcgccgggttgcctttgattcttaccgtcgggatttccgttcgtctctaggggttggggttttacaagccctccctaccaccggtcccggaggacgcggtggaccgagccgcgcggagggtcgccacggagaagaagaaggagaagaaggacaccgaaaaggcccgggcccgcgagcggatgcgggctcgggaagccttggagaggcgccggcggaagtag

SEQ ID NO: 177563 - DNA, 451 bp, Arabidopsis thaliana landsberg
atgagaaaacgacatcgttttccagtcgggtcatgggtgattactcggattaatcgcaatcgcggtacagtaaacgcggatttatggttaatctcggtttaatcattggttcaattggaggcgtagtatttcacatgaattcaaaagtttgtgtatgtatttggagaacatattagttgatggtgatatttcaaggagccaaaagttcagggggaaatgttgagattgtaaatagtagagggtggaaaatttagccaacccaattattttcaataaaatctttgtagtagcttcatttgatctgaaatattcttagaatacaaagactgaatttgctacccatcaactacagcgattggaggttggttaatcctcacactaaaaaaaggcaagatgtaattgaggtaacttttaccatctattcgtttctatagatttttataaacgatga

SEQ ID NO: 177564 - DNA, 1692 bp, Arabidopsis thaliana landsberg
atgccgacgattttctttttccgatatgtgtttctattggtggtgatctcattggtgggtttttcgatcgctgagaaagttaactcttccgggggaatggtctggtctagtgttagagatgaagccgaattggtagaagattccggtgtggtgatcgcagagcaagatcaaatcgatggtggattctcttcacttgatgggatgttacactgggcaataggtaaattttctttctcagtgtccttcttcctcactaatttcatttagatctgattctatgttggatatcttcggttaggtcactcggatcctgcgacattgaaggaagcagctaaagatgcagagaagatgtctttggatgagttacagaagcgtcaattagagttaaaggtacggactttgtgattttggtttttaatttctgattgctttgtctctggaagttcatgaaagtgctcttatataggagctggtggagaagctgaaaatgccgtcgaatgcgaagttgatgcaaatagcgatagatgacttgaataattcatccttgtctcttgaagatcgtcaccgtgctttgcaggaacttttgatcctcgttgaacctattgataatgcaaatggtaactggaagcttgtaacttgctattgaatcttgtatatataaatgtgtttgtgttacagtttcacatgagtctgatcaattgtggcatcattcttttcttgtgtagatttgagcaaatcaggagggcttagagttgtagcaggagagcttaatcatgatgacacagaagtaaggaaactagctgcgtgggtgctcgggaaagctagccaaaacaatccttttgttcaagagcaggtttgatttcgttgtacttgtagagcagaaccgtgtgttgaagtataaaccgtctgaaacacatcatgtttcttgttctgtgaatttggttacaggttcttgaacttggagctttaacaacactaataaagatggtaaactccagctctactgaagaagctgtgaaagcactttttgctgtttctgccttgatacgaaataatatagctggtcaggacttgttttttgcagcacatggatacattatgcttcgggtgagcaaaccagaaatacatcatgtcaggttttgttcattcattctctggattggaaaaaaactaaccatgtttcgtcgtatttacaggatgtaatgaacaatgggagcttggatatgaaattgagacggaaagctgtattcttagtcggtgatttggctgagtctcaactacagaacacagagaaagatgaacttcctattttcaaagatcgtcttttcctaaagtctgttgtcgatttgattgtggtgcttgatcttgatctccaagaaaaggtagaactattacaggggcctatgaccgttttttttcctctatgaatcttggcacacatctctttctaacttatgctactcggaaaatatgtttcaggctcttacagcaatccaaactcttcttcaacttaaatccatagagcctcaggttctcaaagagtcctgcgggttggaagaagcattagagagaatgaagctacagctggaggaatcaatggcggatgaatacaagagagactatgctgcagatgtggagagcattcgtggtgaagtggaactgatcttccgccaaaagcttggacttttatga

SEQ ID NO: 177565 - DNA, 664 bp, Arabidopsis thaliana landsberg
tgtacgattggaacaaggaacggttacgtcgttgcttgaagaacacgggacaattaaaggggttcgatacagaacaaaagagggcaatgagtttagatcatttgctcctctcacaattgtatgtgatggttgtttctccaacttgcgtcgctctctttgcaaacctaaggtggatgtgccatctacttttgtgggtcttgtcttggagaactgtgaacttccatttgcaaatcacgggcacgttgttctcggtgacccatcacccatcttaatgtatcccatcagcagttctgaagtccgttgcttagtagatgtaccgggtcaaaaacttcctcccattgcaaatggtgaaatggcaaagtatctgaaaacacgggttgcgcctcaagtaccaaccaaggtccgtgaagcattcatcaccgctgttgagaaaggtaatatcagaaccatgccaaaccgaagcatgccagctgatccgattcctactcctggagctcttcttcttggtgatgcattcaacatgagacatcctttaaccggtggtgggatgaccgttgcattggcggatatagttgtactccgtgatcttctaaggccaattcgcaaccttaatgacaaagaagctttgtctaagtatattgaatccttttacacactacgaaaa

SEQ ID NO: 177566 - DNA, 812 bp, Arabidopsis thaliana landsberg
agatctcagccgttgaatcctctcatggtttctctttccctcttgatctccgttcgattctccaaaccggtcttccggttggtaccaattttcccaattggcgaaccgggtcgaaccggaataatcttcttctccctcttcttaatctgtctcaacacgtcgtcagaaatggattctgggtcgattcttgggggatccgacccggaaatgacgcggaggctttgtcactcgtgaaaaaattgattgagatcgctccggtactcgtccctgtttacggcgatttttacgtcccttcgacgacgccaaatttggcgggaaatccagttttccaaatcgacggcgacggagttagggaattgagttgcgacgtagtcggatttctcaagggaatcggtcgatcagaaacgccgacggaggatcgacgacgaaggagacgaccacggagagtggagttttggagcgatgtggcggagggatggagatttgtggtggcgcgtgattacacgcgcgattggtggagcgcgttaggttttgaggggttaacggcgtgtttggacgacgcgttttggaagctgagggaagcaggatggacggaagatgatgttcgcgatatgatgatgatggacagcgtagatcaaaacacgtgtatccagcagcaaacgcaaacgcaatcgcgggatgtggtgtacgcgtttggcgatgagggaatgaacgaaagagatagagacacgtgtacagaggacgaggatcatcagaaaggcgaagtaacgacgttgaggcatttgttgctttatgatcgtttgatgagctaa

SEQ ID NO: 177567 - DNA, 140 bp, Arabidopsis thaliana landsberg
agaagcgctgaacatccctacccgggtaaactcgcttccatggttccatacaatatccatcgcgctcaaagcgcccaatgaaaaaccggcaaaggatttatccctgaaagaaggaatgttatacgttttgcggataaaag

SEQ ID NO: 177568 - DNA, 255 bp, Arabidopsis thaliana landsberg
atggctctaagtaattatgatgtaaatactttctcatcaaaagacaaagaaagcaataaagggttggcggcgaaagtgaattatgtaacgaaacatcaggtttttgaaaacttaaaacctggattagtattgaagaccgatataggttatgaattcgtagaagacaaattcaggccattggagacgctgcgcaatgtggagttcaaccgtgactggagcttgacatttaacgctccggcagcgacagaaaacctg

SEQ ID NO: 177569 - DNA, 219 bp, Arabidopsis thaliana landsberg
atgaaccgaaattacagagagattgactcgtcttcttcgatttttcttatctccttttacgacaaagtacctaatccaccttctccacccactcgccgttgtggagagggagagacacacggcggagttggagtgggtggaggaagaagaaaaagacgagagcagaaacagaggattcatcgatgttatactctatccaaaattgcagatttgcatatg

SEQ ID NO: 177570 - DNA, 392 bp, Arabidopsis thaliana landsberg
atgaagagattgaagagaagaagaagaagaagacgaagcagatcggagaggttgaaggtgagagatcgaagaagatcgatcgatcttataagaagaagaagaagatcgatctacaaggagaaaggatcgatcttagaaagagttttggggattagggttttcgagatgaagaagaagaagaagaggaggttggatcgaataggtttaaggtgagagatcgaagaagatcgatcgatcttagaaagaagaagaagaagatcgaagaagaaagagaattggggattagggttttgcgagacgaagaagacaaagaagaagaagaaatggctaagtgtttggctcgaagagaaatgactcgatttagggttttcaacacaatagaggtcgcataa

SEQ ID NO: 177571 - DNA, 315 bp, Arabidopsis thaliana landsberg
atgaaggttggggatgtagtaaattcacttgctacccgacacttttatattacgggaggttatgtatttaccctaaatagcgtagtgaaatttaaacccactaccttaattaagtttacgcctcatgcgccccttactgttgatcttaatcttaatttcttattgtatgagcatttttgggtaggtgctttttatcgtttccaagaagcggcaggactaaactttgtttacaatatcaatgatttcttccatattggctatggttatgaatttcctgtaaaccgcctgatgaattaccaaagtggatctcacgag

SEQ ID NO: 177572 - DNA, 100 bp, Arabidopsis thaliana landsberg
acgctatagcgtcctcgagtcgtaccgccgcagacgcagcttccagagtggtgcgaggaccgatgacgaactcgtactcctgggccgggccgttgcctgg

SEQ ID NO: 177573 - DNA, 84 bp, Arabidopsis thaliana landsberg
aataacaccgagtttggtaacacagctggaattggtgttttgctgtggcatcatgggagctctgaaatgtcttcccagttaaag

SEQ ID NO: 177574 - DNA, 103 bp, Arabidopsis thaliana landsberg
atggcgcctggcgggcggcgggccggcggctggagtgagcctggtgggcggcgactgcgactgaaaaaagacctaatgggtcagatgggccgagcacaaggaa

SEQ ID NO: 177575 - DNA, 271 bp, Arabidopsis thaliana landsberg
gttttgtccgagctgcaaagaacacagacaagcgaacaaaaagctagacctgtggaagttaccagatattcttgtgtttcatttaaaaaggttcacttacagcagatatctcaagaacaagattgatacgtttgtgaatttcccagttcatgatctagacttgagcaagtatgtgaaaaacaagaatggccagtcatatctttatgaactgtatgccgttagtaatcattacggtggacttggtggtggccactacactgcctacgctaag

SEQ ID NO: 177576 - DNA, 797 bp, Arabidopsis thaliana landsberg
gagacgaatttgagcctagaaagacaagattgcaacattcatgacccgaaacaggagcaggaacaaccgagtcctgtctctgttcttgaaaggattcatttggaagacgaaacagttatccccggaaatgtgaaaatttctaaccttggtaaaagcccctgaatcaatgctttcattatcgttatcctttggatcacacttatccgtttgatttacctgaaaaagtttgttactttcttgcagaagagaagattcggttatcatttgatgatcctaacattgatcttgtagaaaaagaatctgttcatgagtttgtgaagaaagttcttgaagcttcaagattaaattggactaatcttatggaaaggtgcaacgaagaaacatcactactcgatgaattctcacacggtaatcacaacgaccagcttcttcttgttcttgactacaccgacgagattctccgcgagatttaccgtcaagacatcaagttttggcctttctcgccatcgaagagctcgagagtcctcaatctagaatcatcccttagagaagatgatctgattcacgagacgatgagacattttgactggagtttactctgctctgactctcctacaagatcattggatcagatcattgaaactgatctaagaaagccatgtctttggttggattttggtggtgaatctgaaggtgttgtgtctgatattgtggaaaagattcagcaacaattggtgcttgagatctctcatgagctaagaacaatgcagagaagcatattatgtcgattaatctga

SEQ ID NO: 177577 - DNA, 199 bp, Arabidopsis thaliana landsberg
atgggtctagcccaatatgcagtgatcgcacgtgcagacacgtggagcgttctgcacgacggaaacgccgaaaacgaatatgaaaccaaagaggctgcgtttgaggcggcggtcgcggctgccagtctcgcaattcgggaaggtcacgaagtacatgtcagcgttccagacgcctccgctggcaataaaacgacctccg

SEQ ID NO: 177578 - DNA, 388 bp, Arabidopsis thaliana landsberg
atggagaagcacttgaaagtcttccatgaaccactcacttgtggctgcggaatagtactcgagaaagaacagatggtgcgtatattgcaatcattactttgttgtgtttatttttttctcgaatcggttgtaaccagagattgtgatattattgcaggttcaacatcaagggagagattgtcctcttcgtctaatcgcgtgtaggttctgtggagatatggttgaagcgggtaactctgcagcggatactagagacaggatgagaggaatgtctgaacatgagagtaattgtggttcaagaactgcaccatgcgactcttgtggtcgatcagtgatgctcaaagacatggacattcaccagattgcagttcatggcaagagtagctga

SEQ ID NO: 177579 - DNA, 92 bp, Arabidopsis thaliana landsberg
atgcaccgtaggaagccccggtcgaggaagctcccgccgccgaggaagctgcttcggaataagtttcctgccgctcgaattgaaaagccccg

SEQ ID NO: 177580 - DNA, 374 bp, Arabidopsis thaliana landsberg
aggtgctaatagcgaacatccggaaggcaaaacaaggaaaattgatcacaagtatcaaagtagcagcatcgattccttcagtttctcacttgttatttacggatgatagtcttttcttttgtaaagcggataaagaccattgcggaataatattgggtatcctaaaacaatatgaagcggtttcgggacaaatgataaattttgcgaaatcatcgattcagttcaggcataaagtagacgaagctataaaggcaaaaataaaatcaaccttggctatacataatatcggaggtatgggatcctattttgggctacccgagagtttagggggctctaagacaaagattttttcctttgttagagatggattatag

SEQ ID NO: 177581 - DNA, 167 bp, Arabidopsis thaliana landsberg
aactatcaaccgacagtggaatgcagagttcagttaataacatcgaatctgaattaagtgagataaggctgagtttactaatggaaatcgagaagagaaaacagacagaggaggctttggagcagatgcaaattcactggcagagactccgtgagcagttggctcag

SEQ ID NO: 177582 - DNA, 160 bp, Arabidopsis thaliana landsberg
atgcctcatgaggtcttcgatgtcaagcccattgttcataaccccaatttcgaagacaagatcagtctctaccaatcatcggatcgtctagccagaagcactaacactctgacacttgagtatcagatcccggagttcctcgatgtcaatcccattggtc

SEQ ID NO: 177583 - DNA, 795 bp, Arabidopsis thaliana landsberg
  unsure (1)..(795): unsure at all n locations
atggcacggacccggtccatgcccagaggcaatagacaaacagtgcagcagccgcgttttcagccacctcctgctatcaacaagtcactctcagtcaactcaaggcttcttcctcagggtagcggaggtctcctcaatggtggtggtaggccaagccctcttttgcaaggtaacggttctagctcagctcctcaagcctctaaacccattccaactgttgagaagccgcaaccacggtctcaacctcagccacagccacaggcnnnnnnnnnnnnnnnnnnnnnnnacgcaggagagctcgagagaaaaaccaagtcgcttcttgaagagtatttcagtattcgtttagtggatgaggcattgcaatgcgttgaggaactaaaatctccatcttaccacccggagctcgtcaaggaaacaatctcgctcggtctagagaaaaacccaccattggttgaaccaattgccaaactcttgaaacatctgatctctaagaatgtgctgacatctaaagacttaggggcaggttgtttgctctacggttccatgttggatgacattggaatcgatctgccaaaagcaccaaacagcttcggagagttcttaggggagttggtctcagctaaagtcttggatttcgagctggtgagagatgttctgaagaagatggaagatgagtggttcagaaaaaccgtactcaatgcagtgataaagagtgttcgcgagtgtccatcgggacagtctgtattggattcgcaggcggttgaagttgaggcatgccagagtttgctctaa

SEQ ID NO: 177584 - DNA, 165 bp, Arabidopsis thaliana landsberg
agaattgacttcataataatcacctacatggacccattcacaacggtcgtcaccttagaggaaaattcttacacaacatgtgatgaccgaaagaatgcagcagcccacacatcacggaaagtctatttaattaaggttttgccacttatacatttttccaaataa

SEQ ID NO: 177585 - DNA, 150 bp, Arabidopsis thaliana landsberg
atgggcggggatcttcaggtagcgcaggctgcgcgcgtcgccatgggcttgcaggaacggccgctgatgcagatgcagttcgagcaggcgccagcagagcaccgccgaaagcaggccgaagagcaggatgaccaggcgcagtcgccaggg

SEQ ID NO: 177586 - DNA, 1033 bp, Arabidopsis thaliana landsberg
atgggtgggaatgaaactagagagcttccgatcatcaacctctctgacaagaacctaaaacagaacacagagctttggagcttcacgagagacagcgtccgtgaagccatggaacaccatggatggtttgtggccgagtacaacaactttccaacaggacttcaccagtcgattttggaggccgctaaggaactactcgatcttcctgtcgaaatcaagctaaagaacgagaaccacaaggccggacacggctacatcaccatgatgtcagatggccagcctgttcatgaaggtcttggtattgatcaagtcaacgatgttcaacagtgccgcggattctctcgtctcatgtggcctgatgatcatgatgataacgaccgtttctggtaatatatatatatttttatcaaataacataaaacaatcacaagtatttgttactatgtactaacaatatgatatgttatagtgaaactgttcatgcatatgcgaaaatgcaagcggaactagagcaacttgtgataaggatgctattcgagagctataacgtggagaagtatacagagaaatacataggaggaacaaggtaccttcttcgactgctgaaatacaggagacttcctaatggagaacccaacaggaaattcatttctcatacggacaagagcttcatctccattctccatcagaaccacatcaccggactcatgttgaaatccgagaaagaggatgtttggtatcattttactccttcaccaactcggtttgttgttatagcaggcgatgccatcatggtaagctaaaatctatcaaacggttcaagtttcatataatgtcaaatcatgtgtgtatatcaaatcatcaggcgtggagcaacgacagaatcaagggcgtgttaccacaaggtggagatggagagcgtggaaatgaggtactcgttagggttcttttcgttccaagaagggatgatatcgacaccggaagagatggtggacaaggaccatcctttagcgtacaacccatttcaccatga

SEQ ID NO: 177587 - DNA, 119 bp, Arabidopsis thaliana landsberg
atggaccttgtcaagccgagaagatagtggaatttctgaacagtaataaattccctttggttacaaaattgactgaatccaacaccgttcgtgtttactccagtccagtcaagcttcag

SEQ ID NO: 177588 - DNA, 2389 bp, Arabidopsis thaliana landsberg
atggtttctagtattgttaagcggcttaaggatcctgattctgttgtgagagatgcgtgtattgagacaatgggtgttttggcttccaagatgagttgttatgaagaccagaactttggtgtttttgtttccttggtgaaacctctttttgaagctattggtgatcagaataagtatgtgcagtctggtgctgccttatgcttggcgagagttattgatagtagtcctgaagctccagttgcgattatacaacgcatgttgatgaggacagtaaagctgcttaataactcgcattttatcgcaaagccagcggttattgagcttaatagaagtatcatcctggtaagctacttctaataccatataagtcattttaatttccgagtctgagcctttggtgctactattatcatgtggttgtataatgaaaaatggttattgactttaatctaggctggtggggcaacgtcgaagtgtgtgttgtcctcagcaatgtctagctttcaagatgcccttaaaaataaggactggactactcgtaaggcagcttctgtagcacttatggagatagctgctactggtgaaaagtttcttggacctctgaaggcgtcctgcatctgctctcttgaatcatgtcgctttgataaagttcgaactcttttgctcaaattcactctctgacagatgataacttttggaatgaaacatctaactttgtgcttttctattttaggtgaaaccagtgagggactcagttatccttgccttaaaatattggaaaggtgtccctgggtctgatagtccagagccatctgaaactgaatcctctgtaaaaggtgggtttaggaaatgaatcttttcttcaaatatttttttttttgcaactcataagactcatagatgctctttctgtttatttgttttgtaatcacagaaagttataatggagctcgagagagtagtgaacttttcagcaccagtgactttaaagtgaaggatggtatgtctatcaaatatgtaacggatgtgacaaggaaaaaggttccggtctctgccaggcaaccacctacacgttacaatgacgaccctcgaaagagtaaccaagatgattggcatattgaaattgcagtcccagaatcttcttttgtctccaaggttgatctttacaatgaagaatcagagggcagttgcatcaccaagacgtttgcagaaacgacaaacacgccagaagtgacatatgagtacattccaatgaaggataaagcagatagctatgtaacaggcggagtcaatgaaaacgatgatatcaagtctattacagtttcatcaagcagtttccgggcaagtggtatggtgaatccagccataacgagtaagaattatgcagctgaagaaactgatttggaagagcagccattctcaacccaagtgaaggatcgtacaagccttgactcttttgtaacagtgtcgagctctcaaattaatcatgactgctgtgctaagattgcaaatgaaatggcttctgtacgtaaacaactctcagatattgaaaataaacagtcacgtttgatagatcagctacaggttagtggattatctgtcacaatctaatgtctttacccagcttacaaatttatagatgctttagtcaacctttgtatcttcaagatgcgtgttctcagtaactaagtttcgtcttctgttaaacttataggtcttttcaacaggaataatgaacaacttttcggttcttcaatccaaggtatcaagcttagagtatgcagtggaggggatagctcagaacgctgccttgcattcagatatatcaaactccaattttgtgaagcacaaccaaggtagtaccatatcaccgaggctgtctagctgtacgtcaagaacttcgacggatatccgcaatcgacaatctacactatccacttccaagtactcaagggagaacaaaacacatgtaagaagcagactaaatgaatcacagggcatggagaagacacggagtaatcctttaggtaagactggtcaactacatactagagaggacatttggaacaacattggacagggaagacaaacattgatccagacccggacatcttctgattcaattcaaagcattagacaacagtatgcagaggtgatgagtggaacaaggaaaccagtgacaggtgtttcttgtgaagatgtggttgaatcagagtatctacaagtgctttcttccggtgatgagcttgcacttgttgagcttcttgacagaacaggcccggtgctggagagtatgtcatcacagaccataaatgaaattctcagtattctattgtcatacctcctagaacgaagattcatgaattcaatacttccttggctgcatcag

SEQ ID NO: 177589 - DNA, 1113 bp, Arabidopsis thaliana landsberg
atgaagataccagcacagggggacgaaaacgcatggaaacagcctctaggattcggatatgatcccaaaggaaacactcacaagatcattagtgtttgggagacacaagagcacgtgcttgtggccgaaatattcagcctcggagatacagacacaaaatggaggagcttagacatctcctcttccgcctccgctctacctttcggccatgtttccttctcttcttccacggtaacaattggtggatatgtttattggactgccactataagcgaggtgagtagtgtctaagtaatagctttgcctcttgttttcataacaattgttaagctgtcactaagtatgatgaaagtcatgaatacaaatgtaaatagggtgtcagacaacaagttttactattatagcgtatcgataatttattgtatacatagaattttggattatacctttaatttattagtattttgtatgatcgtagttttatttcttacaaatatttcagggatctcaaggggcttgtacatgtggttgtcgatctgctgagacaggctatcggttggaaactaaaaattggacaaagcacatggtcctatataggagacatttgagtggtttcctcacccaactatcatccaggggtctctcgtccaactcttccgcctcactaatcttcgagggaccttggcaatggtggatttttcttccgaggagtgtttagggttgtggacactgagagacaaggcgagaggagaatggtctttcgactacagatttgacgccaatgtattcagcgacaaagtgggacgcttctgccgcggccatgactggaggactaacagattacatgtggtcggtgcttggaaggaaggattgcttctacggatttgggactctactgtctgtatttacttgaatttcaagacaacacgtatggagtatattgggtttgagaatgagattcaaggattaataagtcgggatttcatcatcagttatactgctaattatctactacgtctcaagacttactatgaccaatcaagagtcatatgtgctcatcctcatgctggtgcacgtcttcgaggacgtctccattttagcttacgggcgtag

SEQ ID NO: 177590 - DNA, 557 bp, Arabidopsis thaliana landsberg
atgggccaattaattgacacccccaagtgtacgaacacacaaaatgagaggtggttcattgaaagcacagagaagttgttggcttttcaaagatacattgcccaacaaacaatcgtcatgaaactacaacaaaggtcagtttcatatatcttctaatcgcatttgttagtttacctaagagttagacgccatctgtttgtttctgctacttttccttactctttaacgacgaggtcctgaggaagaatgattgaaggtggtaatcatgtgatgactcactctttcagctttacaacacacttccatcttctaaagtgatatataataacccttactttttgtctttctttttccctttttttcccttttatctcaaatatagaaggccaaccaaaaagatgaaggatatgaagatgcagagcagccctgaaacgatgatgaccagaatccccactccagatcctcacagtaccggtgtacgagaagatgtaatggactcactctgcaaaccttggaagctttatgaaaatccatactactgctcttctcagtcttaa

SEQ ID NO: 177591 - DNA, 246 bp, Arabidopsis thaliana landsberg
gtgactgtactgagagagctaaagaaggaagaattgatcaatttctttgacgaatacacaaaagttggcgcaccaaagaggaaatcgctgagtgtatgcgtttacggaaaccaacatttaaaggaaatgtcatctgacaaagacaaagtcgtatcaacatccatagagatcgaagacattgttggtttcagaaactctcaacctctttatgcatcgttgaaagggtgtagccagctgacactgtga

SEQ ID NO: 177592 - DNA, 39 bp, Arabidopsis thaliana landsberg
atgggagacttcaacaaatgccggttgcgtgaggagaag

SEQ ID NO: 177593 - DNA, 667 bp, Arabidopsis thaliana landsberg
atggcggttaagcacggcgtcgacggcgacggcagcgaaatcgaatcgagaactctggcggtagatcgaaaaagcggtttctgcgaatcaacatcgatattctacagcaaacgtgagccaatggctctcccgccaaaccaatttctcgacgtcacgtctttcattgcatcacagcctcatcgcggcaaaaccgtattcggcgacgccgtaaccggtcgtcgactaagcttccctgagctctggctcggtgtcgaaagagtcgcgggttgtctttacgcattaggtgtacgcaaaggaaatgtcgtcattatactctctccaaactcaatcctcttcccgatcgtctccctctccgtaatgtcactcggcgcaatcataaccaccgctaatccgatcaacacgtccgacgaaatctccaaacagataggcgattcgcgtcctgttctcgccttcaccacatgcaaactcgtctccaaactcgccgccgcgtcgaattttaatctcccggtggttctcatggacgactaccacgttccttcgcaaacttacggtgaccgcgtgaaactagtcgggaggttagagacgatgattgaaacagaaccgagtgagtcacgagttaagcaacgagtcaaccaggacgacacggcggctctgttatactcatcag

SEQ ID NO: 177594 - DNA, 87 bp, Arabidopsis thaliana landsberg
atgcatgggtggagccacgtcttggaacggaatgacgagggtggacttttggggttaatttaccttagccattgtaacgactatcga

SEQ ID NO: 177595 - DNA, 633 bp, Arabidopsis thaliana landsberg
atggctgccacatttgattaccttactgatgtcaggccttacaagacctcctggagagtgcaagtgaagactcttcatgcttggcgtcaatacacagccaacaccggtgaaacccttgaagttgtgttttctgatgaaactgtaagagatcattgcatcagtcatatttttttttaatcagtttacatatagtacacgaattagctaaatagattaaatttctttttctatatatgcagggcaaaaagattcattgtttagtgaggaaagatttggttagcaagtatgctaacatgctaactgttggtgattgggttttcattgagacttttagtctcaactatgccggtggaagtttccgtcccacttctcatctctacaagatgtcctttgtcaatgaaacttcagtgattccatctccatcagtttcagattctaactatctgactttggtcactttccaaaagatccaaagtggagagctcaatcccaccatgttggttggtaagttatcattatataaccctaataactctactatgttttaacttaaaactgacaataacgatctatcttttttttgtagatgtaattggtcaggttgtaatgattggtgagttggaagaactttag

SEQ ID NO: 177596 - DNA, 199 bp, Arabidopsis thaliana landsberg
acccacgagtttctcagccgcgactatccttacagcgaattcaacgcgagttactggttcaaggattccgacgccccttacgaggagaagcagaaattcgactggttccgcccggacatcgtgggcggcaagtcgatcatgtggggcaggcagagctaccggtggagcgacctggacttcggcgccaacgccgccgacg

SEQ ID NO: 177597 - DNA, 369 bp, Arabidopsis thaliana landsberg
atgaactggtaccgctacgatgagcgaaaagcaatccccgaacaacttggtgaattcagtaccaaaatggctggattgagtcagctaaatgataaactgggcatttatggctgctaccagaaccattcggggcgaatggtcggtgcgtcgatgttcgagatctggcagattttgcaaaaagcgaatccaaaaacaatgggtgcccaatacgacattcgccatgccactgtcgagggtggcctctcgtggcaaaccggtttcaacctgatccgcccgcatattaaaaccatcgtgatcaaggatttttattgggagaaaaacagcagcggcaaatgggccgtaaaaagcgtgccgctgggcgagggaatg

SEQ ID NO: 177598 - DNA, 633 bp, Arabidopsis thaliana landsberg
gtatattctgagcagcttctggaaccgctattgcgtacgatacttgcattatcagggccaaagacaacagttatggtatgaattaagatacttgggatatttgcttttaagatatcattggaactacaagatcattcgttgttgttgttttatagttgggatatgagatacgttcgacggttgttcatgagaaaatgcttcagatgtggaaagacaactttgaagtcaaaaccataccgagatccaaggtacgttgatggcacagttactgtttaagtttcatgaaatatacaaccgcttattctggaacgcaatctgcagatggatggtgaataccaagacccgagcattcatctgtacatcatggcacagaaatctcctgccgagagctctggaaacgtaagccgagatgaagttgttatagacacagacgaaacaaagtgtgagacgaaagtcccaaccggagaatgccataagagggtggaagaggaagctgttgttacacatggtcctcgtcttaatgaagatagtttgttgatgagactacgggatggaaagctaagtgaatgggagatgagaaggtatggtacagttgctgcacagcttctccgtgacgttaagatagatgttcag

SEQ ID NO: 177599 - DNA, 432 bp, Arabidopsis thaliana landsberg
gcgctggatcgatattaaaaccgccttcacccgcaacgataccgtggccgtgctgaacgaaacagagcgcggcgaagatgttgccttgaatgcctaccgcaaggcagcagaaaaggacttgcccacccatgtcaaatttgtggtggtgcgtcagctggaaggcgccaagcgtaaccatgaccaggtgaaacagttgcgggacgctttccgcgctgaagcggcaattcattaacatcttgccgcaaaaaaagccctctcaatagactgagagggctttttactgccgttcgcttttactgctgcctggctgcatcagtgaccgggcacgcttcctgctctgttccccagtcctcttttacctgcgagagcgtacggttgaccttgacactacctccttcggtggagatcacccagctcacccgaataaagtga

SEQ ID NO: 177600 - DNA, 180 bp, Arabidopsis thaliana landsberg
actcctataaacgtctaccgagccctgaagattgcccaaggaaaagacttgtgtaaatccgatgataaccgaagtagcatttccggggaaaccggaccattgtcagaaatcgtggaaatgatattggagaatcttaaaggatattgtcgaatcgagaagttttcccgaagcccgagatga

SEQ ID NO: 177601 - DNA, 1659 bp, Arabidopsis thaliana landsberg
atgggtggtggtggcggcagcgttagtaacgcgaatggaggtgttccggcgtcttcgaggaaggttattcaggatttgaaggagattgtggagtgttctgagttagagatttatgcgatgcttgttgagtgcgatatgaatcctgatgaatctgttaatcgtcttctctctcaaggttcgttcttccagcttcaatagctttttctctcttttttagtttctgggttttagcttcgaatttgtttaatggaacttgaatagcaaaaaaaaaatcaaaacttcaaggagttttaatttaaccttgtgaagaaatttttgcaatcatgttgaatctgttagaacttcttgtataagagaatgtgtcagaactttatttggtttccttaagtttcttgaaatagtaatgttattttggattttgttgaatcttttttgttatctgtttctggaaataaatatataaatcagttttttttctctttttttatgttacagtttcttataatgttgtttcgttaaaacttttcagatacttttcatgaggtgaagagtaaacgagagaaaaagaaagaggtttgtcgaatataacataaaacagctactagtttagttactaatgccatatagctttagatgattaaaatctttttatctgattttcatttatttgtctgtttgttcagactaaagaccatgcagactcctggacgcgtaatgtcccgaatcgtggagctagaagcggtaatgacagttacaatacctctcgaggtggcagaaacaagtataaatctaatggtaataagatgcaaattgtgcaagagatagttttctctattttcttatgttcgttgtggttttggttatcttgaaaaatgtctaaacttgtttctggattttgcttcagagacaggagaaattcaaggtgtacctgtgaatagaagagaaaacggagcacgtaatcatttggctggatcttctgcatcatctggtttgcttggacgcctacctggtttgcttagacgccaaccaccatcaaacaggttcttaccttcatgtggtcttttggtatctaattttcgtaacaatgtccaatattttgtgttatcttagtatctcctttgcattgcagtgatcttccaagctctaaagtcaagaaagcaccaacgacccccagtgatgcagttactttgtctttgttgccttctcctgcgtatcaatcagcttgggctagcgctaaccctgggcaaagaactatggctgaaattgtgaaaatgggtagacctaacctgcagaagaatgtcgctttgcctcgttcatcagaggctcaagagagcagcagtaaagcccctctgaaggatgaatgcccttcaattgagaagcaagacgtttcttatctatcatcctctgtcttgaaaccatctgctgaatctaagatttcttccgaccaatttagtgagtctcaacatttggatgagactcttttggatgacatccaccgcgaaacaaaaacttatccaactgggtctcctcctgatgtggatcacaatccgctagcttcagtatcaagcagaaatttggttgacgatgaatctagagattccttagtatgtgacgatgaaaataacaaagctgaaagacattcttatgaggaaaatcaag

SEQ ID NO: 177602 - DNA, 1466 bp, Arabidopsis thaliana landsberg
atgcttcgactggatactactgctatgcgtcctaatccacttttcaatggagttcagtataacatggcttcatatccatcacctcctgtttctccttcaccattccagcaaagggattcaaatggtgcatactcacagttccatggcaacaactccagctcggagagcaataattccttcactccagctcaacaagacacgtctatcttcgaggtgattgattccaaatatcatcaacagcgaccactaccttcagttaactatcagtctaacaagcaggaggcagagaacctatatgggattcagttccagaatggctttaatgacaaacctgtgactcccaatcttggtcatgttgataatctttgctttaaccctgagaggtctgcgaataacggaagggtcttctatgataaagtgagcatgcccgaggaatctaaggtttccttctctgggtctacaaactcaaatgattcttgcttgggaatcccacactcgtactcagactctacactggagattactggtggacactctagctacttttcacaagagagacaacaaagcccatcttcaacattgaactttacaaagaaacaaacacaagaaaagcaagtacaggtgcataggaataacgatctagctgaccgtcgtacacaaagcgatatactcgacatgaagtccactgagggaggagagactatgtttaaattttccccaagtccacgaggacctagactatccggtgaaaacaagacgttgcatatagacatttctgctgcaggcaatcattatgatgaaatttatctaaatcaggaaaccaagaatcaaggagggaatagtgataccatttttcatctaggagggaaagtactgggaacaagagcaatgcctactgacatggaaggcaagaagttgcctatatatggaaaccaaacctcagttgttgttgatccatggaagcaaataaagcaagataatgagcgtttgatggctggagctggaacttcatctgctaatctaatttccttagaggaaggtatagcagctaatacccctaatgaggaacctgaatctcgtgctgcccgagaaaggaacttggaagtttcagggatctttataagtaagagagtagtctctgatgagaatttcttgttcagcatcgcctctgaatcaccaaacagcaagattgttcatgagacacaaaagaatgtgagtattacaagatgcactttaaacaggattatcctctattaacttctaacagtaataattattcaactaacctgcagagaacagaaagagaaggtggtttaggccatgtgagaatcccaagcatggatttgaatcagccagcgccagcaacagcgagtgaaacttacagtttgaagacaccaagagaagactcaccacaaagcattccacatgcaaagattaccagcggtgatacaatattcctttctgag

SEQ ID NO: 177603 - DNA, 152 bp, Arabidopsis thaliana landsberg
atgaaagaccaaaaacgacgtcgttcactaatgcgaagacctgggcagatgtaccggacccatccgaaccggaattttggtaatttgggtattcttaaaaccgttcagaaacttgtttttgaaatcagtgaccggttcggtgatatgaggag

SEQ ID NO: 177604 - DNA, 862 bp, Arabidopsis thaliana landsberg
atggctgaaaagatagaaagattagaacttcaatcagaatccaaggacaaggtatgaaaacacacattgaatccatatcccattaatgcctcacataacatttttgtaacgattatgttggccctgcagcgagtcgttgaccttcaggagctatacaattctcagcagattttaactgcagagttgagtgagaaacttgaaaaaactgaggtatacgcctgggcctgatttctcttctaactcctcatgaaaccatttcttatatatatttatcgaaatgcacaaaaagctaactgcatatctttctacaaatatcagaaaaagcttgaggaaactgagcacttattgtttgatcttgaagagaaatacagacaggcgaatgcaaccattaaagagaaggaatttgtgatatctaatctcctcaagtcaggtacttgattttctttttagtacccgttctcatgaggggaatcctgtcttagcagttagaaattcttacaataacattcttgtgacttgcagaaaaatcacttgtcgagcgagcctttcagctacgcacagaactagaaagggcatcatcatatgtttccaacttgttttccaaaataggtaaaagattcatggaccaaatatttttgtttctgttgataaatgttccctgcttcataaatgttgttgttatgcagaaagaaaggacaaaatcgaggatggaaacagatttctcatccaaaagttccagtcacagctcacacaacagcttgagctattgcataagactgtggcttcttcggtgactcaacaagaggttcaactaaaacacatggaggaagacatggagtcctttgtgtcgacaaaatctgag

SEQ ID NO: 177605 - DNA, 69 bp, Arabidopsis thaliana landsberg
gagttggggattaaaaggcagttgtcttgtggccgcatcaatccggaattgaagctcttggattcttaa

SEQ ID NO: 177606 - DNA, 1380 bp, Arabidopsis thaliana landsberg
atgggaggaccagcttacgattgtctgaccaaccctttaggagccgtccgattctccttcgtaaatgctctgtcttcaggctacgatccggcttcgtctgtcggaaaagactggggtgtcgttgatttgttccgtcactacttctccgacgaatctgctatctcccaggtttgccctaaaacctttactctgtttctatttttttttgggtttagggcaattgagtatgttttgattaattactacccaattagcataataggttgattttttcgtgtactttggctctgtttctaagtaaatcaacttactttaggttttagtctatccatagattggttaatttgggttttttcaaggatctgttttgagatatttttcttaattaaccgatagtgttttcttttgtctactaggttccaattcttgattcgtcaagtattaagtgggtgcaacccaagactcttgttcggtttcgtggaatgatacaggacatgcttgggaatgaattctatgctggtgcttacaaggtaggaatatgacttttgatggtttctactaaagaagaattcaatctttatctatcagtaactgtttctgtttttacgttctgtttaggatgattcaacatggagaacaaacaagtacagtgatgtttcacagtttcctgagggttcttccactgaaattcaagtttgggagcgtcgcttgctttactgtgttccagtatgttttgtctcatgcggatctttcttttttgttgttggtctctcatatatgtttaaacataataacacttgattgcaatgtttaggttccgggaaaaaaccagtggactgaatgttcttcacaagagctaaaaaaccggtttttggatctaactggccaaaacagggaaaagcgtgtgagggtggatgaagaaatgactgattccatggactccagtgtaagcaacttaggttctcatgtttgctttatatgaaactgattttgttgtagcaacatctattggtgttgtttgtcaataacttattttagccaccattgcagactttagaagctgggcgtaatggttctccttttaagaaaatggtaaggatctctagtctcttaagtctttcttcaaagtctttatgagtctaacactataagctacaaagttgtggaaaaaaccatatattataaacttttctttactgttactgggaagaatcatgagacattgagattttggctgatgaagaatttctgattaatactgttttttatgttcatcagaaagtgggggaagctacttcatcagcttcagaatctcaggttccacaaacttctggtattccgcctgctacaagtgcagattctctgccttgtcttgtcaag

SEQ ID NO: 177607 - DNA, 93 bp, Arabidopsis thaliana landsberg
gttcgttacgagagccggaagaaattagcaaagcaacgaccacgaatcaaaggccaattcgttcgtcaagttcaatccacacaagctccatag

SEQ ID NO: 177608 - DNA, 245 bp, Arabidopsis thaliana landsberg
atgccggcgacgcctgggccgccgtcacgggcgcgctggccgcccagcttcgcgccggcgggagcggcgaggcgccgggcatttgccttcgatcccggccgcacgatcggccgtcgcaccggtgagatgcacgccgcgctctcgaccgagacgggcaacgccgccttcgatcccgagccgctggaccggatctcgctcgcccgcatcgtcgacgaggccaagcacgaggcggccggggcatcgcg

SEQ ID NO: 177609 - DNA, 1603 bp, Arabidopsis thaliana landsberg
atggagcataaagtaacacccgaaagatccgacccggagaagagagatccggacaacccgacccaaatatttgacatttttggttcgatgttcttcttcttcctctattgatttttctgatcttcccgttcgatctcactctgtttcccaaaaaccttcgtgtaccttcgtattctctgcattggatttgaagcaaattgatgaactagtaatctcacacggatctaagagcaggtaaaaccaaaaatgaacactacaaagctatcaacgaattttccatttttttttgaaattttattttctttcgaagatcagatcagtaatcttattatcagcttctctcgttctcttgatcgatctgaatcgaaattgtgacaatgatcagccgtattttgtctttcagaagttatggagtgggcaacggtgcagcatctggatctgcgtcatgtaggtcgcggtgtgagcaagccactacaacctcatacggcggcgtttcatccttctcaagccgttatcgctgttgccgttggctctcacatcatgggtataatactctccgcaaattcttatcgattggtttcatagtttgtgactgtttgatattgaaacttattggtttttgcagaatttgatgcattaacgggatgtaagatcgcgtctattgatattggatctccagctgttagaatgttgtatagtcctactagcagcaatgctgttgttgccattcttgaggtcagtttcctctaatgttattgtagagattttgttttcaatttggaatagtagttttagcttggtgttcagtgttttagaatgatttgtgtttggaattgtttaggattgtacaattaggtcttgtgattttgaaacggagcagacttgtgtattgcactcaccggagaagaggagtgagcacatttcctcagatactgaagttcatcttgctgtgacgccacttcaacctgttgtgttctttggattcccaaaacgaatgagtgtcacaggttgggttatcagttcatgagttctcctatatgagtaggtgtgctggtttattttaccgattgactgtatttgttcttttctgtagttgttggaactgttgaaggtggaagagctccaaccaaaattaagacagatttgaagaaaccaattgtgaacattgcttgccatcctcgactacctgtcctggtatgataaaacattcacacattttcatgttagtgtgtagaatctgattttgttgtacacacgcgtaacttcttgttcaatgttttgtcttttcagtatgtagcatatgcagaggggttgatacgagcttataacattcatacttatgctgttcattatacactacagcgtgagtttaggaggatctcacaagtctcattgtttttattcttctcacttggggtatcctgagcaatagccaccagttaaagcagttctttgttatcctcgcagttgataatactattaaacttatcggcgcaagttcgtttgcttttcacccaacactagaatggatttttgttggagataggaggggtacacttttagcgtgggatgtttcaactgaaagacctaatatgattggaat

SEQ ID NO: 177610 - DNA, 304 bp, Arabidopsis thaliana landsberg
atgcctacaaaaatccagcctatgctggctactttagtagacgcaccttttgacgatccggaatggaattttgaaatcaaatgggatggatatcgcgccatagcttatgtggaactcaagggtaaagcccagccaaaaacgtctgtacacataaaaagtcgtaatcaaaaagactttgagcaaaagtactatccaataagaacttcactggaaaagctgaccgagacaatggtcctggatggagagctcgttgtcgtggatgaggcaagtatgcccgaatttggtgctttgcagaattggcgta

SEQ ID NO: 177611 - DNA, 25 bp, Arabidopsis thaliana landsberg
atggctggtggagttgcactgagag

SEQ ID NO: 177612 - DNA, 385 bp, Arabidopsis thaliana landsberg
cactctcacggtgaaattctccgtgagatttttgaatttagacgtcgtcgacataacggagaccggagatttcggcgaattttggaaattgagagttgagttgacgagtggtgaagaagaagatgatgatacgatcgaaaacatttttttatgtcaacggattcttcatcaccaccgtgaacaccaatttgtcgttccaagcctcgggcaaatccgacggccaattccgaacggaatcatcttaactccagcaactccggttaaatcggcgtcttgttataaaccggttcggctcaaatttctccggtttagaccagatcttcgggtcttcacttataccgggaaaataaaactcagtttttttttttgcaccaaactcagttaa

SEQ ID NO: 177613 - DNA, 464 bp, Arabidopsis thaliana landsberg
atgcgtggggatgagagtgcgcgcatcggacggctgagagactctagagcgtattggacggttgagatcgtcggaaggtagaacaaagcagaggcagcctaccccttagagccttaataggtagtatagattatgagaaattatttagatcgtgatacattaacacctctcgtatacacattcttctgagaagaacgcctcaatttaccaaatcaaccccacgaaaacctgcaaatcacacccgtgtctgtacgccacccagttgcttctctgtgtactctccaactcatcaccggctccatccttgtcctacactgacctcgtccccatcccgcaaccgcaagcaaccaccgatccagcccgttcggcctttcggtaagctcggcccccgtccaatcctggttcccgcgatttccttcgtgctagggtttagtcgggatcggcgttcgttttccctaatttcg

SEQ ID NO: 177614 - DNA, 131 bp, Arabidopsis thaliana landsberg
atgagccgaccgcacccggagaagaaccacctcaacgagaatcccaccgacggagaaaccggcgcaggaacgttcgacgacatcacgcggcaggagaacgggatccggagcaacctgtctcgcgggacgag

SEQ ID NO: 177615 - DNA, 1152 bp, Arabidopsis thaliana landsberg
atgaatgctttagcagcaaccaacagaaacttcaagcttgcttctaggcttcttggtctggattctaagctcgagaaaagtcttctcatccccttccgagaaatcaaggttcgcaaattttcactcctttcttaacctaattaaccttgatccgctgattttgtgccttcgccggcgccggagacgattcgtcgcggtggattttagtgaaaaatgattactgaatgtttaggggcatttcgaaacccgacccgcttttttgtggatccagttacttcaatccggttgctgaattatataaccggaacaaaccaatttaaatcaaccggttctggtatttttgtaggtggaatgtaccataccgaaagacgatggtacactagcatcattcgttgggttcagagttcaacacgacaatgcaagaggtcccatgaaaggtggaatcagatatcatcctgaggtttttgaccttttgactctgtttttttgaaccaaaactcaaatgtaacaaaccagtatacaatttcggttttggtatatgatgcaaaccggttatcgttttcttgcaggttgatccggatgaagtgaatgcattggctcagctcatgacatggaaaacagcagtggctaagattccttacggaggagctaaaggagggattggttgtgatcctagcaagctcagtatctcagagctcgagcggttgactcgagttttcactcagaagattcatgatctcattgggattcatactgatgttccagctcctgatatgggaaccggtcctcaggtttcgaaaacatgatcttcagaagtcttcatcttgtattttacgtgttgaaaccatctttcaactttttcccttggtggaatttgcagacaatggcttggattcttgatgaatactctaagtttcatggatactcgcctgcagttgtgactggaaaacccattgtaagtaaagaataatcacaatcttgttttgctaatgactggtttaaccacctgaatgtttaatgatgtttatgaaccaggatcttggtggatcgctagggagagacgcggctactggaagaggagtgatgtttggtaccgaagctttgcttaacgagcacggcaagaccatatcagggcagcgttttgtcatccag

SEQ ID NO: 177616 - DNA, 478 bp, Arabidopsis thaliana landsberg
ggttcgcatggcaccctgtacgggcgtaatgctaccggcggcgcgatcctgatcaacaccaaggaaccgtcgaagaccttcaccggttcgttcgaagccggctacgcgcagtacaacgagaagacctttggcggctatatctccggtccgctcaccgaacacctgcgctacagcctcgccggttataaccgcagcagcgacggcttcatcaactacagcgacccggtgaccggcggcccgagcgatcgtccgatggtgccgaaccgtcagcagaacattcaggcgaagttggcggccgacctcggcgacgatttcaccgcgaccctcggctacacgtataacctctacgacgatggccgtggccttgtgttcacgccggtcgcctatatcccgagcacatcgccgccggtgccgctgcgctccggctcaccgtatttctataaatccgcagacaacgatccaaccaccgtcgacttcg

SEQ ID NO: 177617 - DNA, 410 bp, Arabidopsis thaliana landsberg
atggaaggcgtcgatgatagcagatggaggcttcaaacgcgcattaatcgactagaggataatgacgcgaaagaagatgtggctttggaggacgtgataagaagacaaggtgaagttgaggagaaccaagtcaagaacgttgatgatcaatcaaggatacgggcatcacttaggatagtgacgatggaatcctcaaggaaatacgtggaattgcttgatagaattcttgatttggaccagaaagttgataacctaataacatgcatagaagggcatgaaccaatggagagcgaagaagaagactctagcccccatgtgctttgcgatgcggctacaacttaccgagatcctcacgaccttaaagaagatgaaatcgacaaaaggaatgaagatcctcccgggggaccagc

SEQ ID NO: 177618 - DNA, 183 bp, Arabidopsis thaliana landsberg
atgaatgaggttgggcagggacggttccacgatccagggggctattcctgtgcattgaggtgcaccaacccaagcggcaacagcgtggcgcaagtcgtgcaggtgatcgtgaccagcaagggccctactgttgcgttctcggcgcagcccaatcccgccacgcagggaactcccgccaacctg

SEQ ID NO: 177619 - DNA, 170 bp, Arabidopsis thaliana landsberg
attccaacgacgcagatctccgaaatggttgtaaatcctcatctttactctcttgttactgctccgtcattattacaagatccgatctccagatctacaaaattaaaatcgctggttttgattcgaagcctgtctcgatgcgttttatttcctcacaagaaggcggctag

SEQ ID NO: 177620 - DNA, 273 bp, Arabidopsis thaliana landsberg
tcgggtttgcggttcattgcgggccgcatcgaaggcgtggagcgcaaccgtggcggggtctggctgaacctggacggtgcggtggtgctgcaggttcccgctcgtctgcagcgcaacttccccgccagcttcttcgataacctcaagggacgccaagtcgaggcgcgtggctgggtgctggatcgttcccgcaagggcggcctcaagcccgggcagcgacgttggctgttgccgttgaccgatccgagcatgttggagcgcatttcaggctaa

SEQ ID NO: 177621 - DNA, 138 bp, Arabidopsis thaliana landsberg
actttagatcgatctccaaccttatatgaagaagatgaagtacagagagatgagagaaagacgactttgcccttgcgtcaaacggccacaacgaccgcacgtgtatctcacgtgttcttcttgaaagctgtagaatga

SEQ ID NO: 177622 - DNA, 203 bp, Arabidopsis thaliana landsberg
ggatcaagatcgagggagctgaagacgaggatgaagagacactacaagaaaacagtcgttttgcgagggaagaattactcgctaatccctcgcaaacagctatacgcaagggatttgcgaggaaaacgagttcctcgcaaatcgcttctcgcaaatggttatatgtagcaattcccatgcaacacacgcaactacagttctag

SEQ ID NO: 177623 - DNA, 866 bp, Arabidopsis thaliana landsberg
atgctacatgaagagcagagagcagagttggattggccaaaaagaatggagattgtccgagggattgctcgtggaatcttatatcttcatcaagattcaagactgagaatcatccacagagatctcaaggccagcaatatacttcttgacagtgaaatgatcccaaagatttcagatttcggcatggctagaatctttgggggcaaccaaatggaaggatgcacaagtagggtcgtcggaacattgtgagtgactcttttctgaaacaccacaaaactgtccaaaatcttacaaccttaaactgtttcaatcttgttgcacagcggatatatggcaccggagtatgcaatggagggacagttctccattaaatccgacgtctatagctttggagtattgatgttagagatcataaccggaaagaaaaacagtgctttccacgaggaatcatctaacttagtcggacatgtaagtacataactgaaaattttacacaaaaacagaggaaaaaaaacagaacataagtaaatgtatgtttctccgtcttgtagatttgggatctatgggaaaacggtgaagcaacagagatcatagacaatttaatggaccaagagacttatgatgagagagaagtgatgaagtgcatacaaattgggttgctctgtgtgcaagaaaacgcttcggacagagtagacatgtcctctgttgtcatcatgttgggtcataacgccactaatcttccgaatccaaagcatcctgcgtttacttccgcgagaaggagaggcggtgaaaatggtgcttgtcttaagggacaaaccggtatttttgttaatgacgttaccttcagcgacattcaaggtcgttaa

SEQ ID NO: 177624 - DNA, 2261 bp, Arabidopsis thaliana landsberg
ttggatggcaaaagccatgtgatatatgcagaggaagaagctgcaggaactcgtcttctcattgatggaagaacttgtttgctacaggtttctgctaatttttttgtgtgtttaccattttacttcacgtttctctgaagtcatctttagcttttaagctgtctgtcaattttggcttattcagaatgaccatgatccatcaaagttaatggctgagacaccgtgcaagttgatgaggtatttggtttctgacaacagcaatattgacgctgatacgccttatgccgaagttgaggtcatgaagatgtgcatgccacttctttcacctgcgtcaggagttatccatttcaagttgtctgaaggacaagccatgcaggtgaagaaccaattcattgctaaagaaaatttgtttcttacagttttgtagaaattgattaacccatccgatattttcttgacaggctggtgaactcatagccaagcttgatcttgatgatccttctgctgtaagaaaggccaaacccttccgtggaagtttcccacgattagggcttccaacggcaatctccggtaaagttcatcagagatgtgctgcaactttaaatgctgcacgtatgattcttgctggctatgatcataaagtagatgaggtaaacgctatttggttttcctatgtgattcaacttttctattaaataatttgattctgagattgctcatatgttttgcaggttcttcaagacttgcttaattgccttgatagccctgaactcccatttcttcagtggcaagagtgctttgcagttctggcgacacgactacctaaagatctcaggaacatggtaaacacttagatactattcgtaatccgttttcctttactgtgatcttgttttgagtttctagtcttttaatgctttttgtttataattctttatcagctagaattgaaatacaaggaatttgagattatctccaaaacctccctgaccccagatttccctgccaaactcttaaaaggcatccttgaggtgattagctactgcttcttattctagacctactgttctgtattctactctaaaatactttcttttcggtccattttttgcaacaggctcatctatcttcttgtgatgagaaagagagaggttcccttgaaaggctcattgaaccgttgatgagccttgtgaagtcttatgaaggtggtagagaaagtcatgcccgtctaattgttcattccctctgtgaagaatacctatcagtagaagaattattcaatgataacatgctggtaatatatggttcaattgttatcaaacggctttgttattaatagttatgtgtgaggaaacttaatatgcattttcttatcttgaaaaggctgatgttatagaacgcatgcgtcagcaatacaagaaggatcgattaaagattgtcgatatcgtgctttcacaccaggtttgtgattatccttcgcacaccaggtttctcttgtctcactatgttattgaactggtatgctcatcttttcttcttctcagggcataatacacaaaaacaaactggttcttcgacttatggagcagcttgtttatcctaatcctgctgcatacagagaaaaacttattcgattctcagcacttaatcatactaattactctcaggtgcgtttggttcctttatgttttatgatacttgtgttgacattcgtcagctgatgattgatatgttcgtgtagttggcgctcaagacaagtcaattgctcgaacagaccaaacgaagcgaacttcgttcaaatattgctagaagcctttcagaattagaaatgtttacagaggctggagaaaatatggatactcccaagaggaagagtgccattagtgaaacgatggaaaatcttgtgagctcatctttagctgttgaagacgctctcgtgggattatttgaccatagcgatcacacacttcaaagacgggttgttgagacttatattcacagattataccaggtaagagatcattcttcctaaccttatatttaaaattcgttttggagtgcaattgattagacagaatttgttttgactccattttaacttgtctcatgtcattagccctatgtcgttaaagaaagtgtgaggatgcagtggcaccagtctggtgtcattgcttcttgggagttcctagaacatttcgaaagaaaaaacactggcccagacgatcacgagatatctgaaaaaggaattgttgcgaagagta

SEQ ID NO: 177625 - DNA, 177 bp, Arabidopsis thaliana landsberg
gactttgatgcggatggcaaaagcagctgcaatatttccatcggtaccgcggcaaaccgaagtactactggcgccatcctgcctgaacaattcaacggcatcgagcgaaccggcttcacccagttggaggtaataaccattgagcggagcggtcacatcggcctaaacgctgaccag

SEQ ID NO: 177626 - DNA, 495 bp, Arabidopsis thaliana landsberg
  unsure (1)..(495): unsure at all n locations
atgaccccgttaaatgccgacctggacaacgtgcaccgcncggtgaaggtgggcaagaaggcatacgccggcgccaacgccgtgaactaccacgccatcatgggcaccattgcgctggacgtgggccacgcctattcgctgctggacgaccgaccgcaccagcgcgtcgcactggagcgcgcactggccctctccgagcacgacncgggccagttggacatccatatcctggcgctcaacaacctctccgactactacctcagccagcccggccagacccagcgcgtactcgactatgcgctccgcgccgatgcgctggcccgcgacgccggcagcgaaatcggccgcgcggcaccattggccaacatcggcatcgcgctcagccggcaaggcaaggtcgacgcgagcgtggcgaccttgcgccaggccatcgacttctccgagcggcacgccaacaccccttacgtcatcggcatcacgcaggacctggtcaag

SEQ ID NO: 177627 - DNA, 73 bp, Arabidopsis thaliana landsberg
atgaccaagggaaggataggtggatccaacttctcccactcgttacgagccttagccacacatctaacctttg

SEQ ID NO: 177628 - DNA, 184 bp, Arabidopsis thaliana landsberg
acatacattctggtaccgttcctgtgatcgacgcgacggaatccggctccggagttaccatcgaaaatattcaattgtgacccgacccattcaattaaaaccagacacatatacaattaaaaccgatccaatttatcatcagacccaattcgaatttagtgggtttaaacaggcccaacactaa

SEQ ID NO: 177629 - DNA, 790 bp, Arabidopsis thaliana landsberg
atggctgaagctgccaatacagggaatggacaatcatatgatgagacaagtccacaagtagaggaaaccacaaacatggctgaagctgccaatacagggaatggacaatcatatgatgagacaagtccacaagtagaggaaaccacagacatggctgaagctgccaatacagggaatggacaatcaggtgatgagacaagtccacaagtagagaaaaccacagacatggctgaagctaccaatacagggaatggacaatcaagtgatgagacaagtccacaagtagaggaaaccacagagtcacatcaacatgagagacagcttaaggcagagaagcagaatgtggtagggatttgggagggagtgagtgaagagagtcagctaacagaagaggacaacaacgtggtgatgattctcaagcacacgcaatggtagaggaagaccacacagcatttccggtaaacgtgctttcgaggaagggtctaccctcatcacaataggagagtcattgtcagacttcgagatgtacatgacagatatgaaaacggagctggatcaatatttggaagaaaatttgattccgaggtcagaagactttaacgttctgagctggtggagggtcaacaacaccaactacccaactctctcggtccccttcagcaccgtctctcctgattccgtattcgacacagaggtgaagcagatggacaattacaggacatctcttcctggtgaaaccttggaggctctcttgtgcaccaaggactggttaaaaaatggaactttatga

SEQ ID NO: 177630 - DNA, 461 bp, Arabidopsis thaliana landsberg
gtacatcttcatcctctaagacgccacgtagaagatcaggtcgactagaaggagttggaaaaagcatggaggattcggtgaaacgtaaaatggaacagttttatgaaggaaccgatggaccacctctccgtattcttcccataggaggccttggtgaaattggaatgaactgtatgcttgttggaaactatgatcgttacattctaatcgacgctggtataatgttccctgagtaagtccggagatacattcatcttgttaatattggcgagaagtcattatctttgtgtgcgtggtgctaactctccgtggaaaacattgctgtataatgttacagttatgatgagcctgggatccagaaaataatgccagacacaggatttatcagacgatggaaacacaaaattgaagctgttgttataacgcatggtcatgaagatcacattggtgcgttgccttgg

SEQ ID NO: 177631 - DNA, 146 bp, Arabidopsis thaliana landsberg
atgcataactcattaagcttactgacagcctcatggctgctattggcgaccgattttgatcatttgagcgtggatgatgcggagagattgaagagttttgcaattgtggagatgagaaagagaagggtgcatattcgtatagaatc

SEQ ID NO: 177632 - DNA, 84 bp, Arabidopsis thaliana landsberg
atgggaaagaagaaaggcgagacgaaatgggaaagagaagtacaagaaaaactaggacgagaaccaaaacagatcaataatatg

SEQ ID NO: 177633 - DNA, 408 bp, Arabidopsis thaliana landsberg
gcttgtgatctcttgacaactgggatccagattgaaaaaggaacaacagtgattcgaaatatattaatttcttcttcgaatcactgttgttcttcttggcagaggcttcagcagattcgaaatattggatcgccgttattggcagaggcttcagcagtcctcgctgcgacccaacatgcagttgagcttgggatccgccatcttcacatcgcttcagattcagctttactaatcaaagcgctaaattcggagattctctcaaaagaactccatgggattcaacacgacatccttcatctatttgttaattttgatgtactttgctttaattgtatctctagagctacaaacaaggcagctgatatgcttgctaaagagtctctccgcttagtaatgtcttcatattga

SEQ ID NO: 177634 - DNA, 1305 bp, Arabidopsis thaliana landsberg
tctccgattactactaccgattaactcaataaatcggagatcggagattggagtctctgttcatcggccagatttcaaaatccgagcgacggacatcgacgacgaatggggtcaagatggagtggagagagtatttgcctcatcttcaaccgtatcggtagcagataaagcaatcgaatccgtggaggagacggagaggctaaagagatcactagcggattcgttgtacggaacagatcgaggtttaagcgcatcgagtgatacgagagctgagatcagcgagctcatcacacagctcgagtctaagaaccctactccagctcctaacgaagctctgtttctcctcaacggcaaatggatcctcgcgtaagtacttttagttctgatactctcctaggcacggcatgtaatattagttttgtcccaaacattactcaaaccggtgatctctgagcttcgtctaggatctttaccaattaagttaatgatactttaaacttaccggtggaagtttaatttcccggtgaaaactgtttagttccgttatgaatgatttgattttgatagtgaaaagcaagttgtgattacaaagaagatttaattatgaatttggattatgattctgtgtgtagttatgagccttcgtttatttttagccgttattgttatgaatcaagaacttagttttaagtgtttatctcgtgaagctacacgtcgttcgtggggttgttcccattgctctcacgaagaattgaaccgttggttaaagtggatgagatctcacaaaccattgattccgatagcttcaccgttcaaaactctgtccggttcgctggtccgttttccacaacgtcgtttagcaccaacgctaagtttgaaatccgaagtcctaaacgtgtccaggtaaatcaagaatcatcccctaaaaccacaaatggcaaatgctaatgttacataacctaattgttttttttgttttgtttgttgtagattaagttcgagcaaggtgttatagggactcctcagctaacggattcgattgaaataccggaatccgtggaggttcttggtcagaaaatcgatctcaatcccattaaaggtttacttacatcagtccaagacactgcttcttcagtggctagaaccatttcaaaccaaccaccattgaagttttctctgcctagtgacaacacgcagtcgtggctgctcacaacttatctcgacaaggaccttcggatctcgagaggcgatggtggaagcgtctatgtgctcatcaaagaaggaagctctctcttaaacccttaa

SEQ ID NO: 177635 - DNA, 586 bp, Arabidopsis thaliana landsberg
atgatattgttgtcttgtggagcaccactaattcctgcaggtgggtcttgctgcaacctcttgaaatccctcatcaatctcttcctcgctggagtcgacatccttctcttactctatcaaattccagtaaccaaccattacagtatttcaaaaaccaactatctcagagcttggatatgcaattatctcaaaccatttgaatctgccaagcaagtttataacctaacctaatgatcatcacctaaatagcttataagcacaactaggaagctttgagatcaattctatacaaaactacacaattctctttaacctaggaagctttgagatcaattcacacgaaaatgtccaaaggatgatgataacatctgaaaagaaactaaaatcaatggatctagcaacgaatcatcgtagaacagaaattagagaacaagagagagatctcactgttgtgcgaaaaggtaaaagatcggtggagattcgtcgtcaagcaagcatctctcagccggagaattcaaacaacgacgatgagagaaaaagtctccgatcaaaaagctcgaggatcctcgaattcaccgagcgatga

SEQ ID NO: 177636 - DNA, 422 bp, Arabidopsis thaliana landsberg
atggcggtcgccggcacgccggacgcgtacggctacgatccggacacgcacacgttcacgctggactacacgcccgatccggcgatcgccgcgccgacgctggtgttcaccgcgccgcgccagtatcccgccggctatcgcgtcgagatcgacggcggccgcgtcgtctcggccgacggcgccgcggtgctgatcgtgcaggcgctgcccggcgccgccacggtcagcgttacgctgcgaacggccggctaggcgcgtcatcaaatggcgcctcccccttccgcaagcgggagagggaaattccagtgacgacgccctctgacccgtcattgcgaggaggccgaaggccgacgaagcaatccagtgcgcagtccgatcgggccgtgctctggattgcttcgtcgctgcgcttctcgcaatga

SEQ ID NO: 177637 - DNA, 438 bp, Arabidopsis thaliana landsberg
atgaagcttttaggaatatcagagacgaaaacaagggcctttctcaggaaacttctcaagacctatgagaataactgggatttcattgaagaggatgcttataaggtccttcttgatgcaatcttcgacgaggctgatgcccaggtctgttttttctgcttaatcactttttattttctttatttgattgtttacatattctcacttagtcagttctctttctttgatatgtcatatggtagtccactgaaaaaaataagaaggaagaggaaaagaagaagaaggaagaggaaaagaagtccagagtaagttaactttctttaatttgatgacaattttctggtgttttttgatgttgtttcttctcaaggctttgatgatctttttttgtttctttagagtgtagcaacgagcaggggaaggaggaaagctcctgag

SEQ ID NO: 177638 - DNA, 189 bp, Arabidopsis thaliana landsberg
atgaaggcgcctgtcttggtgcccccggcggatggagaagccctcttggtctacgtcgccgcgaccactcaggtggttagcgccacgattgtggtcgagaggccagaggaagggcatgcattgcccgttcagaggccggtctacttcgtcagcgaagtgctgtccgagaccaagatccgctacccacaa

SEQ ID NO: 177639 - DNA, 268 bp, Arabidopsis thaliana landsberg
ttcaacttcgtcgaagaacagacacaaatttcagccaagagccaaagcttgtatctttctgggatatcctagtggttacaaaggatacaagttattggatttggaaaccaagtccattcatatttcaaggaatgttgttttccatgaaaccatatttcccttcagttcacgtgattctgctggtcctttctctgatatttttggcagcatcaatgaatctcttattgagaatgatacaaaaaatgttgacagtaacattcctgtagtt

SEQ ID NO: 177640 - DNA, 368 bp, Arabidopsis thaliana landsberg
atggcgcagcttgtcctcccggatggaaaactggcgattgggtttgtcctagggtgggatgtggggttcataactacgcaagcagggcagaatgcttcaaatgcaagacaacaagagattatggtgcgtaaatatatatatcctctctttcttcttttaaaatgttattctattgatttcgaacttttgaattgatatattttcctctttttgatctctaggtggcgtctaaatggacgagaaagagctaatgaagaatctcttgttttaattatacctttcaacaagtgtttctactttctaacatgcatgacgctttcttacgttgacttgaaatcaattgaaagtttagactcgtgcaaattaac

SEQ ID NO: 177641 - DNA, 1036 bp, Arabidopsis thaliana landsberg
atgcagtgtaccgagaacaaagaactacatgaaaaggtgaatcttctagagcaacgcttgaatgcagtatctagtgagaaatcctctccatcttgttccaataaagcggtatctggagagtatgcagacgaactaaaaaagaaaatacaatcgcaggtaaatttataaacatacattctcagttctcacaagtatcccagtaaatacctctgcggatcaataaatatcaagtaacatagatttatgcatttatttgtaaatctgatcctcccttaatgctaacataaatctcattcttacgtggatgtttatgttttgtatttaggaaattgagaacgaagagttgaagctagaacacgtgcaaatcgtggaagagaacagtgggttacgagtacaaaatcaaaaactagctgaagaagcttcatatgctaaggagttagcctctgcggctgctgttgagctgaaaaatcttgctagcgaagtaacaaaactctcactacaaaacacaaagctagaaaaagaattagcagctgcaagagacttggctcaaacgcgtaaccccatgaacggagttaatcgcaagtataacgatggggcaaggtcaggaagaaagggaaggatttcctcaagtaggtcaagtggagatgagtttgacgcatggaatctagacccagaagatcttaaaatggagttgcaagtaaggaaacaacgagaagtggctcttgagtctgcattggcagagaaagagtttatagaagatgaatacaggaaaaaagcagaagaggcaaagcgaagagaggaagctttagaaaacgatttggcaaacatgtgggtacttgttgccaagttgaagaaagacaatggtgcattgcctgaacccaatggcactgaccctggaagagaattagagaagagtcaaagccatgcggttctgaaagagagacaagtctcgagtgcaccgagacaacctgaagtagtagtagtagctaaaaccgaagagacaccaaaagaggaaccactcgttgctcgtctcaag

SEQ ID NO: 177642 - DNA, 127 bp, Arabidopsis thaliana landsberg
atgctgatcaaggagaatccggctattatcgccctggaagacgggcacacttaccactctgaaaacattaatgacttctggcggccgaacaacttggtcactgccgttgttgacggccactacagcc

SEQ ID NO: 177643 - DNA, 426 bp, Arabidopsis thaliana landsberg
atgctgattgatgaccgccgctcggcggtgtcgctgccggagacgccgctgctcgcggtgctgcccggcaccggcggcctgacgcgcgtcaccgacaagcgcaaggtgcgccgcgaccgcgccgatttcttctgcgccaccgaggagggcctgcgcggcgccaaggcggtggactggaagctggtcgacgaggcggtgccgccgtcgaaatggcaggacgcggtcaaggcgcgcgccgccgaactcgccaagcagtcggatcgtccggcgaatgccaagggcatcacgctgacgccgctcgaccgcaagatcaacgacgcccgcgtgtcctacgcgcatgtcgagatcgagatcgagcgcgacacgtcgatcgccaccatcaccgtcaaggcgccgaatgaagccgcgccttcctcggtcgaagcg

SEQ ID NO: 177644 - DNA, 95 bp, Arabidopsis thaliana landsberg
accttgaaaagggagaaaaaagtgttgctaccgatattgcacttgtggatgatgagaacgagagtcacaaagatgatgatgttcgtgtagtagaa

SEQ ID NO: 177645 - DNA, 704 bp, Arabidopsis thaliana landsberg
atgattacaaatctaaaatctaaatccgagtttaaaagtatgtacttaattatctcaataatccctgcaaaacagtgtttgaattttcagaaaatgagatatgatgtactaaatatatcttctaagcagccgccaagaataaacgtacaaacatacacttccaccagttttggggaattcaaaccaaccaaaagcatatatttaatgtaattaaactactcttgtgattgttggtcgctgtatggtcaaaactatgcatccaatgaaaaatagacctgctagtgaaatggaaccaatccttgctagttagtatcaaatgatgatttgtcaggatcaattatatttatggaattgctagttattgatcatagtttaaagtattggcacttttattctatataaggagatagaacgtggattgctaatgataaatatacttctactaatggagattgtctatgtgcatgaacacgaaatcaggggttggatcctctaaccatttcatcagttttctcatcggcacaattcgttggagagaaagaaatcaatgggaaggattgtttcattctcaagttatcaaccgaccaaatcgatttatcaaaacgcagtgactctaccgctgagatgatcaaacacgtcgcattcggttacttcagccaaaaaagtggcctcttaatttgccttgaagactcttccttaaccag

SEQ ID NO: 177646 - DNA, 396 bp, Arabidopsis thaliana landsberg
atggttttacattttcggcgatgcatcaataatggcatcgccggcaaacagaaaaattattgtccgaccagatttaataaaggaatgacccgcttacggcctgttgattatttttacgactgtgctcgcatcgtcctgctcgcaaaggaacggcctggtgaaggatgggcgcagtgattacaggatattcgtttcatcaaaagcgagtgaacaggaaaaatatgcagctgctgaactgcagaaatatctgttcaggatcagcggctgcatgatggatatcactgatcaggtgactgacgacgcgaagctcatttatgtaggcttggatggcgttccttcgcgcattgtaaagggtctcaaatccacggatttcggcacggaagaatacatcatccg

SEQ ID NO: 177647 - DNA, 461 bp, Arabidopsis thaliana landsberg
atggtgccttctatatttagtggggaaccaactaaagggaagactagccctgagacaatactacggcaacttacaacaaagaagggacaggtattttttgggcatttctcagcttagatgtaaagataagtcgctgactaaaacatcataaactatctgagctgtatttttatgctaaataacacttctgagtgcatcatctgtgtatgaaatcctttggagatcttatttttaattaaggttaatcactctttatggtatcatgtatgtttcttcgtaaaatttggccttaaagtctttatgcatgagcgtctaagtagggcctctacatacacatcttgtctaatctggcttttggtcaatttaggtctacagcatgcttcaagggaagagggatgtagacactgtgctagccatgggaatcatggaagatgttagtattattcctcaacctgcaggag

SEQ ID NO: 177648 - DNA, 194 bp, Arabidopsis thaliana landsberg
atgagaatgtcatcagcttccgccggggaataccggcctttcgccgtaagtctcagcagttacggaggtggtcaacgagatgctgagtctctttttcgcacgaaaccaatgtcggagattcgaattgtggagtcggcgactaggaagaacatcgaggataagaaagaggagcttcggcaactccttgggactag

SEQ ID NO: 177649 - DNA, 263 bp, Arabidopsis thaliana landsberg
gaagtcatggagatgggcatcctacaaacactgatactccattagttgcttggggagctgggattcaatatcccaaaccagcatctggaaatagtcactctgattctgttactacatttgttgacaagcatgcacatgatatgcccacaccttatgactggggccttcgtcgcgttgagagagtagacgtcaaccaagctgacatagcaccccttatggttggactttaccttcatttctcagtcaaacaacttacaatgtga

SEQ ID NO: 177650 - DNA, 2832 bp, Arabidopsis thaliana landsberg
cataaagttcattatcgtgaatagctgctgctgcgtcttcgtctactgggtagtgagatcttgggtgatgaagatgaatattaacaaagcctgcgatctgaaatctatttctgtctttcctcctaatttaaggtgccatctcgcttctctccgtatctctctctttcacaatttgatttgagattacactgcgatttccatcgtttagggtttttgttttgttccgaatctggtttgtgactggagacgagtgtcagtgatctgtatgtggacattgtttttgatctattaccaactaatttatcgcttcccaggagaatccattagggttttggctactgataatgtttactctttggaattagaaggagatcagcagaaccacaagcatctcagcagcttcgatctcaacagtcacagcagtccttctctcagggaccttcttcgtctcagcgtggttgtggtggtttttctcagatgactcagagttctatcgacgaactcctcattaacgatcaggtttgctacttagctatagatcgtctcttcttctgattatcgatttcatatttctgtgcttgcttttcctttttgcacagagatttagttctcaggaaagagatctctctttgaagaaggttagtagttgcttacctccaatcaatcataaacgagaagatagtcagttggtcgcttctagatcttcaagtggtctttcgagaagatggagttctgcttcaattggagagtctaagtgtaagtatgctctttctaaattcacaaattagcgtggggatatgttcctaatttgattcaacttttcttcatttgtcacctagtagctcagatcagtgaagagcttgagcaacggtttgggatgatggagacttctttgagcaggtttggaatgatgttggattcaattcagagtgacatcatgcaagccaatcgaggaactaaagaagtatttcttgaaagtgagttctatgattgtctcattttaaacatttcatatttgaaaatgccaaattcgctctcttctcaaagtatgtagcaaccacataggctagcaactgaacaggggttaggagagtgtattcccttggattctcatttgcttagccaaataggatttgttagcaggggccgtgtcaatctgatcttactcctttaggaatgtgatattgacaatagtaattcacagattgacattgtttgctccaatagatttatcagtttgtttgaagatcaattcacttgaccgtgttgatcacatcttgacaatagtaattcctccatactcattgtgaaggtctcaatagatacttagctggatttatagtttcttctgtttactgcagctgaacgcatacagcaaaagttgactctccaagacacttcacttcagcagctggtaaaatcacttcatttcctgtttctttctcgaccttgtgcaaatggtttaccttactatattgattaattgggaatcagagaaaggaacaagccgattctaaagctagtcttgatggaggtgttaaatttatattggaggaattcagcaaagatcccaatcaggagaagctacagaaaatcttacagatgctaacaactatcccagagcaagtagaaaccgctctgcagaaaatacaaagggaaatctgtcacacgttcaccagagagattcaggtaaaaatattagtgcttcaagaaaatctgtatgtagttatatctatctcagcagagctgtgtgtcatatcggattgcgataaatctttagacttgtctgcacatgtaatctttaattctcactaccaactctcttataggtcttggctagcttgaggacgcctgaaccaagggttcgggttccaacagcaccacaagtgaaggtttgtcctgctttccatgtctttgttctttaagctacatatttcagcaattaatgtagcctttgttaattatcaggctaaggaaaacctgcctgagcagcgtggtcaagcggccaaggtaactctaaattctcaaccttgtagaattataggacatgtaatgctttgattcccactaccaaatctcttataggttttgactagcttgaagatgcctgagccaagagttcaggttccagcagcaccacaagtgagagtctcttgcttttcatgtattttgctctttaagctgcaaatttcagcagttaatgtggctgtttgttaaacaataggctaaggaaaactttcctgagcagcgcggtccagtagccaaggtaactctcactctactgcagtgaatatccctctcctcataattccattttgcttactagctcagctgtcactaacacaagtgtaaaatcaattgcagagcaattccttttgtaatactacactgaaaaccaaacaaccacaatttccgagaaagtaggtcaaacattggtttgctacttctaccctttttttgatataccacagatagattatataaatgcttatcttgcattgacagtccaaatgacgcctcagccagagctgtaaaaccatatttatccccaaagatacaagtgggatgttggaagacggtgaaaccagaaaaaagcaatttcaagaaaagagcaacaaggaagccagtgaaatccgaaagcactcgtacgcaggtactgggttgcattttcgcattggtcagcgataataagaacaaatgttttaacttcatcaaaatctaaggaatgtgcaattcaattcatgcagtttgagcaatgcagtgttgtgatagactccgatgaagaagatattgatggaggtttttcatgcctgatcaacgagaacaccagag

SEQ ID NO: 177651 - DNA, 455 bp, Arabidopsis thaliana landsberg
gaactcgtcaaagaagtcctcgagacagttgagcttgatgacatcaaagattccgtggtgggacttccgggaataagtggtttatctatagaacaacgcaaaaggctgactatagccgtggagcttgttgctaacccttccatcatatttatggatgaacctaccacagggctggacgcaagagccgccgccattgttatgagagctgtcaaaaatgttgctgagactgggagaacggttgtttgcacgatccaccagccgagcatagatatctttgagacatttgatgaggtaagttgttgaaatcattgatttaaccacatagtctaaactttgatcccccaaacagcttcttattcccttaattgcagctgatcctaatgaaaaatgggggacagcttgtctactatggtcctcctggacagaattcaagtaaggttatcgaatacttcgag

SEQ ID NO: 177652 - DNA, 46 bp, Arabidopsis thaliana landsberg
atggcgccaccgtgcgcaagcgcggtcccgctgctcgtattcgcgg

SEQ ID NO: 177653 - DNA, 491 bp, Arabidopsis thaliana landsberg
atgatacacgaagaagaagatcatgaagagagtagttggatagtctactttgaagatattgatcatgatgatgaaatggtagaaactgaaggagaaatgactcattactacgataatgattcatcgatgatctcagacgctgcatctcctgtccataccacaaagattaataatgttgttcgtcgaaaggctaataacattaatacaaaccctaaaaagcgacgaatcattcatcaacacaaagaagaagaagaagaagaactacaaaaaggagaagaagaagaagaagatgaagaagacactgcttcttctccttctaataaaaccaaggttagatatatatgagtgtatcttaatttgtagaattggttttgttgtttttgttaatttttctaacatttttttcttttttttaatagatttttagtgtcttggaccatgctaatgataatacaagatatggaaaaaccatggacaatgttacatccgag

SEQ ID NO: 177654 - DNA, 87 bp, Arabidopsis thaliana landsberg
atggcagacgaaaataccattgctgtggtgataatgaatcctcacaacccgtgtggaaatgtctatacatatgaacatctaaagaaa

SEQ ID NO: 177655 - DNA, 587 bp, Arabidopsis thaliana landsberg
atgaagattgtaaggatagtgaaatcaccttaccttgtcatatgttgccttctcttgatcattctttggttattgtctcatcatgatcataatcatcactcttgtactccatacacgaatactatcagaggaacacaattctcgcatcttcaacctgtaagaacaagattatgatccaattatgatgctttttattcaataacattatatattgataaatttggtatttctggtcataggaatcttcaggcttatcgagtctactaaaagaagcagctacagaagacaagatagtgattattaccatggtcgatcgagaatgggcaaaacctgactctattcttgatctattcctggagagtgtgcggattggagaaagaaccaaacacttgctaaaccatttgatcgttgtggctttagatgatcaagctcttcgatattgtcttcgtgcccacccacattgttaccttcatagatattctagaaaaaaatcagaatctttaaaaccagatggtcttgttaccggttggaacaagaagtctttggttaaagagatcttagaactcggctaccacataatgttcacc

SEQ ID NO: 177656 - DNA, 156 bp, Arabidopsis thaliana landsberg
atgcacaacgtccaatactttttcgaccgttttcgaggaatggtctatcagaccgacccaaaactacttggacaaacacagtctgcgaggaatgttatgccatccggctcatatcgactaaagggcgtatacttcactagctgtcgacatccaggg

SEQ ID NO: 177657 - DNA, 206 bp, Arabidopsis thaliana landsberg
atacgattattaagactgaagatgaaagggaagtaaaaagaatagccttcttctctcaagaacctctagaagaagaagaagaagaagacattgatatgatcgaagaagatacagaaagagaggatcatagagaaaataacgacaagatcatggaagataatgttcttgaagaagagtctgtcgttgacttttatggattcttttga

SEQ ID NO: 177658 - DNA, 78 bp, Arabidopsis thaliana landsberg
aaaaaatggtcaaagaatgcagctggtgaccaactagtgaccatacaacaagaacaaaatctcatggactctatttaa

SEQ ID NO: 177659 - DNA, 260 bp, Arabidopsis thaliana landsberg
atgtagatgtcaagcctaagcagctgcagtatctgttagacaaagttctcccagttcttaaggatatttatacggagcagaaccgtgaactagagattgaatcaacaattagaggtaaggctctttgtcttcacttgtgctatcctcttatttcttcctctttctattctccactcacgaaccttttttattctaggacaccctgtgacagaagctaatatcaagaggtgcaaacttgacccaagcgaacgcatatactg

SEQ ID NO: 177660 - DNA, 419 bp, Arabidopsis thaliana landsberg
atgcaacgtgaatttgatatctcctacaaggtggatataggtcctgtaggcataatcattgatttgtttatgggtcttagaaaacttaaggacgtaagttaaggaattaacttagattccaagtatgcaatattttgtatttagcaactaactaaaacttcatttttcttcaatcgtttttacagggaatgtacatggtccctaagccaaaagatggagcaccaaaacatgcccttacaatcgtagcttatgggatgactaaagaagatgagttgctttttgttgtgcaaaacacatggggtaccatttggggagttaatggcgaaggtaggatgatcatcactgacacttgtcatatgttttatctagatgaagtgattgacgacaaaaagaagaagggaaaggctcctatagcttag

SEQ ID NO: 177661 - DNA, 91 bp, Arabidopsis thaliana landsberg
gtgcacacttgcaggttcattcgagccaaattgagattagaaatccaatactcaactcaaacgaggccagaaaagaaaaaacctagaaaag

SEQ ID NO: 177662 - DNA, 541 bp, Arabidopsis thaliana landsberg
aagggaaagaagttgaaggtgaagcgtcattgagggaggagacgagagatgggttgacagagaagagggaagagattgaggtgacggtggagaaagaaggagtagatcggaaaatgacgtaagcttggcaagttttgttgagaccattacaagagtagccgaaaacagaggttgtgttgtcggaaacagagcaatcagttgttgatattccgacataaggctgttgtgctgttgcgaaggaagagagacttaggaggatgaagacgaggagatgaaatgaaaacgagatcatcgtgattctgtaagatttggttgcgaagtttctgattgggtttataggaatggtgaagaagaaaagtcaactgtttctagtaagtcagctgtttcttggagtaaatgaatattttaggttcattaaattattggaatggataaattattatattcataccattgattttgttttcttttttttttgtgtgattcagaatcatatgaaggctttgaagccgccaaagacgacgtgagagggatgacataa

SEQ ID NO: 177663 - DNA, 129 bp, Arabidopsis thaliana landsberg
atgtggacgagtgcaaagaaaaaacggtgtgccagtgcccagagtgtaaatgtaaaaacacttggggaagttatgaatgcagctgcagcaacggtttgctttacatgcgtgagcacgacacttgcatag

SEQ ID NO: 177664 - DNA, 1813 bp, Arabidopsis thaliana landsberg
atgggctttgttagacctgtttgcatgacaatcctctttcttttgattgtattcgttctttcggcgccgtcctcggccatggaccttcccgccacatccggtggtcacaaccggagcaacgaggaggttgagtttatcttccaaatgtggatgtcgaagcacgggaagacttataccaatgctctcggagagaaggaaaggcgttttcagaacttcaaggacaatctccgtttcatcgaccagcacaatgctaagaacctctcttaccagcttggtttgactcggtttgctgacctaaccgttcaagagtaccgagaccttttccctggaagccctaaaccgaaacgaaggaatctcaaaaccagtcgtaggtacgtgccactcgccggagatcagatcccagagtcagttgactggaggcaagaaggtgcagtgtcggaaattaaagaccaaggcacttgcagtgagtacttttactagtcttcacattcataccctaatattcgtagtcgtacggtgatttatttaggtccgattttttttttttttttcacttaatcaacaaattcttgcctttgtttttcttagataaatttaggttttttttttccgaatatcgaaatttgacttcgtgaccttaattaagtatagtagggtttcatacttatttttggcgtgctagttacttttgttaaattatttgatattttagtatcctttttttatatccaaaacccttctgagagtgtaaatataaaagaggagaacattcgcttgcattttcaatatcagtgttcggtaattttcttttcttatatatatatttttcttttaaaaatttctgttttgtttgaagaattagcaaaacattttaactacttaatgcaactacgtacatgcctttgaaacaatcagattttttttttttttatttagaattttgaaaggcatcacgattagtactttaatatctttttttttttttgtatattaatttaaataaaagacagctgctgggcgttctccacagtggcagcagtagagggattaaacaagattgtgacaggagagttaatctcattgtccgagcaagaattggtcgactgcaaactagtcaacaacggttgttatggatcaggactaatggacacagctttccagttccttatcaataacaatggtcttgattccgaaaaagattatccataccagggcactcaaggctcctgtaaccgcaaacaggttcacctattagtgctgccgtaattaaacactcacatatatgtgcatatatttataagtagctaatttcaatttttgtttttggtacgttggtcgcagtctacctcaaacaaggtcatcacgattgatagctacgaggatgtgccagcgaatgatgagatttccttacaaaaggcggttgctcaccagcccgtgagtgttggcgttgacaaaaaatcccaagaatttatgctctatcgatcggtatctatcataccttataaaattcatttttttgttgcatccaagtatatacaattaataaactcatatggtctatgtttacatgattgatgtcattaagggtatatataatggaccatgcggaacaaatcttgaccatgcacttgttatcgtcgggtacggtagtgagaacggtcaggactattggatcgtgagaaactcatggggaacgacgtggggagatgctggctacattaagattgctcgtaactttgaagatccaaaaggtctctgtggaattgcgatgcttgcttcatatcctattaagaattcggcttccaatgcatga

SEQ ID NO: 177665 - DNA, 1411 bp, Arabidopsis thaliana landsberg
gcatcagttgacatcatgacagtgctttcccgtttaatggagaggctgtcaaattatgctgccttaaatgcgaaagtattaccttatttcctgcaagtgaaagctttctcaaagttgaataatgcaattggaaaggtaacattacttgtagcctgtgagtcctgttacacttttgtttctgtaaaaaagtatgaaagtaatgacagcttagaaatcttgttgactggacttgttagcatcacgaaagacatggagaaggcccaactatttttttgcttgacatttcttttttaagtgaaactcttcactttagacgattccatcaacatctagaaagatgcattgttctttatctgttggatgtatccgctgcaaagagtgaccctaattaacacagttctgcatgtgttcacttcttaaattatgtggttttgacgccttttttcccaatgaattttttttcttaagtgggaatactatgatgttgcaggtgatagaagcacaagaagacatgcctattctgagtgcagtaaccctatattcctcccttctcaagtttactcttcacgttcaccctgatcggcttgattatgcggaccaagtgttggtcagttttcttatagcgactgtatttacctattgttctcttcttaactcaagtttaaatactccgtcttctgtcaatgttgcttagtggcctatcgatctcattatttagattatcttgtcattctattcacattgctgagacattgctaaatttgtgttacttgtgtcaaaagatgccaatctttttatataaaaaaaaacagatttcaggttcatctttgtttatcattcttgtagcggatattggttcaggaatttatgtattattctgttatatgtatgtgcttttttatacatgtttatggtacgctacatttgcagaaaacttcctactacgtatcttatacgaattttttgctggaatagggtacattggatgaaagagtttgaatttaatgttcttcactaactcttcccagggatcatgtgttaagcaactgtccggaaaaggaaagattgatgacactcgtgcaacaaaggagcttgtctcgcttttaagtgctcccttagagaagtataatgatgttgtcaccgcccttaaactaactaactatcccctcgtggtggagtaccttgataccgaaacaaagagaataatggctactgttatagttcgaagcattatgaaaaacaatactcttattactacagcggagaaggtaggatacctttatgccattaccctttgggttgaactatttgtgtggtaaaattgaatttctttgtcttgttttactttggtaggttgaagcattgtttgaactgattaaaggaattatcaacgatttggatgagccgcaag

SEQ ID NO: 177666 - DNA, 688 bp, Arabidopsis thaliana landsberg
atgtggaaggtgaagtagaatacaaacgattcagagaacttacccgaaaaaatccgatcaattttccaatctttcttcgtccatttgtcgttgcgagacctagaaacactgtgagacttgcagagggttcaaatggtgtaggagaaaacacttggggtaaaataagtaataaaataataatacagggtttatattgcaattattgtttttaagatccggtacaaaacggttttatatagtccagtgattccggtttctggtacgccttaccggttattttggtttttgatttaaaagagcagtcttttttgcttcctaggtcggtttcaaatcgttgatctttccgggaaccaccgttaaacccgtggatattagagttgccatcttgacgacacaaagtcgtgttttttcagggcgacgattttcgtttgctcagtggatctgtctcccgccagttcaatacgagaagaatctcgacattgcaatgtttgaaaagagtggaagaaaaaaaagttaccagattgagtggatgtttctcgctctcagaccattggaacccggaaatatcttgtttcgatcaaattggtttctctcaaatcactatagagactacggggagagctgtgcatgcgctttgtgtcaagggattagttcgtctgagtgtgttgcacaccaacactttgattaa

SEQ ID NO: 177667 - DNA, 377 bp, Arabidopsis thaliana landsberg
atggtatttccaattcggattttggttcttttcgcattgctcgccttcccggcatgcgtccacggtgcaatccgcaagtacaccttcaacgtaagtccgcatgatcaatgttatcatcataatatattatatgatttcatcaaggttgtatcattctttttgagtctaaaaatttcttaaataaaagtagtaaaacgtacgtacgtaattatctaaaaataacaggtggtaacgaaacaagtgacgcggatttggtcaacgaaacagatcgttaccgttaacggtaaattcccaggacccacaatctacgctaatgaagacgacacaattctcgttaacgtcgttaacaacgtcaagtataacgtctctatccattg

SEQ ID NO: 177668 - DNA, 229 bp, Arabidopsis thaliana landsberg
atacacagtggcgtattcatcgaattttagtgagattttggatccgatcatcgagaacaattaccagttgttcatggtggagaggttgataatgatgggtgcaaagacattcttcaaaacatttagagagtacgaaaccgatctcactttgactgatgatccgaaaaagaacaagaactgggaaataccagtttacaccatggatgaaggcaaagaagcagcaagctaa

SEQ ID NO: 177669 - DNA, 171 bp, Arabidopsis thaliana landsberg
tctttcaagcagatgatcgccagttgtctagttaaagacccttccaaacgcccgtctgcaaaaaagttgttaaagcactcctttttcaagcaagcaagatcaagcgattacattgcacgaaaacttctggatgggttaccagatcttgttaatcgtgttcaggcaataaag

SEQ ID NO: 177670 - DNA, 187 bp, Arabidopsis thaliana landsberg
tgcctccgaacccatagcatctgcccgtaagcttgccagtaagctttcccagaataagtacggccctgggaagtggaagcggacgcgcgttgctgaggatcatctggaaatattgaccgaacgacgttgtatccgaatccacatagcttgtcaagaagactcgagaagattaactcatttgatatga

SEQ ID NO: 177671 - DNA, 56 bp, Arabidopsis thaliana landsberg
catgctaggaatgaagatgtgggactgagttttggagggatttgggtcaatgtgca

SEQ ID NO: 177672 - DNA, 482 bp, Arabidopsis thaliana landsberg
atggtggctggagaaagagccgaacttcgcggtttgaatctggagggacttagacgaaatggatttaccatgtcagaggtttgtactctgtccaatgttgagtcttttgaagtaagaaacagaatatcactttggagtgttacaaaagaccatgtcttgtttcttggcattggtagatgaagagcctaagagcagcctatcgtaagatattcatgtctactgaaacagtctccttaagttttgaagagcgtctcacggagctggtacgtgtaatcaatgaaaactcacttcactgtcttcttccctgtggatctagtgcataaacatctaaacatattatatctgatgtaattcaggaacaggaccaagagctgtacagtgttcctgcagtatcggcaatgttgcagtcaatccgagattctttcactgaaagtcgccgtgggatatgcaagttcagacaatggctcgattccacaacttag

SEQ ID NO: 177673 - DNA, 298 bp, Arabidopsis thaliana landsberg
atgggagattatatgcaaatgtctagagagtttgttgattacgctagagggaatccgttagctctcagagtgttgggtaaagatcttcgtgggaaaggtgaggctcaatggaaagcgtggcttgatacatcggctaaatgccccaacaagattattcaaaatcagttgatgatcagttatgatgaacttagtcaacaagagaaagacgcgttccttgacattgcgtgtttcttcagatcagaggatgagtattatgcaagaagcttactggattcgggcgatcatgagtccttccaag

SEQ ID NO: 177674 - DNA, 947 bp, Arabidopsis thaliana landsberg
atgggctcaaaaggtgggttttctttcgacgaaaaaatcaatgtgggtttgcagttttctgtacaaaatcatgactctaaaatataatgctctttttatgttaggtatatacaatactgtcgagcaaggtgtcatccccgtctctcaaaagacgctgatgagaacctgcagcggaaatatgtcacaatcagaatagtaaatgtcatttacattagatttgacaataagatggttaaaaaacagagttggtctcagtataaaattttcggctaaacaggattgaagagacgtgcacatgaaacaggagaggctgctccgatacctatcacagtgagacaactcgaagctattgtcagactgagtgagtcacttgcaaaaatgagactgtaagtaatcttattaacatagagattcctgattcctgaaacctgatgggatgtgccgtgcattgacattgttaaatatgtcaggtcacacgaggccacaccagatgatgtagacaaagcttttaaactttttgatacctcgacaatggatgcagcaagatcagggataaatcaacagataaacataacaggcgagatggccaatgaaatcaaggttagttgcttgtggggaagaaagaatcatcgtatctctagatgtaataactaaatttggtattggtgtgaaaaaacagcaagcggaaacacagataaagagaagaatggggatcggagctcgattatcagagagaagactgatagaggatctggctagaatgggaatgaacgattcaatggtacctaagctaacatctttgttgtttaattttcagtaatgtgaatgggatttttgaggtaatgtgcatgttaaaatggcaggtgaggagagctttgttgataatgcaccagagaggtgaagttgagtaccagcgagagagacgttctattgtccgcaaagcttga

SEQ ID NO: 177675 - DNA, 207 bp, Arabidopsis thaliana landsberg
actagtagtgaccgtgaaattattttactactcgaccgtgaccgtgaaaatagcttttggactgaaaagtttgcaagaattgatgaagtgatacaaaatttgaatcaattcatgtcagaagtgttcggatacaaaaacttagatgaaaaatcaacgatcgctgcgtgccacaaattacgtggaaacgtcttcaaaaatacactttaa

SEQ ID NO: 177676 - DNA, 3452 bp, Arabidopsis thaliana landsberg
atggagctctgtgttatcagcacgacgacgacggtgaaagcaattaatccgtttcttccgtctattacacgtcgtgttagttcccgtctcttccaatctgatagtgtgctacagtttggtgggaggttgaagagaccaattagcagtcctttggagatgtcctgtgtatctagaaattttggatttctcggagattctatgtcacatggtggtgattttaggctattcgcggcggcttctccagcggttgaaactagtgtaaaggaagacaaacttccagctgatcttaaggtcaccgagactgtacaggcgaattcaagtgtaagtgatttcaattcttttgtctatttgttttaggagaatatgtgtggcattgtacttggtctgatttttaagatgacctgaaatttgatgttactgtttgatttaggtgaaattgagtgtggaagttccagcaattgtttgtgaagattgttaccaacgagtccttacagaattcatgaaactctcgaaggtaaactaatattcatcttacatgaagacgaaatgttgaaacttgatctatgtaatgcttgctgttgattgtgattttacttggtttgaatcaggtgcctggattccgtcctaaaacaagagttccagagaatattattgttggtttcgttgggaggcaatatgttctgagagcaactgttgaatctatcttaaagagaacacttcctcacgccatggaatcagtaagttttcaaatgtttatattagtttgtttatgtttttcaatcttccgcggtttaatataatgttttggccatttggcaagaacaagtcttgtggtgtatctaaattcggtgtttcttgtcttggaacattatgcatatgagattttggtttttgtaggtgactggaagggctttaaaagactcgatacaaatagtaagcagctttccagatatggagaaggcttattctaagctcaagactcttaggtttttgtttcatcatcacatatactaaaaatcttttggagtaatgatgctaactaacttaacatgttttttttttctgattttctcttgttccttagttatgaggtggttgttgatgttgtacctgaactaaaatggaatcctgaggatgggtataaaaatatgaaggtcgttgtagaactaggcgatgagatagatgcaaaaaaagcttgtgaaagacaactaagacagaaatataagtctcttggtgcgttgaagattgtaaccgagcgagggctacaggtaaaggaatgcataaactccccatgtccttgcattgttttctgaaactagtgtggttttctttcgtggttcatttgaaatcatttaaggttgctaattgctgagttaaaataggaccgaccttttacctcgttagtcgttacatttaagttcatccactatagcttattatagatttaagttttttttaaataatttggctatgaatctggcttcatttgttcgtagttaactctgcaaagatgatatagttgctagaattgcttttttattatgtcctaaaaccgtgtaggtgggagatctagcagttgttgatatttctgctacaactatagatgaggacgggtcaacgggtcaagcgattccagatgctgaaagcaaaggttttagaactgttatatttcaacagagatttgtggttgaaatctcttagtccattgaaatcattgcttgcaaatgaatactgagattggcggttgtgtgaacaggttttcactttgacactgaagaagggaatagattacttcctggattccttgatgcaatcataggaattcgagcaggcgaatcaaagtcattcacgcttgtgtttcctgaatcatggaaacaagaaagtctacgtggccaacgtgctcagttcactgtgagctcgacttcctatataccaaacatagaaaaagatgattacagagagatcatatttgggacagctaattgtgtatgttttcttaaggttgactgcaaggaacttttctacagagatttaccaacattagatgactcactcgctgataaattacttcctggatgcaccactttaaaggaggtaatgaacacatgaattttattttcaacaacttatacaatttctttttttgtcttatatcagtgtaattcgctaatgaaacaagtaaacaggttgaagaaactctggctaaaagatgtcaagagatggagcagcaagccaaggagcaagcgacagacaacgccattcttgagcagattcgaaaggtcatcatctaattccatatatcatttgaagcattaacatcgtttacctaacatcatttgcttcttttgttttagatggttgaagtagagattcctcgatctttatttgaggaacaaggaagacagttttatggagctaggcttctagagattcaggcaagtgttttcagtgactgttgttgatctcttactctcttttactgtcactcagattcttaaggttgaatatggtgctgcagggaaacatgaagcttaacgaagaccagttggcttctctttcaagtcaaaaagcagtaaatgagtttctagaaactcaaagagagagcatcaccaacataatcaagcagaatatagctgttggagatatcttcaagcgcgaaaacttagaggtatatttatatgcatgatactctgtctccaagaaagaaacaatacatttttagtaacaaaaacattgtcgaaatacttgaatgcagttctcaacagatgaactagttaaagaggtcgaaaactcgatctcagaattcaagaaacataaacaagagttcgacgaggagcgtgtgaaagatcaggttagttctcttgtgaatctaagcactatcagtttcttgagcctatataagataactgaaagagagaggttcttcttgaattggtggttggttaggtacaagagattttagaaggagcaaaagtgcttgaatggttaaaagaccgagccgagattcaatacatcactcgttgattagcatataggtaatgtatgtatgattggcatgttctgtttttgtatgagcaatttggttttgatgtacaattatgattgattttgtcacaagaagagaactttgactatatttgaattgataggtgcaataaattattaacagaaacgttgctttttattttgtaatttaggtcactttctgattctatagtcaatgtgttttattggatatagatggtatagatataagtatttacgtcgatttcatattgaatttgccaactaacattgagtcattttgactatgacttgttttttatttcgacaaaaaaaaaaaaagagtctcttcgtcttttctagtttggttctatatggactaatcttccctctgacctcatcacttttgctacttgtcttagctgtatttacgaactacttcctcatga

SEQ ID NO: 177677 - DNA, 110 bp, Arabidopsis thaliana landsberg
ttggaactccagctgcagttgatcctccgccggaggtcgagtttctggcggtcgatgcacgtctctcttctttcttgaatcggattccacacgcattacacaacgactga

SEQ ID NO: 177678 - DNA, 1274 bp, Arabidopsis thaliana landsberg
taatctcagagcgaataatcgtgtttcaccttcttcttgtcaaattacacgaacaaatcgctcatgggcattaccagtttcctttaaagttgagaaatttcaactccaacgaggaaggaggaaaagaggatcaccatgttttggggagagcgaagggttggtcaaaaatgggattggtgatgctgatgggattataattgttgatcacggttctcgtcgccgtgaatccaatcttatgcttggtaatagctttgtttctcttccttctccttcttcattttctttgttgtccttactttattgtatagtatacttcctttacggctttaccttgtgcgagtttatgtaattgtgttgttgtttctgtatttcagaggagtttgtgaaaatgttcaaagacaaaactggttacccaattgtagagcctgctcatatggtaactctttctaatgttctcacctttatgcatagtgagaaccatacccatgagtttgatacagtctgatttccgtttcttggtcatcttttgcatttagcttaatatgttctatatcaggaaattagatgactttcaagctctgcttgctgtttgctgatttttacactttacatcaggaattggctgagccatctataaaagatgcattcagtttgtgtgtacaacaaggggcgaaacgtgtagttgtgagcccgttttttctatttcctggaagacattggcatacggtatggctttgttcatctcaatttgttttgttttcttgaagcttctagcttttcttatttatgggattattggaggatgtacattaatggcctagtgagatcatgacccttatttgattcaggacattccctcgttgacggctgatgctgcaaaggagttctctggcatctcatacctcataactgcacctctcggcccccataatctcctcctggtaagttataaagcatattttccccccaaaacgagcgagcactttaaacctaagggatgtgagagcatcctcatgcattagtgaatgccacttttttcccttgaacttccaatgagagcatcctcatgcattagggatcttctgctgtttaatcttcacaagagatctgttcttcttttggctcttgatctttcagtaatctactaatatttctttctgcaggacgttgtaaatgacagaatccaacattgcttgagccatgttgaaggtgatgctgacgagtgtcttgtttgtgctggaacaaataagtgcaagctctacaatagttcttag

SEQ ID NO: 177679 - DNA, 202 bp, Arabidopsis thaliana landsberg
gtcttataatatagcaatcgggacggagacgacaccggtggcatatgggaatgtagccaatgtacccatccaagttatcacaggaactcctgaagaaaataacctcgctgatattaatttgagttctagaaaggtcgcccccagagttacatctgaatccagtggccttattgatattcccgtaacaatatccaccattccg

SEQ ID NO: 177680 - DNA, 171 bp, Arabidopsis thaliana landsberg
gttaagtcctcgactgttaattatggactggcaaaaaagaaagcagtaagaaaaaaagaaaaaaaaaaagaaaaaagtcaacgagagaggtttgacttacattaccgttcagaaagcaaagcaaagcgtggaggagacaaagaaaatagtagtcgttccaaatccctttaa

SEQ ID NO: 177681 - DNA, 88 bp, Arabidopsis thaliana landsberg
atgaaccaagatttggagctgcaccaaaaggacacaccaaggattgagtacttagatgcttacattggtgcggtgctcaaagctgtag

SEQ ID NO: 177682 - DNA, 332 bp, Arabidopsis thaliana landsberg
atgaacaaagagcctccccatagaatgggatcggcgttgaggatcgctgccagcccgtcgcacggtaggtgcagcagcacgctgctctcataagcagtttagacataagggatcggcggctcggcagcacgcggacgatcgcaaggatttcgtgcggcccctgcaggctcagcacgaatttcttgcccgccgccgatgcgcggctgacctcgacctcgcccgcagcgatgacgaacgcctcgcgccgatcgggatcgcgcgcgaagatttcggcgccgcgcggataggactccgcccgcgcgatcgccgcgaccccggcgagccgcgcctcg

SEQ ID NO: 177683 - DNA, 310 bp, Arabidopsis thaliana landsberg
gctcataaccacagttttcaccattattgacacacatatagagaaagatacactcttgacagagttgaatttgagtgttcttcctgatctgcatggccactttgttaagctaactgaatatgtggtaagccttgtagccataccatgttcaacatctcatcacccttggcgcgaattcaggagaataactgaaattagccttcttgcaacagctgcaaaacaaagacaaggacaagattcagattgttaatgtcttgctgaaaatattagaaatggtgacaaaagacatactaaaggaagaggtttcaag

SEQ ID NO: 177684 - DNA, 78 bp, Arabidopsis thaliana landsberg
atgaaattgaagaatcctcgaacgagccgccataaaggaaagtttgcgacgaaaacaaatttgcctgaagaagattgg

SEQ ID NO: 177685 - DNA, 402 bp, Arabidopsis thaliana landsberg
atgggcgtgtttaatgaacgcgagctcgaagcacgccacgagatcgagctggaccgttatatgctcaagatccagatcgaaggccggatgatcgagaacctggcactgacccatattgtgcccactgcagtaaaataccagcagcaactggccgccaatgtcgaatcaatgagaacaattcttggtgattccttaaaaaaaaccatggcccctaccattaaaatgctggaagaagtggccgagcataccaaccagatcattgtgctggtagatgaaatggtagaagaacgtaaaaaggccaataacctgagtgatgcccacaaacgtaagctcgcatattgcgataaggtcaaaccttattttgatcgcattcgctaccatgccgacaagctggaattgatg

SEQ ID NO: 177686 - DNA, 110 bp, Arabidopsis thaliana landsberg
atggaactcactattgacgctgagaagtactcttatagcgaatgcagagaggacctaaagccacgggagttctctctggctgagaacaacctcaccgtgcggacagtcag

SEQ ID NO: 177687 - DNA, 1090 bp, Arabidopsis thaliana landsberg
atggattcatcaatccaactctattctcattcggttctacatatctcaaactgtgttacagtccaactaaatgaaagaaattaccttctttggaagatacagtttgaatcctttctctctggccaaagtctcctggggtttgtcaatggtgctattaaacctcctccagtcgccaacactctgactcacattgatggtctcaccacagaggttccgaacccagactatcaagcatggctgaggtcggatcaggtggtgcgagcttggttactaggatctctgtctgaagatattctgcgggaggttgtgcacaccaccactgctcaggaagtttggaccagtctagctcaacattttaataaggtatcttcttctcgtctttttgagctgcaaaggaaactgcaagttatagagaagttagataaatcaatggatgattatgttaaggagatcaagagaatctgtgaacaacttgcatctattggtaatccggttagtgagaaaatgaagatttttgctgcattacatggcctaggaagagattatgaaccaatcaagacttctatagaaggatctatggacttacatcctccacctactttcgagtctgtgattcctaggttgactggttttgctgatagaatggctggatacaatgctggaaatgaggtgtctccccacttggcattcaacattaccactactaatggttcccattactatagtagccaaggtcctggaaatggaaagcctgtaaacaacaacaaagggagatcaaattttacaacaaaaggaagaggctttcaccagcaaatctcatcatgttcttcaggaggtgacagaataatatgtcagatatgtggcaaacctggacatcctgctctgaaatgctggcaccacttcaacaacagctaccaacacgaggaactgccaagtgctctagctgcgttaaggattacagatgttacagagactcctggtcatgattggtttactgattcggctgcaacagctcatgtcacaaactcagctaataggcttcggcagtctcagccttactcaggatctgatgcagtaatggttggtaatg

SEQ ID NO: 177688 - DNA, 66 bp, Arabidopsis thaliana landsberg
atgaaggatcttgacacggacacgccaattcgttttgaaaggcttgacatcactaagatacgttaa

SEQ ID NO: 177689 - DNA, 350 bp, Arabidopsis thaliana landsberg
gcttcaacaggccttggggtaggattgcattatgataagcgccaaaagcttcggtgtcttgtacgcggaaaaaaagagtttcctgtaagagctgataagcgtgtaacctttaatattaaagggcggtgtgatattgatcaggacttaaatcaggttcgatgtttttttcttggtctcgggaactttctttgaagttatgtttcttccttgtgtattatccctaacggaactgtcatcattttgtgctaacagaagaaccccaaaggagcagcagaatttgcctggaacataatggatttcaaggaagatcaggatgtacggatcaaagttggctacgaaatgtttataag

SEQ ID NO: 177690 - DNA, 790 bp, Arabidopsis thaliana landsberg
atgaataactacggttatggcgccggaaaatgtaaggatgatagtgattggattggtttgttgagatcacataagcttgtgcaagttactctgtttcagaaacctattgtgaagatcaaattggttgatttgattgaagctacgagcggttttgattccgggaatatcgttgtttcgtcgagaagtggtgtctcgtacaaagctgatttgcctgatgggtctacattggaggttaagaggcttagtagttgttgtgagcttagtgagaaacagtttaggtctgagattaacaagttaggtcagatcaggcatccgaatttggttccgcttctcgggttttgcgttgtggaagacgagatattgttggtgtataagcatatggctaatgggacgttgtattctcagctgcagcaatgggatattgattggccaactcgggttagagtcgctgttggagcggctagagggctagcttggttgcaccatggatgtcaaccgttgtatatgcatcaatatatcagctcaaatgtgattcttcttgacgaagatttcgatgctcgtgttattgattacggtttggggaacttagtgagtctcaagactctaaagatagctcgtttagtacggcaagtttggttacgttgcgcctcagtattcaagcactatggttgcgtctttgagtggacatgtgtatgggtttgggattgtgcttcttgagattgttacaggacaaaagcctgttttgattaacaacggtgaagaagggtttaaggagagtttagtggagtgg

SEQ ID NO: 177691 - DNA, 131 bp, Arabidopsis thaliana landsberg
attcaatcaaggatacaattccaacacattgccgtcgtagagcccacgaagcccgttgtttgctaacccatacatgtagcaagctgaccggcctggccaaaaccggtttcgataggcctaatactatttga

SEQ ID NO: 177692 - DNA, 240 bp, Arabidopsis thaliana landsberg
  unsure (1)..(240): unsure at all n locations
atgtggcagtatttctggacgtcgaattccggcgacacgacctactacaagggttcgctggtcgagccgnnnnnnnnnnnnnnnnnnnccacctacccgcgtccgcagggcgagcgcctggagcactggagcctgatcgcccagccggacggcaccgtgcaggaattggcccggaccaccgaggacggcggcgagacctggcgcacggcctacgacctgcgctggcgcaagcatcaataa

SEQ ID NO: 177693 - DNA, 245 bp, Arabidopsis thaliana landsberg
atgtttttgaaataagcgaagaagattgtcaagaggaagagaaggtgatagagacattacaactctttccggtgaattcatttgaagactccaactccaaggtggacaaaatgagagctagaggcaataaccagtaccgtgaatatattcgagagaccaccacgacgtcgttttctccatactcatcatgtggagctgaaatggaacatccaccgccattagatcttcgattaagctttctttaa

SEQ ID NO: 177694 - DNA, 34 bp, Arabidopsis thaliana landsberg
atgattcagagagaaagtgaggcagccacggctg

SEQ ID NO: 177695 - DNA, 1259 bp, Arabidopsis thaliana landsberg
atgttcttctcttttctccttgtctctgctcctatcttcctcgccgtcgccgatgctctcctcccttccgctctcctccaccgcttctcttcgccggcgactctctcttctcatctcaccaactacgatttccgtcactccctcatcgatattcctttaatctcaatcattagatccgctgttatactctgtgagtaaaaaaaagattcaaactttacaaaacccaaaaaaaaaacagagcaattgctctgtttgctctgtttctgaagaaatcgaaaactcatttctttagtttgatttttcgtgtaaacaggtgtttatggactctgtgacggaccaaaactatcgagaggaccgtatctgacaataacaatgatttgttcaatatcttctctaatctacgtttcgttaaaagctgcgtttgtgttcggtgagccagcgatcggagacggaggaggaaactacttcagagcggcggaagtggctctgtttctatgctcgtcagtcttagccataggtcacatcgttgtggcttatcgaacaagttgtagagaaagaaaaaagcttctcgtcttcaaaatcgacattgaagccgtaagtccacttctccatcttctttttttccgccgttacagaaatttattattttattatatttgattgataatcgatgtagggccaataataccaagttgcatttactttttttcaaatctaggaatgaattagatttttaacctgcaatgggtcagagtcagagatagcatgtgaatgtatattagtcaatgttgaatattaaacacatttttacacatttggtccttttgtgattctagaaactcgatgagatttgtctttccgatatgtttggttaggaaaagactctacttggtgagaaggttttcaaatgaaactaagagaaaacaaaattgaagtttggattggaaaactttcttatagagttatagttttgttttgtaggttagaatttcatgtggaaaccgtgtggcatgtaacctaattttcttagtcattttataataagataatatccgacatgacacgtcacacctcacgcatgcatgcttcatgattgttttcatggaggcaaaaccatcaaacctctttcttcgttatagttattatcaccaatgggaaaactaatgtgttttgattgatccatttttcaggtttcggcttgtaaaaacgtgtacccgagataccaaaagatcttattacaacaagagagactcaaatag

SEQ ID NO: 177696 - DNA, 51 bp, Arabidopsis thaliana landsberg
atgaacgaagcgggcggagcgacggtgcggcgggtgctgctggcgagcctg

SEQ ID NO: 177697 - DNA, 158 bp, Arabidopsis thaliana landsberg
gcaatccgcggccgtactcgatgccacccttcgcgcagaagctgagcgatgccgacgttgcggccgaggtcagctatatccgccatgcgtggtcgaatgatgcgccggcggtgcatcagcgcgacgtgttcaagtaccggcatacgccgatcgagtga

SEQ ID NO: 177698 - DNA, 350 bp, Arabidopsis thaliana landsberg
tgtataaagacctgtattctgcctatggcggcgagcttgactggttctatgcagggcgcggcatttacacgtattccaatgagctgtggacaccctacctgatgttcatgaaagacaataaccgggaagccaatgccacgtacaactttgacagatacctcctgttccaggatgcgtttgtgccctggaaggaatttgatcatccgcaatatggcaagatcgagataggagggttcaagaaaaatttcggaaggccgcaccctggcttcctgctggagtcggatgcacaccgcaatatggctttcagcatttaccattgctattccactcccaaactttccgtgcaggag

SEQ ID NO: 177699 - DNA, 189 bp, Arabidopsis thaliana landsberg
ggctttggaggcccgatgcaactggctgtgacgatgcccgtacaggaggtagatcgacaaccccagcagcgtccacaaacccatcagcatccagttgtaaccgctttcctgggccagcagaaacacgcagctgatgacgcccagcgggctgatgatccagatccacggcacgcggaacgtgcgcggcag

SEQ ID NO: 177700 - DNA, 81 bp, Arabidopsis thaliana landsberg
atgccggtggaggtagagagagaccaaggagaggtgtcggtgaaggttgattttgagaatgcgactgagattaaaccggag

SEQ ID NO: 177701 - DNA, 127 bp, Arabidopsis thaliana landsberg
ctccaatgctcgatttatgaagatcgtcatgtcgtcgtcgaatgatttggttgctgatcgatcgaagcttttgccggtcttacctccgccggtggtggaagattccgtcggtggcatctcggtataa

SEQ ID NO: 177702 - DNA, 42 bp, Arabidopsis thaliana landsberg
atggagaagaagcttagtgtaaatcttgatcttttaaataag

SEQ ID NO: 177703 - DNA, 142 bp, Arabidopsis thaliana landsberg
gctttactggtttaaacgtaatgggtacggttacggttgcgggagtttgcggaaacgggcggttgcagtttcaagcgttatcaagcgttctgaacgactggttgagcgtttgataatggatgcgtttgcgagagttttatga

SEQ ID NO: 177704 - DNA, 556 bp, Arabidopsis thaliana landsberg
atggagcattttggttacaatacaagaaaatgtcatatggtgacacattctgttgactctgatcttcaagttgaggtttctgaacttggatcacctccaacttcagttgatggtaatgactctgattatgaaagatctctgtttgtttatgaatcggagatgggaaaagaaatgggttataagggtgtggaatctgaagtcttacttgtggggaaagatgatcaagatcaaaatgaaacaacttctttagcttctccagaaaatgaagaagcaagaaacttggagtccacggttcctcaatcggattccgctttcttcaaaagagatgaggttagttcatgtttttttttgaagtcatgaaaatggtataaatgtttagacattgaacataatctttgcaaatttttgtcaggagttgaaggaactttccgagaactcagctgatgagataaagataagttatgactctgacgaacatgaaccatccgagaggacgactgatcaagaatttgaagaaccttatgagagaaatgatggagaagaaaggcaacaactc

SEQ ID NO: 177705 - DNA, 85 bp, Arabidopsis thaliana landsberg
gcctggccggcttgatcgtcttcttttgtgcgactttccttccccaccagaacgattagagattcttacagttctttctagaaag

SEQ ID NO: 177706 - DNA, 133 bp, Arabidopsis thaliana landsberg
atgggtctgtatatctcaagcagactcctcgcccgcgtcagcggcaaaggcgcgtcccatggcgtcatcaccagcagcaccaaccagatggccgctattgactcgcggaaagtgtcgcaccaccactcaaaag

SEQ ID NO: 177707 - DNA, 921 bp, Arabidopsis thaliana landsberg
gactagccacaccaaaatttgtagtggatgatactaagagaaccaatgataacctaagccaagaggtcgttaagctaagatctcaggtatatttctcttatctccaaaatccttcccacattctttgctgcaaaaagatgtagttggtgagattatgctttgtttcctgtcacggccaagtacgttctggattttactttgtggtgaaatcatgctatttgtaggattggagaaggcttggccgccaatttacttgtgttccttatgaaacatttacttctttttgaaatttaaatactgcttcagttagtcagtttctctctatgattgcttctttgctaaccagtaattgatattacaaggttgaaagtcttacaaggaaggcccagcttcaagaagttgttctggaaagaacaaccaagcagctaaaagaggcgttggcaatagctaatgaagaaacgacaagatgcaaggcagcaaaagaagtgatcaaatcacttaccgctcaagtaatttcctagtttaaaataaaaatatggtttatgcaattattggtgatttcttatactgattttaacacatcaacataactatgcagttaaaagacatggccgaaagattacccgttggatcagctcggactgtgaagtctcctccttctcttaactcatttggttccagccctggtcgcattgacccttttaatatcttaaaccaagcaaatagccaagaatccgagccaaatggcatcacgaccccaatgttttctaatgggaccatgacacctgcatttgggaatggtgaagcaacgaatgaagcacggaacgagaaggaatgggttgaacaagatgaacctggtgtctatatcactcttacagccttagccggaggtgctagagatctcaaacgcgtccgtttcag

SEQ ID NO: 177708 - DNA, 534 bp, Arabidopsis thaliana landsberg
  unsure (1)..(534): unsure at all n locations
atgttgagtcagactgttttacaagaaaataaagtcccggtctacacagtattacaggtttgatatacaaggatatagttcattgatgagattatttcattgtnnnnnnnnnnnnnnnnnnnnnnnnnnnnnnnngtgattaatagttagtaactttcctcctaaaatcacagagattttttagttttccaacataatcattctactttttctcactgctaggagccaggaaacttcgtgatcacatttccaaaatcctttcatgctggattcaattttggtatgccaactctaattcaagttatagcactatagcagtcatgaatcatgtgagtgttcaatcaattgcgttagggagtttggttaccaatgtctttgtgcatattttgtcttccaggtctaaattgtgcagaggccgtcaactttgctactgctgattggctaccttatggtggttctggggcggagctgtatcggctgtaccggaaaccttcagtcatatctcatgaagagcttctctgcgtggtagctaag

SEQ ID NO: 177709 - DNA, 3068 bp, Arabidopsis thaliana landsberg
atggcgatgaaaaggagaatcatcgacaaaatcctcgagaatcgtgtctctctcatcgtcggcgagcctggatgcggtacctgcgctcgccttcttctttctcttattctatttttcttccttcgttccgagacgacttactctagttagtaatctgcatttccgttggggtttttgtttttgttttgtcgtcttcgtcattttgattacagaaatgctccgttggggtttcttcctgtatgacaccagattttgaatgttttctgtgagtggatagtccatttgattcgtttctatcttaacgcgttaaacggaaatagtacaagttgggccatatttagcttccctgcgcctttgaactgttgtgattgttatggatagctggattttcgactcatgtcatacgtagtgtggttacttacttgtccttctttgcttcagggaagagttcacaagttccacagttccttctggaagcaaacatggctcccattttgtgtacacagcctaggagatttgcggttgtagctgttgctaagatggttgctaaatctcgcaactccgatttaggtggagaaattggttaccacattgggcattctaagattttgaccgaagggtaactatcattatcttcttgacttatagaacaatatctcctttcagtttcttctactgtgtccgagttttcaggacaatatttggctttttcccccttattgatgacttttatgcaattatcctgttgcatgcaggtcgaaaattctgttcaaaactgctggagttctgttggatgaaatgctagacaaggggttgaatgcactaaagtacaaggttatcattcttgatgaagtgcatgaaagatctgtggagtcagatcttgttcttgtctgtgttaagcagtttctcatgaagaataatgacctcaggttataacccttttctacaacatgatgtaattactttaaggttcttaaattgtttcgcgtggttgtgtttgctgatagaagataagtcagttttatactattccgattcattacttcaaccgtgttatcatcgataacgtttgtattgaggtcatggttattaaagaggtgatttgattaattacagggtggtcttgatgtctgcaactgctgatataacaaggtacagagactactttaaagaactaggcaggggtgaacgcgtagaagtagttgctattcctagccctgaccagagaacaattttccagcgaagagtattatatcttgagcaggttaaacttttttagatttgttgctctttatgaaactatattattatccaattgattttcttcttttctgacggcaagtatttccaagctaattaatatgacactgtttgtgaagcaggttgcaggattgcttggtgtgagttctgatttgtcagcttactgtcctggtccaagtccttcttcagctgatactgaaatcaaacctgaactgcaaaatcttattcatgatcttatcttatatattcatgaaaaagaaccagacattgagaagagtattttggttttccttccgacatactactcccttgagcagcagtatcatcaattggaacccttttttgcatcttttgaggttcacatattgcaccgaagcattgacaccgagcgagccttggcggctatgaagatatgcagatcccgccgcaaggtttctcttttacctttccatgtttctttgtccttgagagatgagcattattattggggggacatcaaactcgtattgatgcaatgagttgcaactaccattttgtgacgtcatagttatataaattttccaaaatactgttctcaggtaatattggctacaaacattgcggaatcttcggtaacaatacccaaagtagcatatgtcattgactcgtgccggtctctgcaagtgttctgggatccgtccagaaaaagagacgcagtacagcttgtttgggtctctagatctcaggtattgctagaatttaccatttatggaataatagtggatgactggatgttctaaatttagcttcttatgtgggttataggctgagcaacgtatagggaggacaggtcgaacatgtgatggtgaggtgtatcgcctggtgccgagtgcattttttaacaagcttgaagaacatgagcccccatctatacttaagctgtcattgagacaacaagttctccatatttgctgcacggaatccagagccattaatgacgcaaatggtaataatattataattgtgtagagaatgtttaacttcttttataatagaagatgtcaaacttgggttacctgtgaaatagtaaggacagtcgggtttgctaggtcttctgctactgcataagtacctatcacatgagttcctgtttggtgcgaagatccttagatgaagctaaatgcttatggtgggagtattctttcattattcttaaaaattgggtgcatatatgctttagaaatacaatagatcgaatctataagatagtgtccaaaatgttattgtgtctatctaatcagactccgtcagttgaactgagtgttattatattctataacttagcattgctggcaaaagctatggatccaccagacccagatgtcgttgacgatgcattaaggatgctgttaagcatacaagcattgcggaaatcgcctaggggacgttacgagcccacattttatggacggttgcttgctagcttcccattgtcctttgatgcatctattctggtcgtcaagtttggtgaaatgggaatgctaagacaagggattctattaggtgtcctgatggataccctaccacttcctatccatcatccttttggagatgattcactggtatgtcctattggtgaatttatctacagttctacacgtctttttgatcatgatgttaatcatctacttcacctttgtcttcttttacagtttctagagtatgttgaccactattttggtggcagcaagaccatttctggtgggcggagggagatggtactcatggcaaacttttgtgcttttcagttttggcaacgtgtctttaag

SEQ ID NO: 177710 - DNA, 491 bp, Arabidopsis thaliana landsberg
atgccatttgccagtaactcggtaagaacaactttgaccgcttgttatcatgtgaaataataatatcttgttgatagtcgttacgtacatttttacaaaacattataaatcacaggtaaacaaaaaatatgcagaaatattgttatcctttgagtcaatagagaacgtatttacatagttttttccacgacgacacatttaactaatcaacgtcgttttcagaagtcttagctgtatatgaatggcagagagctcacacgcgtggaaatgggtttgtctacatgtttacgtacaaaacaaattcttaattattttctttgtttgtagctttgtgtagttcgtacatcgtcgaaacctcagtttctaaacaatttatttgacaaacaagctttagcccgtgcgggaagttttgtacgtgagaaagaagcctcgagaatgaataaaactacgataagattgattcaacttcagatttccaaccccataactag

SEQ ID NO: 177711 - DNA, 441 bp, Arabidopsis thaliana landsberg
atggtatgttacttacatttttcatatataatgattgtttactattgattaaatatatttttattgctttatctaagcaacaacaagaaccactggatgattcacatggatatttacaacaatctgatcaacatgatttattaaatccaaacatgctgtattgttatcaagagccagacgtgtctacaatagtaagttatagatttcatttgtctttttgattttcagtatttctttttttttgaacatatacattcatgagctagatagaatactatatgctattgccaatgacaatatcttaatcactaaattcattttatttcacctaaacagcagcagcaacaacaactcaatttacctggacctttagaacaatctgatctacaacgtttattaaattcaaatatgatgtattctgagccagatttttctacatcg

SEQ ID NO: 177712 - DNA, 225 bp, Arabidopsis thaliana landsberg
atgtccttctcggtgcaggtgccgcaggctttcggcggccagccgctcgaatggtgcggcagcaacctggccagcgtcttcgcgcagccggccaacctgatgcgaccgcgcttctggcgcatgctgggcgaggtgctgcgcttcatccgcctggccacgcgcatcgccgaatcggccgccgacggcgatatgcgccaaccgctcgcgaagttcctgcgcgcgcac

SEQ ID NO: 177713 - DNA, 307 bp, Arabidopsis thaliana landsberg
cctcagcgtgccgacgcgcttatccgcctacaacattagcgcggatgccattcctgccctgctggcgcagcttgaaagtcatggcatggtcaaactcggtgagcatcaggatgtgacgctggataagagcagggaagtgctggaagcgagtatttagatttttagtagggtggataagcgtgatagcgcgtatccaccattttcgtgttttatttttttattaggagcaatcatgagcaagaagttagccctgtacgcccgtctgctcgccaagccccgcaaggaagcagcactagaagcattataa

SEQ ID NO: 177714 - DNA, 161 bp, Arabidopsis thaliana landsberg
atggaagaagaccaggtcaacttgaaaccgctctgtttcggttccaggcgcagtataacataacgtttcaagtgtttggacctaatggtagtaaaatacataatgaacaacgaaccgattggactacatgtgagtggtcagagaaattgaagcaggagtaa

SEQ ID NO: 177715 - DNA, 133 bp, Arabidopsis thaliana landsberg
atcattacaacgacaatagatcaaataaaactaaagaatattaccaaaaaagaagaagaagaaaaaaaagatcaaagatctatgaagtcatttgtacacgtacgatctacctcttcatatagtcaacatcacg

SEQ ID NO: 177716 - DNA, 836 bp, Arabidopsis thaliana landsberg
atatttccaccaatatcagagcactcgcaatcgcagatacaatgttagaagaattgcctaaattaattaggctttggtatcggcttcggtttctcagtatatatggcagtgtcagagatccacatgttggtcgtgcagatatcgagaaaattccagattggattaaagatctccatgggttaatatctctgcagatatttggatgtccaaaacttagatcactgccagagctccctggctcactcgaaacactaatagctaacacttgtgaatcattggagacactagtatcttttccaactgactctcaacttgtggaactttatttccccaactgcttcaaattgggtcaagaagcacgaaaagtaattactcaacagtcatccacggcatgcctaccccgaagaacaatacctgcggagttccatcatcgagctataggaaattccttgacattccgcccaggttcatttgggtttaggatatgcgtcgtggtttcccctaaaccagagatggaagaacatattactcattactcgatgtctcgcatatgcataaacggtgtcccgactgatcaactcatacttacgggtctttgtgaaatccaaggggaacatctatgtataactcaaattgatttgtctgacgaagatcgatggcttgaaccggagaaagagatattgttggaaatcatcaccacacaccaagaagtcgacattattgaatgtggtgtccagatcttgacggatgaaacttacataacaataagaagctacgactctagaccagaacaagcctctgaagacgacgatgaaatatctctgatggagcaatga

SEQ ID NO: 177717 - DNA, 240 bp, Arabidopsis thaliana landsberg
ggagctgattcgatggatgaatttctcaagttggaaggtatgtgtttgagaatcaaagctatcgcagaagcaataatggaaaaggaaaagtttttgatgcttgataccccaaatacctactctatgcttgaggcgtcattgaaacaaatcaaagaattgaagacaggaggaggaagaagcatgaggaagcaagatggaggaagtggcagaatgcgaaagcagagtcacgaaaccgagatg

SEQ ID NO: 177718 - DNA, 251 bp, Arabidopsis thaliana landsberg
atgagcgaggaaaccgagaggctgcagagagtaaaagatgcgaggataaaaactgttaagctagccccggatgggaggtcattgattaaacccgatctaatgagcactaacagttttccagtcattggagacaacgggctgagctgcatgaggaagggttgtctgccttcacgagcaatctatgatcctctggcaccggttgatccggccaaactgcagaatcttaaggcttatttgtcaagtcccgactg

SEQ ID NO: 177719 - DNA, 352 bp, Arabidopsis thaliana landsberg
atgcagttatatattgtagacacagaaaatgaagttgataacagatcggaagcactcaggtgactgcattccttatagtgttactaatgtttttttatataacattgatgttgttttaatattggttactgttctaaatttgacttatttgattcttatcagtaatggtgctaatgctgacaagtataaaaagaaagagttgagaaaggaaattattgatgttgtgatcaaattgctgaatagtgtcaacccttacgtatcacacttacggactgctagggacaggttcaatgctaatccagaacagactttgcatatgagaatagttagtaaacgggaagcggatggcaag

SEQ ID NO: 177720 - DNA, 54 bp, Arabidopsis thaliana landsberg
atggcggacgattgctcggtagtgcaaaatgttgagttgctggcggaacaacag

SEQ ID NO: 177721 - DNA, 252 bp, Arabidopsis thaliana landsberg
atcggaaaaatttatcgatgtaagaagaaaaaaggagtgggaggagaagggcacgtggagagagggggtgaagatcatgagagagccgacaaagagcatctctttaactcatcggagtttgtgtttatctctcccaacagttcatgcgatgcctctgcctctcttatcttcttgttcatttcttttaccctctctttctctctcactcgtggttttggaattgtcagcgacatcttcgcgctttcttgttaa

SEQ ID NO: 177722 - DNA, 128 bp, Arabidopsis thaliana landsberg
gccctaccagatgatctaaagaacaagcttagcttagatgaggatttggtgtctagttcaagccctaaggaagcactcttacgagcgtctgcagatagagtagccatgagaaataagaacctcaaaag

SEQ ID NO: 177723 - DNA, 30 bp, Arabidopsis thaliana landsberg
gattcctcggcttgtccgagtgtcagaaat

SEQ ID NO: 177724 - DNA, 321 bp, Arabidopsis thaliana landsberg
atgaaggcctgggaccgcaaatggggcctccactcgaccgagacctcgctggccgtgttctggggcgaagcgatgtgggccaagaccgcgccagccgccaaggcggcggggatcagcccctacgactacatggccgaccggctggcgccggccgataagctggccgccctggcagaggcgtcggaccgcctgacgaccgacttcggatcgtggaggacgccctggggccagatcaaccgctttcagcgcaacgacggcgccatcgtccagaccttcgacgattcaaagcccagcatcccggagagccttcacctcggacca

SEQ ID NO: 177725 - DNA, 105 bp, Arabidopsis thaliana landsberg
gccctaaaacccaaaccggatcgacaagttttgtttgagattaaccggatcggattcgaaaaaaaacacggatctgagtcatggaaatctccaatgaaaagttag

SEQ ID NO: 177726 - DNA, 484 bp, Arabidopsis thaliana landsberg
cttcaccgagaaatcattatcaggtaatttctagggttactctcctatattaggttgatctctttcaccttatgttttgtttgcctttggatacaaaccactgttatgtagtgtgaatttacttccatttacagtctataaatgggattgtatgtgaatttcaaatcagggtctataacttagattgtttgattgaattaagttcgattttccttcggtttatagtgtataaatgagtatgtatgtgaatttttgaaatagggtttataactgagaatctgagattgattttctgatttttttttttttttaaaaattctcatatcatgtctgaaactgaggatgcttacgagtataaaatctgataatctgccaaggtgttttattttatagatggactctacaaacccgaatgaaaaatatggaaatgatcatgcctttgatgagggaatctaaactgaagagtgtcactctcctggaaaat

SEQ ID NO: 177727 - DNA, 227 bp, Arabidopsis thaliana landsberg
gagtttaagaacgcaatgagagaagatacggttgacttcaccatctattcaacaaacgtcaagagaaaacgcccaacgccaaggaaaacttcaagatctgctaaaaaaacagtggcctacaacgaagatgatgatgatgacgacaatgatgacagaggatggcatggaggaggaggaagaggagctgctcggagactaaattacagcacccaagccagcaacagaag

SEQ ID NO: 177728 - DNA, 71 bp, Arabidopsis thaliana landsberg
aactgtcgaatcatcggaggacggtgtgggatcatcccacggtcaattacttgaccgatgttgatgtttga

SEQ ID NO: 177729 - DNA, 272 bp, Arabidopsis thaliana landsberg
atgtcgggcacgttggtaagacatcggagtactaccggtaagaaggtgtgccttttctacgtacgcagaatgttggctacggtgaactggtgctcgatgacctcaagttcattacgcaggattctcatgagtcgctgaagaagtcgcagattaagtccggtgacgttctggtcactcgtgtggtcaccgatgaaatgaagggcggaatagttcctaccgagcttgggcgggccaattgtgcaaacgtgattcttattctgcccaaaacctga

SEQ ID NO: 177730 - DNA, 141 bp, Arabidopsis thaliana landsberg
ctagatcgagaagaagatcgggacgaccaacgtcactgcgacgagagaagaaacagcgaggctgaatctcattctgggcttgaagccaatcaattgctccgatttgctggtcaattggaacctgcaccaaatccaaattag

SEQ ID NO: 177731 - DNA, 519 bp, Arabidopsis thaliana landsberg
atgctcgcggtagcgcacatagagctgcgcgtccgccggaagctgggaagcgccggtcctcgtcagacgacacccgcgccgcacgatgcgcatatggaagaacagcgcgaagaagaaagcccaccgctcgcgccgcaggcagtgccggagcggtaccgtcaccactccagcggggatcgaaaaaagcccgcgcctcgcgacgcgggttcgggaaatgcgcggctgctgccgcgctggaggagatcattggcgagcggctatgcatcgagccggctgcgccgctatgtgcaggtgcgcgatgacgcgcgctgaaaccggagctcccggtgctacgctgactgccaccacgcgaaacagcgcagcaccgggagatggaaatggacagcgacatcatggcgagcccaccagccggcgaacctgcgcagaagaatcagactcagcctttaacagtgattcttaaaagcttcgaagcgcttgcagcgctgacgcccccacttgggaagcgcctgctcaacatac

SEQ ID NO: 177732 - DNA, 62 bp, Arabidopsis thaliana landsberg
atgcaagagacgaacaatcatccacccatgatttgtcttgtacaacagcatcaaaatatttg

SEQ ID NO: 177733 - DNA, 78 bp, Arabidopsis thaliana landsberg
atgaaccggaccgacgtccacggcggtgaagtttgcgccgcgctggtgtcggcgctgatctcaccacatggcccccag

SEQ ID NO: 177734 - DNA, 206 bp, Arabidopsis thaliana landsberg
acgccgtctttgtttgcatactccgtaacgccgtcagcatcaagattcagctcacggcgagcatcggttcatgttatcggtttggttctccggtttataactatggttctatgtttcgtctctgctctttcgttggcagtgaatgttcaacggccttcgaagagacatctgacacaaaactcctcgagttttgcttcatatcctga

SEQ ID NO: 177735 - DNA, 108 bp, Arabidopsis thaliana landsberg
ttagttacgtcattcactcgtgtggatcagcttggattccaagacgtagcgcatcacgttcgctggcggctggtcgcttggttttggcatccacagatacataaaaag

SEQ ID NO: 177736 - DNA, 143 bp, Arabidopsis thaliana landsberg
attgtaatcttgctgacggagagtacatcctcgtgccggagcaaggagctgctcaggaggtagccccagatccagcaccagagccaactcaggaggacctgcctgccactgctttggaaggcaagccccggttttatgcataa

SEQ ID NO: 177737 - DNA, 425 bp, Arabidopsis thaliana landsberg
atgatggaaatagcttatcagcctcggattgattccgagattgaatcactcgtcgagagaatcaatcctcccaggttagtaccttattaatatttttatcattatgttggatattttttttttaataaagtagtattattcttgatattactggttttgtgcgctaattagggtttgtgtagacaacgactctgacccagagtgcacacttattaaggttataaaaagctcttgataatatgctttttaattataagttcatagataatgactaattagccttaattaaacatgtggttgatatatgtaggtagatagcgcgaacaagtacgggatattactggacatggttcaagtgttagccgatcttgatctcgttatctccaaatgttacatctcatctgatggcgaatggttcatggatg

SEQ ID NO: 177738 - DNA, 180 bp, Arabidopsis thaliana landsberg
aacttgaatctcgacaatggcgaagatgacggtgaatgtgatgatgacaatggagatgatctcactagtctattaaactcagcatcagaggatgactcaaacaaactcgagatctcttcttttctaccattacaagactccattagcaatggagttaaaggaggcgtgaacaacgaatga

SEQ ID NO: 177739 - DNA, 76 bp, Arabidopsis thaliana landsberg
atggcgaatatagccaggaaagggcttccaggaactacattcatcgtgaatgccaagctacggcttgtggaccgag

SEQ ID NO: 177740 - DNA, 126 bp, Arabidopsis thaliana landsberg
tttattattggtgatgggaataatctctatgatttcacttacgttgagaatgttgctcatgcccatgtatgtgctgagcgtgctctagcttcaggaggagatgtttctacaaaagctgcaggacag

SEQ ID NO: 177741 - DNA, 473 bp, Arabidopsis thaliana landsberg
ggtttttgactcaaagcttgagactttggagagttggtcacacacacacagatccattacacggcgaggtttgcagatggaacgttgtttgacagtagctataagcgtgcaagaccacttactatgcgaattggagtcggcaaggtacaacaaagaaccattgtctctctctctctttgttagcttccatagtcttcaattgcattgctagcaaagttcacacttgtctttgttgaagttagttagtttcttatgttcttctttgtgattagggtgagcaaaacaactatatatctaaactcttgatgtccaaaaatgatcaggtaattaggggactagaccaggggattcttggaggcgaaggagtacctcctatgcgagtaggcaagtgtactgtattttcctttgttcaatgtcctttatttggctgataacatattggtgcggttttattttgcaggcggaaagcgtaa

SEQ ID NO: 177742 - DNA, 114 bp, Arabidopsis thaliana landsberg
tttaaaggatgttgcgtggacttggacaaaggcaaagaagtgatcatggagatcaacacctcaaagcaagacattagaagattcattgatgactgtaggaacggtgacgcctaa

SEQ ID NO: 177743 - DNA, 123 bp, Arabidopsis thaliana landsberg
ataatccctgaagacttcttctcagagtatatcgaaggaagaagcgtcgcagagctgaaattggacttttcagacaaatcttgggaagtgaagttgtctgatcggagaatcactgacggctgg

SEQ ID NO: 177744 - DNA, 396 bp, Arabidopsis thaliana landsberg
gaactctatgaagcagaggagacacatgatcctctcatgctgcactctattgatatgggctggtttgtacttgataagtactatgctttatctggggagtcacctatctatgcaactgccctcctcctcgatccgtcgaagcgagcgcgataccttaatatgcactggaaggaagaatgggcggagactgccattagggacgcacgtacaatctgggaggaagaatacaagatggcgcccgccctcggacctgcccaggcgctgagcgaagcgtctaggtcgcagcaaggacagccaaacgagcttgatcggcttctgaacgagattatggtcgctgaggacataatcagggacgtagatgccctccccaactttatccacgcccagccaatatag

SEQ ID NO: 177745 - DNA, 121 bp, Arabidopsis thaliana landsberg
ccgacttacgtgttcatgaattctttaagacatcatatttcaagaaagggatccatcctcttccaggtgcccataagactcttcacaagctatcaaaatattgcgacatgtcagttgtgac

SEQ ID NO: 177746 - DNA, 122 bp, Arabidopsis thaliana landsberg
aaaaactccaaaacgacaacaaaatagtggggctcattcattttgatgaattgcgtcttataaagctccacgtcgcattaaaatcagcgatatgtcagattcagaagaatacagaggtctag

SEQ ID NO: 177747 - DNA, 381 bp, Arabidopsis thaliana landsberg
gttacaaaagcctcagtagattaagaaacctggagattctggatctctcttcacatagattcaacaacagcatctttccttttcttaatgccgctacatcccttacaactctttttcttacgtacaacaacatgcatagcccatttcttgttaaaggtgtgtttctccatttttaactaattagtaataactagcgagacctatttactgatgatcgatgtaccttttgttagatcgaatcagtttattttgctataactttatatttctaaatttcaattttatatatgttgaacttcctttcagaattcaaagatttaacaaatttggaacatctagacttgcgtggaaacagatttaatggctccataccaacacaag

SEQ ID NO: 177748 - DNA, 501 bp, Arabidopsis thaliana landsberg
atggctggggggtcaaagaggtctaaaagagcaagacttgacagtgaatcggaagacataagcgaccaagaaaaccttaaggtatgtttatgttgcttttgtctcgtttaagttatttagatggtataggtgaatttatttggtcgagggttctctatattataggccgaaagcgacaatgaagatgatcaattacctgatgggatagaggatgatgaagtagatagcatggaagatgatgagggagagagtgaggaagacgatgaaggagataccgaggaagatgatgaaggagatatcgaggaagatgatgcaggagataacaaggaagacgaggatggagaaagcgaggactttgaagatggaaatgataaagagagtgagagtggcgatgaaggtaatgatgacagtaaagatgctcagatggaagagcttgagaaagagggcaaggagcttccttcacaagagcactgcgattccattcgaactaatctgttctaa

SEQ ID NO: 177749 - DNA, 458 bp, Arabidopsis thaliana landsberg
atccatatcctttagacaactcaaggagcttgcaatgataaaagctagcttcttgtctcttaaatcttcggtttcagggaaactcattttccctttcaaagttgtttctcggaaagctacagacttgcttcttcaactggattcaattcaggtattaaactctttgtgaatccttagaatgttctgtttatttagtttctcagatctttgatttagtatcattttgtctctgttagggtaggattgatccaatgataagaagtagtaagagatcattgagcagagatttggtgaggtttgtgcaatatgttgatgattgtgttgttaaaaggtatggttttgttgttaagtctggtagtggcatcaaacttaatggcaaaaagcctcagggttttggtacttctagtgaggatgaagataacaatgcagacatgagtgatgatagtgaagaagttcca

SEQ ID NO: 177750 - DNA, 281 bp, Arabidopsis thaliana landsberg
  unsure (1)..(281): unsure at all n locations
atgaacatgatggcattgatggtaaatatatatttttttgccaactctatataccttacaatttcctaattatcccggtggaaactatccttagtcctaaatnatgtgtttttgtcttcttttagatggagaggatatttaaagaaacagcagcggcgaatgagagacaaatgaatatgatgaaagactttatggaaatttcaataataggaaatgatgctcatcgtaaaagagctgaagagaagcaggcagagaagaaacaagaatgcaacatcctgtga

SEQ ID NO: 177751 - DNA, 297 bp, Arabidopsis thaliana landsberg
atataccatcagcatctaaatctgttggcactgttactaaagcaactggttctaaatctgcagcaaaaggtttctgaatgtcctattgatgatgcatcaccagattcacaatctcctcacacacaatctaaggtaaatgttttcaatagtttatgaaattgcttctgtttggatatattttcttacgtttttttcttgcaaacatggcagcctatcaatcaagttggttccaaggaaaataaaaagtgcttgttgatgaacattgccagaaagaaacgggttgttgtcgaaggatga

SEQ ID NO: 177752 - DNA, 428 bp, Arabidopsis thaliana landsberg
atgccatgtgaggtctacgagattagtagaaaattatcgtctgcgacgcggcgtggggattacgagaaatgtggggtgattattgagaagattaagaagttaggggatgagagtgagaaaaatcgaaagtgtgttaatgaaaacagcgtcggatgggttctttgtgattgtttcgacaagttctcgggagatgagaaattaacgtttatgttgaatgagattttgtctttgctgacgtggatgtttccgattggtttagagggtatttcgaaactcgcgtctgcgacatcatttcgttgcgtggcgggtttgttgaagagtacggatgattccgttcgtcaaaacgccgcgtttattatgaaggagattctctcattagacgaaacgcgagttcacgcgtttgcggttgagaacggagtcgccgaagc

SEQ ID NO: 177753 - DNA, 91 bp, Arabidopsis thaliana landsberg
atgctggatcttacaagacagaacaggaagcaagatgtctttagggaggacttacggttaatagttcttaaagaaaaactcaaaggagccc

SEQ ID NO: 177754 - DNA, 156 bp, Arabidopsis thaliana landsberg
ggttctgctcccatagccggtctttctgatacttcatctgacagtgaggagtcagaaacagaacagaaagatgttttcgatttgtctaacttggagagtgtatatgtaaccggtgtgcttgatgaactcaaaatatgtttcagttatggtcatcag

SEQ ID NO: 177755 - DNA, 199 bp, Arabidopsis thaliana landsberg
atggtgctaaggtacggacttggtattgccatcctggtctatttttttgaagaaaacgacttccattgggggctgctgaaggacctcatggttccccagatgttgctggtgctcttggtcttgaagttcgtggtctactttctggtgagccttcggtggcgccgtattctcaaggagctgtcggtggaggccaccattg

SEQ ID NO: 177756 - DNA, 460 bp, Arabidopsis thaliana landsberg
cctttatcaaggctatgcgcagtctcggtcgcccatccgcatccacgaccacgtgtcatcgcagtaccatccgccccgccgaaaaccctgggaagacgcccccggcggcgtggacgtgctgctggatgccgcgaccatccgcaagacctttccctcctgcgcgcaggacatcgccacggtcatccacatccgtcgcgccggatccatcagcgcgcagcagatggggcagttcatgctcgagcagatgcgtgcccgaggcgggcatctgattcgcgccaaggtgcagggggtgaatgtgggcgcccggtatggcctggaactcgaacacgcgcaggggcgccggaccctcatggccgatcgggtggtcaatgccgccggccccttcctcaaggacgtcggacagatgctggggtgcgatctgccggtgaaatcggtcttccagcagaaaatcgccttttga

SEQ ID NO: 177757 - DNA, 1332 bp, Arabidopsis thaliana landsberg
atgcagcatcgctcttcaggatttgtacatttttacatttcaataaattcagcagcaaaagattattatgtaagtgtaacttttttgcatatacatatacacacaaagtctaatagagattagagaatatattcgtaccgtggaagccaccaaacgaaccagcaagagaacggtgaagctaacggagttgaggttccttgccatttctctaaggctttgcgtttagtaagacttcgttttttgctctttcaatttaataaactttacttcgatgagacaaatccatatgtgtagtgatctatttatagtcaaaattctggtagatttgttgtaattgtttaatctctccctcttttctttaaagttttcccttactgagcaagttcataatgtcgccacaattgtgtattgccgccagtttttataacattttattttccattagtgggatcttcttcttatcacggacttgttttaaataatcaagcaaagggaaagtttttgttgtttttatcgttgtaactcattttgtatacccatttttagtttagtttaatcaactattgtttgaaaaatgataaagttgttgtctttgacagagtgagcacgaatcttggcaactttttaatcataaaataaaaatgatttggcttcattagttcattaataaagtttagggtttcagcagcattgcagttatcatggcgacactatctcgtttttttagcatttccgtagtatgtgttaacttctatgcatgtcaaaacgaaatagcaagggatttgttttcacagaacctacaaaatctcgtatgccttttatcttaagtttcatattgattgtatttatttttctggcaaggtaaactaatcacctattttatctctagttaataaaaagttttttggacacaaaggtgcaagtttagtctctagttatttataggctctttccgacggacgaaatcgtcggaataacgtcggaaacagccgtattcgacgactttttgacgatatagatggtcgagactatctcgtcggaaatctgaatgtcgtcgcaaacgtgttacaaattaccgacgggtttccgacgagatatttcccgataatttctctatgcttttctgacgataacattggttgcgaaactggttggaacatagtcggaaatgatcgtcggatcctcgtcggaaataatttccgactattttctaacgaatattgttgtcaggcattgcatcagaacgttgttaaaaatcggtcggtatcttcttcgacggtttcccgacaatgttattcccgatggattcccgacgaagtatttcagacgtga

SEQ ID NO: 177758 - DNA, 1400 bp, Arabidopsis thaliana landsberg
atggcggaaggtgaagagtcaaagaagatgaatttacagacaagttacttcgacgtcgttggaatctgctgttcatcggaggtttctatcgtaggtaacgttctccgtccacttgacggcgttaaagaattctcagtcatcgttccttctagaaccgtcatcgttgtccacgatacttttttgatttctccacttcaaatcggtaagtaacagaaactgttatttttcaatcgacgttttgactttcgtcttgaatcattggtctattgatgaggcaaaggtttacgttttcttaaagtcaattaaacccttttttttgttgttgtgtgtaaaattgatttcttgacagtcaaggctctgaatcaagcaagactagaagcaagtgttagaccatacggagaaacaagcttgaagagtcaatggccaagccctttcgcaatagtttctggtgtactgctagttctctccttcttcaaatacttttatagtccgcttgaatggctcgctattgttgccgtggtggaaaagtttaaccattcttgctaaagctgttgcttcagtcacaaggttcaggcttgacatcaacgctctcactctaattgctggtaaaatacaaatccttttccctgagcatcagcttatgttttgtttgatgaggtaaatgaatctgatttggttaattttgttcaacagtgatagcaacgctatgtatgcaggatttcacagaagctgctacaattgtgtttttattctcagttgcagattggcttgagtctagtgctgctcataaggttacttaatctagggtttctgtttcttgatgattttaaacagtcatagtcatacaaaaatgtgaaaatcagttctggttttcattaattctatcagttgatcattgttctgaagtaacaattgttttcaggcaagcatagtaatgtcatcactgatgagcttagcgccacgaaaggcagtgatcgcggatactggactagaagttgatgttgatgaggttgggatcaacaccgttgtttcagttaaagctggagaaagtataccgatcgatggagttgtggtggatggaagctgtgatgtggatgagaaaacattgacaggagaatcattccctgtctccaaacagagagagtcaactgttatggctgcaaccataaatcttaatggtacaaaacaatatcattctcttgctcttctaaagtatgatcctaaagttttcagctcattgccacaattttgtgtatgctaaggttatataaaggtgaaaactacagctctagcccgggactgcgtggttgcgaaaatgactaagcttgtagaagaagctcaaaaaagccaaaccaaaactcaaaggtttatagacaaatgctctcgctactacactccag

SEQ ID NO: 177759 - DNA, 230 bp, Arabidopsis thaliana landsberg
actttgttctcgcgtttccaactttcaagcttgaggacaagctgattttcgacaaagagagtattgatacggttcatcagacttactacaggaagcggtcaatgccacgttggatccagtcaacagatgagaaagacactgaaggaattagagtgtttgctgaagaagagaaggaagagaaagactctgttccagagggaggctttgctgttacgactgaagatgcttaa

SEQ ID NO: 177760 - DNA, 911 bp, Arabidopsis thaliana landsberg
atggctgaaaattcatggacgacagaggagaacgagatgttcaaggatgcactggtgatgttcactgcctttttgcttactcggtttgagagtgtcgccgagtatgtggatagatcggtggatgatgttaaggagcattacaaggaattggtcaatgatcttttagagatgggatccagtcgagtagcttttcctaatgaattgactaaggatatggctcaaagttcgtaccaggccgagagaactatatggaccaaagaaacacatgagtaagtatataagattaatgagtgatgagttatgatttttgttagttagtggaatttacatacacgtataagtttcaattataaacataatgattgattagtactggtattggtttgtggatctagctagacgcattctcctcttagactccataattcacatagttcatttctgagattaaaatgtatttagtcctatgatcttacgatttacacattctagcattatttttttaatgtggacaatatagtttttttttttttttcatttgactcaattcatatcgttaactaataatgccatggtgaagcttgattaaaatgggctgatctatgaactggtggaaattgtaatgcagatggtttctgattgggttagaccgatttgggaaagattggcgtaaaatagccgtcttattggattgcaagagcccgatccaagtcgagatatatgcagaaaacttttaccagtggcaaagctcaaagaaaaatgtgattaacgacttaaatgtggcaagcaccgatgtgaatgtgatgaaacggcagggagcaaataacaccaatgtggactcaacaggccaacaagagagtctcgtcgctctggaaatcggtcaccatgctaaggcccccaactcaaagtga

SEQ ID NO: 177761 - DNA, 539 bp, Arabidopsis thaliana landsberg
atggcttgggagcggattgacacttgtgagattatagaaactcgagaaatcatccgcaaaggacgaaaggttggtcacggtcataagactttgtgatgttaaaaaaggagtcgatgtgttgaatctcgcaggagcaaaggctacccaaaggagagcaaaaacaacgatacaaaggactatgttgatgtagtcgaaggaggctatgaccaaaccatctacgtcccaaaatcacaaaaattgtttccaccaatattgaaaaattatagtattcacatgtttcttactgcatgaaaaaggttaattctttttcttatcctatgtaaattttaacatgttctaattttaaatcagaaaaatcctctcaaagtttaactattagttacaattcttagttctccttatttaacttttcgaatcatattaacacagtttttgtaacataatttttttctctttagcttttttttttacaggtgaagatttttgtcatgtgtcaaaagctgatcatgaattggagagaaatagtgataattccttga

SEQ ID NO: 177762 - DNA, 389 bp, Arabidopsis thaliana landsberg
atgcccggtatagacccaaatataatttgtcacgagctaaacgtagacccgagtttcaaaccggtaaaacaaaaaagaagaaaactcggagcggagagaggaaaagcagtgaacgaagaagtggataaactcctaaagattggatctataagggaggtacaatatccgaattgggtagcaaacaccgttgtggtcaaaaagaagaatggaaaggatagagtgtgcattaactttacagatctcaacaaagcttgtccaaaagatagtttcccactttcacacatagatcgtcttgtggaatcaaccgccggaaatgagttgttgtcctttatggatgtcttctcgggatataaccaaatcatgatgaaaccaaaagatcaagagaaaac

SEQ ID NO: 177763 - DNA, 87 bp, Arabidopsis thaliana landsberg
agaaatggaaactcctgtgggtttaagattctgtccgaccgacgaggagatcgtcgtcgattacctttggccgaaaaattccgatag

SEQ ID NO: 177764 - DNA, 156 bp, Arabidopsis thaliana landsberg
atggactactgcgtggtgaagatcccccgctggaccttcgaaaaattccccgacgccgacgagaccctcaccacccagatgaagtccgtcggcgaagccatgtccatcggccgtaccttcaaggaagcccttcaaaaaggcatcccaagcatggaa

SEQ ID NO: 177765 - DNA, 327 bp, Arabidopsis thaliana landsberg
atggttcttacagaggctgagattgaagccgaattggatcgtctcatggaagcaccggaagtagatgaagagcaagtgaaggtaaatgttttttctggtatttttgaaacttctaatgtttttattctatgtagaacacattagttaaacctttgtaaaatctaggatttggagaagagaatgatcgagttcactaaaacaaaccgaggtatagatcccaagtatatgaagacaattgaatatctaaagatggataaacgactcaaatctatgatcaaagttacaggaacttctattgtgaagcagaagtcttcctcttcatcttaa

SEQ ID NO: 177766 - DNA, 77 bp, Arabidopsis thaliana landsberg
atggttccaagttttaagggcaaaaccattggtcagcaaaatccaacctttaaacccagaagtttccaataccggag

SEQ ID NO: 177767 - DNA, 127 bp, Arabidopsis thaliana landsberg
agtccgtgaagctcgcccacgcagcaccccggcaaccgtgcccacgccgttcgccgtcatccgttcacccaaggttgaagagaaccaaaaccatttgaattcatttttgaaatcatgtttgaattaa

SEQ ID NO: 177768 - DNA, 478 bp, Arabidopsis thaliana landsberg
atgctatatacataccctcacgtttcatcttccgtcccttataatcactgtcttccaaatgattgtaagtttgtaacatttttttttcttacgaaaactagcgataagataaagaaagttgaaagattttcaaaagatgcagtttctagtttaaaaaaaaaatcataatgactccaatgcatatcttctgaagcatgagaataacaaacaaatactgcttacccaacaagcaattctgcaacatactttatcctttgtgtgttgtacagatgcttcatggaatgatccgaattcaagggcaggaataggatgggttctacttaatgtgcaaggaaatgaaggaaaaactgaacaagtatactccgaggcttttcatccgttgaccctgctaattcagttcttgatgcagaggtcaatgcgtttagagctgatcttttccatctcagacgtcttaattacaacaatgtcatcttctgtg

SEQ ID NO: 177769 - DNA, 4 bp, Arabidopsis thaliana landsberg
atgg

SEQ ID NO: 177770 - DNA, 938 bp, Arabidopsis thaliana landsberg
atgacgagtctcttgaagtcatcgcctggacgacgccgtggaggcgatgtggagtctgggaagagtgaacacgcagactctgatagcgacactttctacatcccatcgaagaatgcttctattgagcggcttcaacagtggagagtaagacctagatccttcttaagtctgatgttgtttcatattgtgagataagaatgcttgtttatctgtgtttgagctaacagtgaattgtgtttattacagaaagctgcactggttctcaatgcgtcccggagattccggtacaccttggacttgaagaaggagcaagaaacgagggaaatgagacagaagatcagaagtcatgctcatgctcttttggtaactttatttggaagctggttaatcatgtctttatcatgagattgtgtaaattactgattagcgtcttctatttctttattaggcggcgaatcgttttatggatatgggacgtgagtcaggtaattttggctaactgtgtactttggtgttgtgcattatctggttctgaatgtggagaagaaagtctttttgtataaacttgttgatgtggtcttttttttttctcacttcaggagttgaaaaaacaactgggcctgcaactccggctggtgattttggaattactcctgaacagcttgtgataatgtcaaaggatcacaacagtggtgccctggagcaatatggaggggtaagttttcagtcatgaaacatgcttatgtctgttttcttatagtcgttctctaattatcttattggtatgcgtgtatttcttgcatcagactcaaggattggccaatttgctcaagacaaatccagagaaaggtatcagtggcgatgatgatgacttgctaaagcgcaagaccatttatggatcaaacacatatcctcgcaagaaagggaaagggtttctg

SEQ ID NO: 177771 - DNA, 205 bp, Arabidopsis thaliana landsberg
atgagcggccaacctaaggaagaagatatcaatgatatctttgattcattccgtccccagatcgatgagcacattggcaagtggctgcccagaaaattcactcaggagtctatgactgagctctgcggtcccgcccactatgcgtacgatcttgagagtgccaccaacgctctattggtgcctacttgggatattctcgatagag

SEQ ID NO: 177772 - DNA, 80 bp, Arabidopsis thaliana landsberg
gtcatagatctgtttccggtgcatttgatatgtcattgttggaaatcgatccggatcatcctcaagttcaagagtgtcga

SEQ ID NO: 177773 - DNA, 106 bp, Arabidopsis thaliana landsberg
atggtgctggagatcctcataaatacccgtagggttattgaaatgggcaaaaacatgcatgtaaaatggtattacgaggaggaagatgagaacatgatggagaaag

SEQ ID NO: 177774 - DNA, 155 bp, Arabidopsis thaliana landsberg
tccaccctcctgttatcggagcgttcgtgtcgtcttgtggaggccagatctgcaagcctacgccaggcggtggagccagaagccagttccgcgagctctccttcccccttcgccggataagcacggcaagctcactggatccctttgatgcataa

SEQ ID NO: 177775 - DNA, 399 bp, Arabidopsis thaliana landsberg
atgattcaaagattccatcgtcgaccagtacttcttggttctcctgaaaataacataattaatattgaagagaggttccaaaaatggcatgtatatagtcatgagaaaatagtacaatggtttcttcttctgttcatttcaatgttaaagaaacaaatgataagttgtagattgtgagttgatctgtgaaggttattcttaatgactgaaaatagacaatttcttgctgcgcaagtcactttaatggttctctcaaggcgtaacacatgccttctgtagttatgttggttctcgttcttcttacgacgatcagctaaaccggattaaatgtatccgaacaaaactaaaccgaccctaccggttagatgaagatcacatgttgaaaattcgaatcctttt

SEQ ID NO: 177776 - DNA, 236 bp, Arabidopsis thaliana landsberg
cgcgcggaaacatcggccccgaatcggacatcgacgtcgcgatatcgctggaggatcgcgttatccagtccggtttcggttatttcagcacaatggagatcgtcaaggagcggatcgaggatatcaccggccggagcgttgatgtcctttcagaaccggtacaaaaggagcgcctgcggcttgagcttgaacgggatcgggtcgttgccctccaaaaccccgagcaaacgccttga

SEQ ID NO: 177777 - DNA, 529 bp, Arabidopsis thaliana landsberg
atgaagtttggaaaagagtatgttgctcagatgattccagaatggcaacaagcttacatggattacacttgtctcaaaaccattcttcgagaaatcaaaacttcacagaaaagatcagaaagccaaggtgtcttgaaacgcaagctatctggtcgccgcaacttcagcggcctgacaaagcggtacagccgcaccttctcgtctcgggacctcgaaaaccacgatattatggttcacgcaacgactggggatgatggatttgagaaatacgagacgaccatcttgaaagtttcagaagtagggagagagtcagagcttgtgttctttaaaaccctagatctcgagtttgataaagtaaaccgattttaccggtctaacgttgaggaattggtgaaggaggcagtggttttgaataggcaaatggatgctttgattgcttacagaatcaaactagatcaaccttctacttcttggagctgttctgaaactgtatcagtcgatatcaatgccttggattctaaggaacaga

SEQ ID NO: 177778 - DNA, 346 bp, Arabidopsis thaliana landsberg
atggattacgagatcagttatgatgtgtccaacttcctggacgcctcgactgagaacgtagtacatactttaagagatgcgtttatcctggtggcgctggtggtatttattttccttggtgacctccgctccacgcttattcctactcttgcggttcccatatcgctgatcggggcatttatgtttatgcagatctttgggctcaccattaacatgattaccctgtttgccatcgtactggctatcggtatcgttgtggatgatgcgatcgtggttgtggaagccgtgcatgccaaaatggaggagacacatgcctcgccatttaaagcggttaaaatggtattgg

SEQ ID NO: 177779 - DNA, 97 bp, Arabidopsis thaliana landsberg
ttgaagattaaactagcaccggagaaacttacgattgtttcgaagaagcccttgaagctaaagattatcccaccaaagcccccacagtttaagaaag

SEQ ID NO: 177780 - DNA, 283 bp, Arabidopsis thaliana landsberg
cttctgcggggaagatgtacgtagaaactttctaagtcatttacacaaggagctgcaacataatggaattgatgcatttaaagatggtggaatcaagagaagtcgttccatatggcctgagcttaaacaagctatatgggaatcaaagattttcattgttgttctttccaagaactacgctggttcgtgctggtgcttagacgaattggtcgagatcatggagtgcagggaagttgttgggaagacattggtgccgattttctatgatgtggatccatctagt

SEQ ID NO: 177781 - DNA, 135 bp, Arabidopsis thaliana landsberg
atctgtgaagaaacagacagcatcgacagcatcgacttcagaaaaacttcagaaatctgtgaagaaacagacagcatcgacttcagaaaaacggcgataactctgagcagagatatccgatcgagctacagttag

SEQ ID NO: 177782 - DNA, 55 bp, Arabidopsis thaliana landsberg
atggcttgtggaatcacagacagtccctcaaaggcttttccaagagcgttgcgag

SEQ ID NO: 177783 - DNA, 156 bp, Arabidopsis thaliana landsberg
ttcaagggtttcactctacaacacgttgagcaaaacaaaaacgaagaggccgacgcattggccaaagcagcagccaaaggcgaggccctgctctccgacgtgttctaccatgtcatcggcacaccagccgtcataatcccgaaggcttgcaaataa

SEQ ID NO: 177784 - DNA, 1467 bp, Arabidopsis thaliana landsberg
atggataataataagcttgtagctgttttgctgatgttcttttcaagtttcttgctgatgaaatcatcaacggctgcttccaactacaatgttgtcagcttcggtgctaaaccggacggtcgaaccgactccactaaagccttccttggcgcgtggcaagcagcttgccgttcagctgcagcggttactgtaacggtcccgagaggaagcttcttgctcaaaccggtggagtttcgaggtccatgccgcagtagaataacgtttcagatctatggaacgattgtagctccttcggattaccgcggtttgggaaattccggttattggatcttgttcgtgaaagttaaccggatctcaatcattggaggaactttagatgctagaggtgcttctttttgggcttgtcgaaaatccggaaagagttgccctgttggcgccagagtaagataaccgtttaactaacttttttaatattttcgtgggggtttttaatctgacatcggtgatgatatggtagtaagtttgacattggtgatgatgtttttttgcagtcaatgacgtttaactgggcaaacgacgtcgtagttagtggcttaacgtctattaacagtcaaacaacacatttagtgataaacagctgcaacaatgtaattgtccggaaagtaaagctagtggctccagaccaaagtccgaacacagatggcctccacgtccaaggttctgctggtgttaccgtaaccgatggcacttttcataccggagatgattgtatctctattggtccaggaactcgtaacctctacatgtctaaactcaattgcggtccaggccatggaatcaggttacgatctattattcttatttaatagcttggagagcaagattcaaaaatcttcttaatactgattattaaatattaattgtttgcagtattgggagtttagggagagatgcaaatgaagctggagtagagaacataacgttgataaactctgttttttcgggctcggataatggtgttcggatcaagacatgggctagacaaagtacaggttttgtaagaaacgttttgttccagaatctgatcatgaaaaatgttcagaatccgatcattgtcgatcaaaattactgccctagtaatcaaggttgtcctaaacaggtaaatttcttaatcgaaattgaaacctagcttcctacatatacaaaggaattctagaaacttgatttgattggcttgtatatttgtagggttctggagtgaagattagtcaggttgtgtatagaaacattcaagggacgtcgcggacgcaacaggctttaacgtttgattgcagtcgcagtaatccgtgccaagcgattagattgcatgatattaagctaacgtttaacggtcggtccgctacttcgacttgtaagaatattaaaggagttaaggctggtgtagtgatgcctcaaggttgtctttga

SEQ ID NO: 177785 - DNA, 121 bp, Arabidopsis thaliana landsberg
accagcccgttgcagtcttaaaaatcaagctcattgcgggccagcccagatggacgcacgccgacgcacgctgacccgtttgacacctctagttgcgattgagtacagaaatgttgcatag

SEQ ID NO: 177786 - DNA, 554 bp, Arabidopsis thaliana landsberg
atgccctggctcacaggcgccgcacaatggatattcaaggattttgcaacggcttttcgttcggacaatcctgttccttatgtgaaccagaaagggttgctggaaagggatatgacgaagaaagaatcgtactatgtgttccagtcgtactgggcaacccggcccatggcgcatatttacggacataccatgcccgtacgatggggaacagaaggtgaaaccaagatgatcaaagtatattccaactgcaatgaggcggagttgtttgtaaatggaaagagcctgggcatgaaaaaaagaaacagccaggattttcccgcagcgggcctgcgatgggaaacacctttgtatgccgggaaatatactgctgttgtggtggcccatgagaatggtgtaacagtaagcgataccatcagctttacctatgaatcgcgcaaatggggcaagccttccaaagcggtgttgcagaaaacaggagagaaaaatggcatagctactgtagaaagtaccttgtttgacagaacggcgtgcaatgcctggatgccgttaactgg

SEQ ID NO: 177787 - DNA, 1425 bp, Arabidopsis thaliana landsberg
gttgcagatgtgaaaaagatgaataaccttgttactgatcttcaaatgtttgctctcaagtctcttcagattccgttacctgggagacatcctccttctccatgtttatctaatggctccttaaaccatgggtactaataaagcttattacttttaaatgatttattatttgctatcatttaagttccagtgatggattcttatagctgattgttgttgatgctttgctgcattttgtgttccaccatcagcagagcagttgttgatgctttgttgcattagtttgcattttgttgcattttgtgttccaccatcagcagagcagtttacaccatcagcagagcattttgtttcttatttcttaatttattcaaagagccctataccagcttttcttgattggtaaaatggttttggtactttgctgtaaaagtctcagcgaaggtagaactaggatcctattttctttatatcacctgcagaactagaaattctataggaaacatctcaatttcgagacaaacaactagtgcctttagttgtgttggactgaaactgcatattatcattatggagtaatcctcttttcatggctctaatacatggaatcttatttgcagagagggatgttcatgccacgaaccggaatcaccaaaccatagcgaacaggaagtgtttgactcatttcagtctctgagattgaaatcttcggaaaagaaagtttctccagccatgtactcactgcaaggttattacgggctaaaaccagcagacagaacagtctctgatggaggatgcttcgagatgggaaattacaagacggaaacttctcatcatatcttcaacaacggtgataacggatatctcagacctttcccatccacaaatactcccttaaatcaccacaggaaatctagaagcttggtcaatgcgcttatcgaagaggttaaccaatcacctgataataatactcaagaaccaacatctgataagtttatgagaagacgccaaaaatctgaggccgatttttcatcccggactccagaacttgtgttgaaagaagagaacggtagcagcaatggcggatttttatcaatagctggaaaaggcttagctttgagatcgaaagcgtcaagcagaaccaatctagcagcagaatctgagaacggtaatttcaatccggtatcaatgaacttgatggatgctccagtttcagacagctttagcagtgtaagaaaatcgtcgagtgcatcgagtctacaagatccagatggtaacagcaataatggttcgttgtcgctatggccaacgtcaaagtggagcttgaaaccggatttgcttacacctgcggccattacaagttccatctttgatggattaccaaagcctttaactggtcgaagaaacaaaacggctctggactaa

SEQ ID NO: 177788 - DNA, 416 bp, Arabidopsis thaliana landsberg
atgtctaaggtagtgtacgaaggatggatggttaggtatggtaggaggaagatcggacgatcgtatattcatatgaggtatttcgtgttggagcctcgtcttttggcttattacaagaagaagcctcaagataatcaggtaataaaaatcccatgaatctagtctatgcttctgtgttgagacttgagatcagtctaaatgggtgttgttttgtcttaaactggtgttttaggatttaatatggttgtgaactagagaaatagaaagaaaaaaagtatgagcttgataatggatgataaggttacttgcttaatagatgcttctttacatgttcaatgtagcttcctatcaagacgatggttattgatggaaactgtagagttgaggatcgtggcttgaagacacatcatggacat

SEQ ID NO: 177789 - DNA, 321 bp, Arabidopsis thaliana landsberg
atgctcactggtcgcgggcgcgtgcggaaacgcagccccgagcccgtgctccgaattctcaccgggtgcggcgtcaggaacgccggtgaccgtcgcatagagcgccgcatcacgcgcgtcccataccgcatcgaagaactggctcgccggaacatctttcgcgagttgcacgagccagggcggcacggcatccgcgtaggccttgctcgttgtcatgccgccggcgcccgcgtcgtaccagatcgcgagatcgggcctgcggcccgcaacgagtgccgccgacctcgccttgagcgcgatcgcgacggaatgccccgcccc

SEQ ID NO: 177790 - DNA, 702 bp, Arabidopsis thaliana landsberg
atgcaaaaaggcaagattcttgaagaagaagaagatgtggatgattttttctatgaatttgatcaagaagatgttgttgagcttcttgatgctaaggaggttgaggaggaacacgacgttgacatttttgatggtgtaaacatggagaagaatcttgagttcgaaattcaaactatgccaatacatcaagaagatgaagcttctttaaccaacgatgacgaagaagaagaaattgtaaactcagacgtggagaatgatctatcttttctagtttctagcgaaagagatcatccctcgcctttatctattgcaagcttggattcagcgctccaagattcggttacgatagagaatattcaaacacaaggagttgaagatgaccatgtatacaagaaatattgcgaaagaatgagatggtatgacatcctcagccgcgatagaagctatggactaagtaagtctttatttttatatctagatgaccaacatcaataatatacaaaacccaatcattaatctacaatttactaaccatatcctaatttcattagtaattttcttttttttttgggtcaaaattcatgttaatattcatttttttcatttctagatgtgatcacaaaccaactaacggcaagtagtttgagctcatgggggaaaacggcagaaaagaggataaacaaagcattagaaggaccttag

SEQ ID NO: 177791 - DNA, 282 bp, Arabidopsis thaliana landsberg
atgagcaccttctgcaaccaattctccgacaactttacacaaaccagcacatacgagacaaaccgcgaaaccgtactctcctctctccgcctccgttcctctctcggatcctattccaatgccacggcgggtattagccccgacacagtccgtggcatgttcctctgtagaggagacatctcagaaacatcttgttcagactgtgttcaaaccgcaaccctagaaatctcaagaaactgcacttaccaaaaagaagctttcatattctatgaagagtgtatg

SEQ ID NO: 177792 - DNA, 166 bp, Arabidopsis thaliana landsberg
atgaaggttagttttctaatccattgtgtttagttcgatcattgacttttttctcagatgatttctcaagtgttttcttctggcttttgttttcagttcttcgggtggatgcagaacaagcttaatggggatcataacagaacaagcacttcctctgcttcttctc

SEQ ID NO: 177793 - DNA, 67 bp, Arabidopsis thaliana landsberg
atgcgttcaggaatcttggccggttctgattattgcaccatcttcattacgtttacattgggcaaca

SEQ ID NO: 177794 - DNA, 67 bp, Arabidopsis thaliana landsberg
gtgcgcgttgtcggacaatcccctgttcttggggtacgagctgtatcctcggtatcaccgggtctaa

SEQ ID NO: 177795 - DNA, 310 bp, Arabidopsis thaliana landsberg
attcaaatactcagaaaaagctatatgtcccttgggtggaggataagaacagtaacatgcgcatgttgcacatatctcatatggaagaccttgttgcaaactcaatgaacattttggaaccagctcctgttgatgcccaagggaatgaccgtgaagatggtagtgctctttttttctatgttgctaccattataagcttcccgtaatgagttcaaactctccttcttgaaatttaaaaccatttttctatttttgacaggtgtttgcaagcaagatgaaacccaacgaattgggttcatctttgcccagg

SEQ ID NO: 177796 - DNA, 200 bp, Arabidopsis thaliana landsberg
atgaaactgtgagtttttatactcaccatcattatcacactgtagagatttaatgtgtttctcgaattgtgttttgacataggtatgaaattgcagaaattttgagaacacatcactcttattgcgaagaggataaatccatagaaaatgagagaattgatcgagaaacaaaacatagtaacgaattccggatagactag

SEQ ID NO: 177797 - DNA, 833 bp, Arabidopsis thaliana landsberg
atgactcaggtaaaatatatttttgggtccgccactaatgcatgtcttggtttagcaatgaactgtgagagaacttgtacggcataacacaattttaaacgaatgataaaaaataaaaacctactaattaattgtctgtaacttttaggatcctcaaacataggactgtccatccttcaaaagcttgtggttctgttccatatgaggcattgggggttcttaaccaataaacttatctcaatacttattttctttgagaacgtaaaatgttgtatttctgattgttaagaattcaggatagctactaagcactatcgaggtttctttacatttttttttgtcctttttgttttattattgaatagatgtgccctataatattgtttggtcgtaggcgcactcatgaagatttcaatgcagaacaccaaactacattatatgaaccaacttgcttatataccgaataaacacaaaattacatagtggacaaaaagtgcgcacatttgaagcacctggagttgagcaaagatctcataactcgcaatctgcaaacatcctctttttgtctcatatccccttgtttttttcatgaaatgtgtatagacgaatttaccccttctttttctaatattcattttaaaattaaatgatgtttgaaaaaaaaacaaaaatcgaaaccgcgcaaagaaaaaaatagaaactgactctctctctctctcctctcctctctctctcccctgaagctcaagctcattgctctcatcgtcggtctcattcgatttcagtcgccattgttaccatatcctctcctccggcgagcttcgtcgagatag

SEQ ID NO: 177798 - DNA, 377 bp, Arabidopsis thaliana landsberg
atggttcttgaatcttatttaccgtttgttgtggaacaagctgcttctattaaacaaaagtttaaaacattgaagatcttcaccgttgattcttactccgtgacgtggacctctgtgactctagatcatccttccacgtttcgcactctcgctatggatcccgaggtgaagaaaaacttggtggaggatcttgatcgattcgtgcagcggaaaggcttttacgggagagttggaaaagcttggaagagaggttatttgttgtatggtcctcccggtactggaaaatcaagcttgatcgcagctatagctaatcatcttaacttcgatatctatgacttagacttgacatcacttaacaacaatgctgagctacggag

SEQ ID NO: 177799 - DNA, 887 bp, Arabidopsis thaliana landsberg
gctctcttgtgaatttggaagacatgagctttgttttccggggaagtagaggagatttagaaagcggattctcgggtggttttctacccgaaagacgagctatggtatgctttcttgaaaacatatacaatggtttttgttagaatgatacttattgcaagggtcttttggtatcagcgtgttcatggagctcgaccagttaattctaattccctcgcttttttggttacagggtaattcaaactttcaccttctatgttatcttcagttgtgatgttgttaatacttgtgtttggtttgtgtatttcagttcttttgctgtttatgattctcaattcgcatcagatgcctcctaatttcctggtatgattaaatacgtgagttaaagttttttccttttgagttagtcgtctttcgggtgtgagtttgacatttccattaattttgtagctgtggcttgtgcttggggtgtttttgatggcaacgacgcttaggatgtatgctacttgccaacaacttcaagctcatgctcaggctcaggctgcagcagcaagtggcctctttagccatactgagctgaggttgcatgtgcctccttccattgctcttgctacgagagggcgtcttcagggacttaggctccagctggctcttcttgatcgggaatttgatgacttaggtcagtatcatccgcttgttcctttttattagtctatagtttagtagtttgctttctatggttgaagtctgagacaaaagttgttctgctgcaacagactatgaaactttaagagcacttgattctgataatgtttccacaacttctatgagcgaggaagagataaatgcacttccagttcacaagtacaaggtgttggatcctgaaa

SEQ ID NO: 177800 - DNA, 288 bp, Arabidopsis thaliana landsberg
atgaagattgagcttgtgttcatacctttgccggggattggtcatctcaggccaaccgtgaagctagcgaagcaactcataggcagcgacgaccgtctttcgatcaccataatcatcatcccttcaagatttgacgccggtgatgcatccgcctgtatcgcatctctcaccacgttgtctcaagatgatcgcctccattacgaatccatctccgtcgcaaaacaaccaccaacctccgatccggatcctgttccggctcaagtgtacatagagaaacaaaagacgaaa

SEQ ID NO: 177801 - DNA, 184 bp, Arabidopsis thaliana landsberg
cccgttgtacgatgagatcatcacattgtgtttggaccttggagaacttgatgcagccatcgtcatagttgcagatatggaaaccacagggatcactgtccctgatcaaacccttgacaaggtcatatctgctagacaatctaatgagagtccgcgcgctgagcctgaagagccagcatcaaca

SEQ ID NO: 177802 - DNA, 909 bp, Arabidopsis thaliana landsberg
atggcggcgataaggtaaaagggaacaaaacataacacgcgctttcaaccgctaggtttatcatttttaataaaaataaaagtggaaattgactaacgatcttagccgttgatctgtactactgttcttttgtgagtgtactgaaatcatttgtccagatttcgtaataatactctgttttttcgttttttgattttactaggaagctgaaaacagaggagtttcagagcttaaacagctcaacaatggcggcgacaaggtaaaaaaagagaacaaaacttgattttcattttttttgccgccgctcacaatacatgaaacgcgcctttaactgctagggtttaatgtttatcctttttattttatagtattaaagataaaagtagaaaatgaactaacgatcctagccgttggattaagatcgtcggatccattttccgttaaaccaaacctttttgctcttttgattcctcgaatgagcgttagaggtttgcattcatcgccgctcagtcacacatgctctgtctcttcactctttagaaaattttttaattctaatattccacgtcaatagagttaatttgtacccgaggttaaattagtcaattcactctcttgcgtgtacagttatcgaaggttacttgcgttgtgatgtgaccacgtgtcataaagtttggttggttaattacgagtttatggttggtcgcgtcatttgtggtttttttgggtttcagacttgatggtgaaccacaacaacaacaacacgccgttgctgatgatccagatatggttgctgatgaagtcgctaagcttgttcaaatgtgcgtttctctctcttttcctctataattatgtgaatgcattaataagcgtttttgatttctgcgattgcattttagacgcgactaa

SEQ ID NO: 177803 - DNA, 72 bp, Arabidopsis thaliana landsberg
gacgcagaagtcacgggcatagacgtcggccgatatgatgtggatgtcgtggttgaacctttcttttgttaa

SEQ ID NO: 177804 - DNA, 117 bp, Arabidopsis thaliana landsberg
atgggtataaaaagtggagagtctattgcacgtgctgatacagcagctggaatacgtaaaaaagaaatggtatcgattcatcagcttcacaaattcatatctaaaactgatgaacag

SEQ ID NO: 177805 - DNA, 483 bp, Arabidopsis thaliana landsberg
cctgaaggttttattgttgagggaaaagaagatcaagtatacaagttaaacaaggctctttacggactcaaacaagctcctcgagcttggaaccataagctgaatcaaattcttatggaattaaaatttgttaagtgttccaaggagccctcgttgtaccgtaaaggagagaatgaagatcttcttattgtggcagtttatgttgataatctacttgtaacaggatctactctaagaatgatacttgaattcaagaaagaggtgtcaacaaaattcgagatgagtgatctaggaagactcacttattaccttggtatagaagtgttacagcatgagaatggcattatattgagtcaagagagatatgtgaataaaattcttgaagaaacaaagatggatggatgcaacgctgttcatataccaatgtgtgcaaatttaaagttgtgtaaagcaaaggaggaggctagtatcgatgagaagtaa

SEQ ID NO: 177806 - DNA, 1165 bp, Arabidopsis thaliana landsberg
agtatttatagtgtagcgtgtgtttgttgtgttattgcagcgactgtgtttggacagagtttaaggttacaaccattgagtacagagaagaaagacttatggaaacgagagatgaattgtttcatgtctatttgtgattacattgtcgaagttattccaagatctcttggtactaacgttgaggtaaaatactatttcaacactatcttaattttgacacacacaatttaaaacgctaaaaaaccggtgcgttgatgttttaatttcagataacagaaacaaagctaagatctgatattctcatgagtcttcctgctttgagaaaactcgataacatgctaatggtaagtataagactcgaattagactgatagataatcaagattcaaaagatttccaacacgacttgtttgacttttgtaggaaatattggatagttttacggaaaacgagttctggtatgttgaaagaggaagctcatcgatgaactcgggtggtggtggtagagattcaggaacgtttaggaaagtggtggttcaacggaaagacgagaaatggtggcttccggtgccatgtgttcctgctgaaggtttatctgaagaagaacgaaagcatttgcgtcacaaacgcgattgtgccagtcagatacataaagcagcattggccattaacgattccactcttaatgacatggatattcctgattcttacctcaccactcttccaaaggtataaaaggataacttgcgacttccatataaatgtaatgtgaaagttttgaaatcaactcggtgttgtttgattttatgtacagagtgggaaagcaagtgtaggagacgtgatttacaagcaactgtgcacagccgagaagttttatcccgaccagcttctcgacatcttgaagatcacatctgagcatgaggcgcttgagctcgccgacaaagttgaggcttcactagttacgtggaggcgtaagactggaggattgactcactctaagtcctcatgggacatgatgaaagatatcagtggcgatgcagatcgtggcaatgacaagaaccacatacttgcggctcgagccaggagcttactcttctgtctgaaacagagataccctgaactttctcagacctcacttgacatctgcaagattcagtttaaccga

SEQ ID NO: 177807 - DNA, 189 bp, Arabidopsis thaliana landsberg
gtgatgatttacactctatggcgagagcgaaacgagcgcaaacatggagcttctccgaattcttcaagtcggcttatcagttggatagataagcacattcgaaatcatttgatggccataaaacagaatggtgatagaagatttgatagagggtttcaagtttggcttcaagcaagagaaataacttaa

SEQ ID NO: 177808 - DNA, 74 bp, Arabidopsis thaliana landsberg
gccttttcgttgttgtctttaacggcggctcctggtcgtcgttccgggttgctccggttccggtgttggtcttg

SEQ ID NO: 177809 - DNA, 421 bp, Arabidopsis thaliana landsberg
atggtgccacgtacgaaatgcgaaccattaccaagaaacaaactcttaagccccataatattccacgagggcagattagtccaacgcccaacgccgttagttgctctgttaactttcctctggcttcccgtcggtttcgtcctctctatcatccgcgtctacacgaatattccgttaccggaacgtatcgcccgttacaactacaagcttactggcatcaagctagtcgtcaacggccaccctccgccgccgccaaaacctggccagccaggccatcttttggtctgcaaccaccgcaccgttctcgatcctgtggtcacagctgtcgcactcggccggaaaatcagctgcgtcacttacagcatcagcaagttctctgagctaatctcaccaatcaaagccgttgcgttgactcgtcaac

SEQ ID NO: 177810 - DNA, 162 bp, Arabidopsis thaliana landsberg
atgaacgtgagaactcataccgagcaagccgaaaacaaaggcccatgtgttatgagtgtcgaagagagccatgaatgtcgatctttggttccgggtttagggattgtttttttggaagggagaagaagatttcttcgaagtagtaagaaagatatcagcttt

SEQ ID NO: 177811 - DNA, 737 bp, Arabidopsis thaliana landsberg
atggcagctgtgaagtttatacgtagtgtcagaacatgggcttacgaaacatttggctcggaaaaagcggtaaagttggtggcaatggcaactcctgaagacatgaggatcaatgcggaacatattagaattgctgatcagtttgttgaggttccgggaggaactaataataacaattatgctaatgttcagcttattgtggaggtgattagtgcaactttttggaaaatacttatgttttgttattcgtcattcatatatgtatataaatgatatgtgcagatggctgaggtcacgcgtgtggatgcagtttggcctggttggggtcatgcatctgagaaccctgaattacctgatgctttaaaggagaaaggaattatatttcttggtcctcctgcagattcaatgatagcattaggggataagattggttcgtcgttgattgctcaagctgctgatgtacctactctgccatggagtggttcccatgtaagtaaatttactcttgttaagcttagcttgtgtaccagaggtatatattttcatttttatatactgaattcctatgttttcaggttgaaatacctcctaatagcaacttggtaaccatcccagaggagatctaccggcaagcatgtgtctacacaactgaagaagcgattgctagctgtcaagttgtcggttacccagcaatgatcaaagcatcgtggggtggtggtggtaaaggaatcaggaag

SEQ ID NO: 177812 - DNA, 100 bp, Arabidopsis thaliana landsberg
atgagcaagcactacatcgacgcggtccttagtcgtctcagacgatggcactacagtgagacttccgactgctgcagcacgcaaggtcgatcttgtctcc

SEQ ID NO: 177813 - DNA, 175 bp, Arabidopsis thaliana landsberg
gagttggtggttggattatcagaagctactttggatgagaaacgtgtcaccccgctgcctacgttatatcttgaagatgatggtatggtcatcttacaattctctgagatatttgctatacaagagccacagaagaaacggcagaagagagaaattagatgtatcacttatagag

SEQ ID NO: 177814 - DNA, 549 bp, Arabidopsis thaliana landsberg
atggtccataaacatacgattggctcttcaagctcaaaagaaattcgggtttgcagacggctctattcctaaatccgatgatgactccgaagattatgaagattggtgtgctaataatgcccttgtagtgtcttggataaagctcacaattgttgaaactttacgatcctctttcacatagtgatgattctcacgaacttttgatgcacataaagaaacgtttttttgttaaaaacggtcaaagagttcaaaggctaaaaacaaaactcacaaattcgtcaaaagggtctcgcaatcgaagcatacgacaggcgatttacaaaactatggtaaagtctctcagattatcaacacgcaaagactgcagctgaaatacagaaggaaaacgaagaggataagcttcatcaatttctaatgggtcttgatgaaaccatgtatgaatctgtaaaatctaatctcctctctcgtgatcctttgccaactattgatgaagaaaataacatccttactcaagatgaagaatccaaagcagtgtcacgattgaattaa

SEQ ID NO: 177815 - DNA, 606 bp, Arabidopsis thaliana landsberg
atgacggtgaggactacgccttcttgttgaagggacatgaagatttaaggcaagatgagcgtgttatgcaggtgattctcaaaaaaatcagttatgcattgttctgatgaattcttgttggagaatacgtaattgaagttttcagtttacacttcacaaatatacagttttcagctacaaaatcacatctatccctttcctcttatttgtgtttcagctttttggtttggtgaacactttgcttgagaattccagaaaaacagccgaaaaagatctttccattcaacgctattctgtaataccactatctcccaatagtggactcatcggatgggttccgaactgcgatacccttcaccatcttattcgagagcacagagatgcaagaaaggtttgtcttgtattcactaaggttttcagtcctgaaactatctgcggtttacgttaattcttacacatgcctgtctgaattcatagatcattcttaatcaagaaaataagcatatgttgagttttgctccagactatgacaatctaccgcttatagcaaaggttgaagtatttgagtatgctctagaaaacacagagggaaatgatctatccagg

SEQ ID NO: 177816 - DNA, 357 bp, Arabidopsis thaliana landsberg
gttgattattttgttgattgtcattgtccaggaggtgaagatttatgggtgatcggtggaacgtgcgcaggaaccgttggttattttccggtgaactacaaacagcctggatcaatcggtaccgctgaagctattcttggtggaggtcacatagatgtagtaaggagcgttctgcagatgccatgcgagtatggaggagctgcagggttatttggatggactggtggtgaagatgggcgactatgttgctggaagtcggatgaggatgctaccgagattaaccggtcttggacttcaagtgagttggttgttaagcctccaaggaaccgcaagaaaaacagacactctccttactag

SEQ ID NO: 177817 - DNA, 228 bp, Arabidopsis thaliana landsberg
atttattgtcggtaactgatgcgatacctagaggatggcaagaaccgtgcttttgtccttccaaaaatccttactgcgactgtggcgatgatcttcaagttcctactacttcagtgattagtcctaaacctataattgagcagtgtgcgcgttgcgaaagaaactctcaatgcaacaaagtttgtccggcaacgtgcaaatacaaagtctgtatatttaatcgaacat

SEQ ID NO: 177818 - DNA, 365 bp, Arabidopsis thaliana landsberg
accgaaccgtaaaattcctgagactgtgaacggattttgcagcaagatacagtcggtttttgagctttctgatggttcgggcttggcagtaacagttgctcgatatgaaacaccagctcacacagatatagacaaagtatgaaactactttcttcctgtagtaaccccctctgtgtctacactacactacatacaaacatgttcttacagtcttgactcgtttgctggttgttgtataggtcggtgtaactcctgatcatccattgccaaagtcgtttccgaaagatgaagaggcgttctgtggatgccttaaggatcctacagctgcttgttatctcaatcaaggcctacttttttctagatga

SEQ ID NO: 177819 - DNA, 111 bp, Arabidopsis thaliana landsberg
gtcattgccaatagagcagctgagattcttggtcacaaacgtggtgaaaaaattgtgcacccaaatgaccatgtgaacagatcacaatcttctaatgacacttttccaact

SEQ ID NO: 177820 - DNA, 507 bp, Arabidopsis thaliana landsberg
atggattacaaattgatcaaaggcgagagcaaggtgcttttcttcaaggaactggaggtgaatacgaatccgttcacctggtatccgaggaatgaaatggaaagtcttgagatgcttattcggcaaggggacaccggcagcatcaatacgatcgtgtccggcattctgcggcgaatcgaaagctccaatccgtcgctgcatctcgttcgctgcatttgtttcgacatgatcaatacgattattaagtcgatgtatgcccgcaaaggaggcactgtcgcccacgactatccggacgtcgtgcgtttgaccgaattcacctcgatccaggagttggccgcagtcgcttccgatgtatgcctcaaattatgcagcgacatccgcgagagtgagcaagaggccaaggagaacttgattcaacagattgtggcctatatttccgcacagtaccaaacccccgatttttctgtttcctcgctggccgagcacttgtctttgtcgcttaaatac

SEQ ID NO: 177821 - DNA, 3152 bp, Arabidopsis thaliana landsberg
atggataatcaattctggaaatctataaactatgatgtccggaagagttcagcaagcactttggctcagttcctgaggtcagttgtcctacttgaggatgatctgcaaccttttgaacttacattattgtgtgcttcaaggatgaccgaagtgttagaatatctctcattggatcaaagcgatgaagagaatatctgtggcctgctcctgcttgagagtgatgcgtggcctatttgggtcagccccagctcgtcagctagcatagatacccatggtatgcctgttcagttgtgcgaattgaggaaatcgaaaagtcaaagatatgtttctttcattgacagcctgatcatgaaattgggaattcaccgatttattgttggccacaaagatcatgggtttgcctctcaagcttggctttccgtagaaatactctgcacgtgggagtggccagggggtaaagttcagacttctttcctgccaaatcttgtatcattttgtaaggatgaaccatcgagtggaggtttactaaattccatttttgacattctactcaacggtgctcttgtgcatgtaaaggatgaggaagagggcttagggaacatgtgggttgactttaataataacatagtggacgtcgttgaaccatttttgagggctctagtgtcattccttcacattttgttcaaggaggacctttggggagaagaagaagccatggctgctttcaaaatgatcacagataaactcttcataggggaagagacaagcaaaaactgtttgagaattattccttacattatgagcataataatctcaccattacgtacaaaagtaaaatctggtggttctggtaaagatactctgctaccactggaagttttgcttagaaattggctggagaggtctttgtcgtttcctcctctggtgctctggcaaagtggggaaggtaaagaccgattaattttttattttttttgaaagtggtgcttgtagtctcatcttgaacctatgaacaatgcttagatttaaatgaggattaggctcgggtgtggatgtagaacaagtatatttacttatgaaataacattgacttagtgatagtcctgagtcctcatctgagaagtggtcatagttggcatcagatggacagtctagggagcaatttaagactaaggttttgttgtttatcttttactttgcatgcctagctcattattgtttttccccgtctttatcagatatacaggattggtttcagcttgttatctcttgttatcccgtaagtgataaagctgaagaagcaaaggaactacagaggcatctgagcactgaagagagaacgctcctgcttgacttgttccgcaaacaaaagcaagatcctggtgcatcaactgtagttacccaacttccagctgtgcaaattctgctcgcaagactaattatgattgcagttagttactgtggaaacgattttaacgaggatgattgggattttgtcttttctaatctgaagcgtctgattcaatctgcagtagttgtgatggaggaaacttccgagaacgtcaacgacttcattagtggtgtttcttccatggagaaggagaaggagaatgatacccttgaaggacttgggcatatagtttttatctctgatccttctataaacagtgctcagaatgctctctcagcattttcgttgcttaatgcgttagtaaaccataaatctgttgaaggtgaagacaatctgaaatccttggcagatgaaacatgggatcctgttaaagatcgaatacttgaaggtgttctgcgtcttttcttctgcacgggtcttactgaggctattgctgcttcatattccccagaggcagcatctattgttgcttcatttcgagttgatcatctgcagttctgggagctggtagctcaccttgtagtagactcttctccacgcgcaagagatagagctgtcagagcagtggaattctggggactaagcagaggatctataagctctttgtatgcaataatgttctcttccaatccaatcccgtcattgcaacttgctgcatacactgttttgtctaccgaacctatttccaggctggccatagttgctgatttgaatgcaccactgaatgatgagtctctcaatgatcaggactcaagcaatgctggtttaccatctgaagacaagctactgctaagagatgaagtatcttgtatggttgagaagttagatcatgaacttcttgatacggacttgactgcgccagaaagggtaattcttacttttcaaaagctttatttggtttattttccctctttgggcaagtcattcactgtttaatcacttctaatggcaggtgcaaacgttcctggcgtggtctttgttactctccaatgttaactctttaccttcactaacccaaggacgagagagactggtgcaatatatagaaaaaactgcaaatccgttgatattagatagtctttttcagcacattcctctagaattatacatgggacagagcttgaagaaaaaagatggggatattccgtctgagttatctgtggtagcttcagcagccactcgtgcgattattacgggttcgtccctgtcaacggttgaatcactttggcctattgaaactggaaagatggcttcgcttgctggggcgatatatggtctgatgttacgtgtccttccagcttatgttagagaatggtttagcgaaatgcgtgaccgttctgcatcatctcttattgaagcatttacaagaacgtggtgcagcccatctctaatcaagaacgaactgtctcaggtatgtacaataaaaaaccttttctcatctctgagagttgcagtgaagatccactaatgcatttgcaaatattctgttcattgtttatgtgagccgcagataaagaaggcagactttaatgatgagagcttttcagtcagcataagtaaagcggcaaatgaggtagttgctacatatacgaaggatgaaacggggatggatctcgtgatccggcttccagtttcttacccactcaagcctgttgacgttaattgcgcaaaaagtattggaataagcgaagcgaagcagaggaagtggttgatgtctatgcaaatgtttgttcgtcatcag

SEQ ID NO: 177822 - DNA, 330 bp, Arabidopsis thaliana landsberg
atgtcgaccaagacagcgcgccgcctgccggtgcgcaccgcgttgtcgggtcccgcggcgggcgtcatcgccgcggcggcgattgcccgcgccgccggccacgacaacatcatcaccggcgatctcggcggcacctcgttcgacgtgtctctggtcgccggcggcaagccgtcgttggcggcgcagactacgatcgactttggcatggtcatccgtacgccgatgatcgagatcaccaccatcggcgccggcggcggctccatcgcatgggtcgatcgcggcggtttgctgcaggtcggcccggaaagtgccggttcggtgcccggtcca

SEQ ID NO: 177823 - DNA, 1039 bp, Arabidopsis thaliana landsberg
atggctttttgccatggtcatggagtgttgcacaggtaaaaatcgtctttgttttggaagaactatgacttgagataacccattttgacacagatctctaatcctacttgtcttggtttcattacagggatcttaagcctcacaatctcttgatggaccggaagacaatgacgctcaaaatagcagatcttggattagccagagccttcactctcccaatgaaaaagtatacacatgaggtatataagtctatgttgatgaaacattagtcctgtttcattctagtttttttttttttttaattctatcttagtgtatgtggagttataactcaggatgattttacccccatgatttcatttgcaacagattctaactctatggtatagagctccggaagttcttcttggagcaacccattactctactgcagtggatatgtggtctgttggctgtatttttggtacaaaatcttctcttacagtttcactggtttcagttcaatgtcactagcaagaactaacagttttgtttccttttgatgtgtagctgaactagtgaccaagcaagcaatctttgcgggagactctgagctccaacagctcctccgtatattcaggtaagtctttgtgttcatctttacctttaagacacaaacatgacattcgctaacttggttgttctgtttctttctttcctgtcaaactcaggttgttgggaacaccaaacgaagaagtgtggcctggagtaagcaaactcaaggactggcatgaatacccgcaatggaaaccgttgagtctctccacagctgtgccaaacctcgacgaggctggacttgatctcttatctgtaagtctctagtgtctaacacacctctcagaccttgcttgattagtagataatcactctgctgagactaatttgtgtttctatttgtgcacagaaaatgctggagtacgagccagcaaagcgaatctcagcaaagaaagctatggagcatccttacttcgatgatttgcctgacaagtcctctctctga

SEQ ID NO: 177824 - DNA, 284 bp, Arabidopsis thaliana landsberg
cgtattcatcgctaactagcgacgaacttgcaagaaaacgttcgacgccaattcgacgcaatattgcgtcggaaacattcaatcctatttcattgcaaagttccatgtattttgcgacgttagcgtgggctctgcgagggatctgttttatcgcaacaatggcgacacaattgcgacgaattcaagtttgcgacaagagattcgcgacgaattcaaattcgtcgcaaattacatgcaagtgctatttgcgatgcatccgagaggaatacctacctcgcaaatga

SEQ ID NO: 177825 - DNA, 355 bp, Arabidopsis thaliana landsberg
gcagcaaaccgaccaggaccaggccgataccagcatcaccaacgtcggttccagcatcgccagcctgggcggcagtgtcatactggacgccggcaaccggtacgtccaggccggcagtcaggtgctcgcgccgcaaggcgacatcgacgtcgccgccaaatacatcgacatcagcgccgccaccgacagcggcagcagcgcccagcatgcgcacttcgagcaaagcggcctgacgctggccatctccagcccggtcatcaccgccgcgcaggcggtggggcaggtggccgacgccgccggcaagaccagcgacccgcgcatgaaagcgctggccgccaccgcggcggcgctgacg

SEQ ID NO: 177826 - DNA, 205 bp, Arabidopsis thaliana landsberg
atgggactaattccaaaccaagaaccagaagatgtagaactctccaactatacacttgaacttccaaccacacagctcagaagagcccatatgatcaaagagaagctcgagaactctaaattcgctaagatcattctcttcctagtcactattatgggaacttccatggtcattggtgatggaatccttactccttccatctcag

SEQ ID NO: 177827 - DNA, 323 bp, Arabidopsis thaliana landsberg
ctgatgaactcaaagacctgaattctcaggaggcattatttgaagagcacagattagctataaagaggaacaagcgggaccagttgagaaccgagtaagattttgacgaatccgctttttagtcttttttgggcttcatatttccgtctttatgttgtttgaatgttcatatttacttgttagatttaacaagtagtgattttgcttatgctctattttttgttctttgcaggacaaagcttcctatgtatgcttctgtcactcgagttataccaaacattgatgattcattgaagacctcaggctgtatccttttgctttaa

SEQ ID NO: 177828 - DNA, 398 bp, Arabidopsis thaliana landsberg
tgtgacgatcaatgatgaagtcaaacaatctgattacaccgtaactagctcagaagctggtaccttgtactttacgcaaaaaggaatcagtaagttaaacatcaccctcagaaaaatcaagttcaatcctcaagtgagtgctcttgaggtatatgaaatcctccaaatccctcctgaagcttcttctaccacaggtactctcttttgaggttgtctggataaagcaaactacacaagagccgaagttcacctttcaagtttatatttttgcagtttcggcacttaaagtcatagagcaatttaccgggcaagaccttggatggcaagacgacccatgcacaccgcttccttggaaccacatcgaatgtgaaggaaaccggggatccgctatcctctag

SEQ ID NO: 177829 - DNA, 1177 bp, Arabidopsis thaliana landsberg
atgtctgttttggttcgtcttacttcaaagattgcgtctttggcaaaatcaggtcgcatagcaagtgcccgtcaggtgttcgacggaatgcctgagctagatactgtggcgtggaacaccatgttgacgagctattctcgtttgggtttacatcaggaagctatagctctgttcacccagttgagattctccgacgctaagcctgatgattattcgtttacagcaatcttgagcacttgtgcgagtctagggaatgttaaattcggaagaaagattcagtctttagttattcggtctgggttttgtgcttctttgccggttaataattcgcttattgacatgtatggtaagtgctctgatactcttagcgcaaacaaagtgtttcgagatatgtgctgtgatagtagaaatgaagtaacttggtgctcacttttgtttgcctacatgaatgctgaacagtttgaagctgcacttgatgtttttgttgaaatgccgaaaagggtggcatttgcttggaatataatgatctcagggcatgctcactgtggaaagattgaatcttgtttaagtttattcaaagagatgctggaaagtgagttcgaaccggattgttatacgtttagttctttgatgaatgcttgttctgctgattcatcaaacgtggtttatggacggatggtacatgctgttatgttgaagaatggatggtcttctgcggttgaggcaaaaaattctgtgttaagtttctacacgaaattaggcagcagagatgatgccatgagagagcttgagtctattgaagttctgacgcaggtatcctggaattctattattgacgcgtgtatgaaaattggagaaacagagaaagctcttgaggtgtttcatctagcccctgagaaaaatatcgttacttggactactatgattacaggatatggtaggaatggagatggtgagcaagcactgagattttttgtcgaaatgatgaaatctggagtggattcagatcattttgcatatggtgcagttcttcatgcgtgttcaggtttagcccttttaggacatggaaaaatgatccatggttgtctgattcattgtgggtttcaaggttatgcttatgttggtaacgcgttggttaatttgtatgcaaagtgtggagatattaaagaggcagacc

SEQ ID NO: 177830 - DNA, 172 bp, Arabidopsis thaliana landsberg
gtttagcgaggcagttcttggtcaaagcctatacatacatcttcccgttaggacgcataacttaatggagggaaatactaactggaagcctaatgaacaaggcggaaaccgtgatgctgcgaataatcgtattgattgcccatcacaacatgagcctgaattacggcaaaag

SEQ ID NO: 177831 - DNA, 1531 bp, Arabidopsis thaliana landsberg
atgaatcgttttggctctgttttggcatttccttttgtgataaagctgtgggatctaaaagaaatcaaagagtaagctgattaattgtctcttctcatatattatccctagattatattagaggcactcacacttgttattgtctggacgaattataagtcctgtgatggatggttagtttcagataatgaggtctaatattttcactcttgctcttgaagtgtagtggttcgagcttttactggacacagatccaattgttctgctgttgagtttcatccatttggtgaatttcttgcatcgggatctagtgacaccaatctaagggtttgggataccagaaagaagggatgcatccaaacatacaagggtcatactcgcggcatcagcactattgaatttagccctgatggtcgttgggtagtgtctggaggacttgacaacgttgtaaaggtaagaacagcagtaacaacaagtgcattgttttgttccttaatgattgttcttataacaatgtactctttattgtactcaataggtatgggatttgactgctggaaagctattgcatgagtttaagtgtcatgaaggacctattcgctccctagacttccatccgctggagtttctcttagccactggtgagtttttagcttttcttttcatgtgttttagggctgaattggtagcagctttcttttagttgataaattactgttttgcatccactaggtttgttttgaggtcttctgacttcatataccaccctttcgtaattcaggttctgctgacaggactgtgaaattctgggatttggaaacgtttgaactgattggaactactagaccagaggtacctgagcttgtgttttgttattaatctgtcctgtttagcgttggattcactttatagtccataagataagacttagttttacttgcactattgtcaaccttcttcctggcatgtggtgtcctttgttttccaggctactggagttcgtgcaatcgcttttcatccagatggtcaaacccttttctgtggattggatgatggcttgaaggttctgattgtctttgtgctcaactatacaacttagatgatgtccagagtcaaacactgatattataagttcatgcacataatgcaggtttattcatgggaaccagtgatttgccgggacggtgttgatatgggatggtcaacacttggtgacttctgcatcaacgaaggaaagtttattggttgctcatattaccgaaattctgttgggatatgggtttcagatatatcggtatgtaaccgaatgtgaatgtccatacctcatgttaaaaacttaaaccttgtattaagttcgtgtttgtttctcaggaacttgagccatatggagcagtatctgaggataagaatgaatgcatggtgaaaagatttagtgtcttgaatgatcagtctgagagaatgggaagtggcccaaggggcagcgtatccccagattatgagacaagagagataaagaacatatacgtcgact

SEQ ID NO: 177832 - DNA, 811 bp, Arabidopsis thaliana landsberg
gaaatcgatgtgaactctgagcttgtttgtattcacgactctgcccgaccgttggtgaatactgaagatgtcgagaaggtatacttatgagaagtagcaaaagattaaggagaatgaaacaaaattctcgaagtccctttagaatttattgcactgttgtgttttgttaaggtccttaaagatggttccgcggttggagcagctgtacttggtgttcctgctaaagctacaatcaaggaggtacacaatcttaagttagttagtttttttgacatcaccacattctcgatattcgacttgttccattttgcgatatgcaggtcaattctgattcccttgtggtgaaaactctcgacagaaaaaccctatgggaaatgcagacaccacaggttttaaagtatactcatgctttgttgattgatttttggtttcaaaccacttcaatgcatgctttttctgtaggtgatcaaaccagagctattgaaaaaaggtttcgagcttgtgaaaaggtttgtgaaccttcaaatgattttctgaagtgtggattagaatataaaaagactgattactatttgtgttctatatctaaaacagtgaaggtctagaggtaacagatgacgtttcgattgttgaatacctcaagcatccagtatatgtctctcaaggatcttatacaaacatcaaggtaacaaaacactaattttgtgttttttcgcagccgtagaatgaaaacaaactttctcatccattgcaggttacaacacctgatgatttactgcttgctgagagaatcttgagcgaggactcatga

SEQ ID NO: 177833 - DNA, 942 bp, Arabidopsis thaliana landsberg
gaagctttggatagttttcagaacacagagttttggtatgcagaagaaggaagtttatcgatgaaatcagctcgttcttcgactggatcattcaggaaagttatagtacaaaggaacgaagagacatggtggttaccagttcctctagtaccatcagaaggtttgtcagataaagcccgaaaacaactcaagaacaagagagaaaggaccaatcagattcataaagctgcaatggctatcaacagtagcattctcagtgaaatggagattccagactcttacatgacaactcttccaaaggtttttttttttgttaccttcattcattcatacctactaggaattttgaagttttgagtctaattatggatgtacaatctctacatgcagtgtggtaaaagcagtgttggagattcaatttaccgttacatgagtggttctggtcggtttttcccagagcaactcttagattgtctgaacatatcttccgaacatgaagctgttcagttagcagatagagtagaagcttcgatgtacacatggagacgcaaatcttgtcttagtaactccaagaactcatggaacatggtgaaagatcttatgtcaactacagagagaacagacaagaactatgttatggctgagagagctgagactctcctcttctgtttgaaacagcgttatccagaattgtctcagacatcattagatatatgcaagattcagtacaataaggtaaaaactgaagaatagagtgtctcattgaatttgatagtacactatagtaattacttaaaaagtgttgtgctttttggtttgcaggatgttggaaaagctgtgttggagagctactcaagagtacttgaaggtttagcttttaacatagttgcttggattgatgatgttctctatgtagacaaaaccatgagaggtagtgaataa

SEQ ID NO: 177834 - DNA, 74 bp, Arabidopsis thaliana landsberg
atgtccgcagctagtatcctcaccgtcaacatctccgccgctgcctctatcctcgccgccgtatccctctccac

SEQ ID NO: 177835 - DNA, 130 bp, Arabidopsis thaliana landsberg
atgagaaacgacaaacgagtgaaccgaaaaacgacggtagaagaaatcgaatacatacatgcattcatacataagcaacacaatgatgtatccggcatgattttatatactagaacaaaagatgaagcat

SEQ ID NO: 177836 - DNA, 963 bp, Arabidopsis thaliana landsberg
attaattgagtctcgagatgttgtatttgaatgtggtcctcactgtgggtgtgggccaaaatgtgtcaaccgaacttctcagaagcgtctaagattcaatcttgaggtatgtattggttaagacttggtaaggaagaaccacttgccactaaagttgaaacgaagtacacttggatttaatcatatagtccactatcctttatatggtaataattaaaatgcataatccagtgtgtgtcatttgatgtccttccaaatctgagcttaatcacaatctgaagcttgtgttttggtctgtggcctcaaacaggttttccgctctgcaaagaagggttgggcagttagatcatgggagtacataccagctggttcaccagtatgtgagtacataggagttgtcaggagaactgctgatgtggatactatctctgacaatgaatacatatttgagattgactgccaacagacaatgcaaggtcttggtggaagacaggtaacatagagatgcttaatttactatgtgattattattgaatcaagcatataagtttttgaggtatatctccttgtttttcttcgccaacagagaagactaagagatgttgctgtaccaatgaataatggagtcagtcagagcagtgaagatgagaatgcgccagagttctgcattgatgctggttcaacaggaaactttgctaggtttataaatcacagttgtgaaccaaacctatttgttcagtgcgtcctgagttctcaccaggatataaggcttgcccgtgtggttcttttcgcagctgacaacatttccccaatgcaggtactgagagaaactcatctgtgagggtgactcattcgaacattccctttataaaataaatcttactacattctctgtctcaattgtaggagctcacttacgactatggatatgcgcttgatagcgttcatggaccggatgggaag

SEQ ID NO: 177837 - DNA, 578 bp, Arabidopsis thaliana landsberg
atgggagactttgtctggggtctccagcgcgagaacggtaaagtttaaatcatcttctgacacagttacactgttatttatgttttgctctattatattgatctgctatagcacttcctacgttatttggaacatttatttggtgtcatatgatatgacatatatggacattctctctcacacacatgcttggggctaacttgtctgcaaatagtttgtagctagtttaatcaatcttattacctgctaattactttttttttcttcgacaaacatatgctttgtagttagaagtggtacggtgttgttgatctttgtgtggtctttcagatgtgcggaagcctgaaagtgaagatgttttcatggaagaagatgtagcacccaaagctcccgttgaagtaaaagaagagcatcctgatggtttgacagaagtaaatgacactgatatggatgcagcagaggattcatcagataccaaagagataacacctgatgaaaatatacacgaggttgcggttggaaaaggattatctggtgaattgaagcttattaaagaccgaggaaccctaaaggagaag

SEQ ID NO: 177838 - DNA, 94 bp, Arabidopsis thaliana landsberg
atggacagcgacggaggagtcgcgggattcggagcagtcgccggattcgctggagtcgcgatgtggagaaacagtaaattaggttttttactgg

SEQ ID NO: 177839 - DNA, 222 bp, Arabidopsis thaliana landsberg
atgcgccagttccgccccctcctcgccatcgtcagcctgctgttttgtgttgtcaccttggcgagcgtccaagccgcccccgcccccggaaccgccgccccgggaactcccggaagtgcgacggccgcctcagccgcgatcgccaagcctgacaccgatatcaaccacgtaccctacatctccacctattacatccagcccaaggtcgagcttggcaagcag

SEQ ID NO: 177840 - DNA, 317 bp, Arabidopsis thaliana landsberg
ggtgtcaactgatttgagctttgctagcaaaattggtggtgttctagttgaatcaggatctaatttccaacaaaagttaaaaggtactatgtccatccacatatttatgattctgtcaacttgaatggctaattccttaaattgtcttgagttcttaattcccttaaaaatagtacttgatacttcttatctatgttgatggcgttagtgtttctttcttctttattgtagggttttctcctgataaaaggtttcctcaagcccagttttcaccctatgaaaacgttgagtacaaatggaattcagctgtacggtag

SEQ ID NO: 177841 - DNA, 118 bp, Arabidopsis thaliana landsberg
atggtacctgaaccgattaaccaagtcaaattcaagaaccgacaacaactcgttaaccggaacttgaagaagattgatcctgtggatgctctaatggatgaaaacataaaaaggaaag

SEQ ID NO: 177842 - DNA, 121 bp, Arabidopsis thaliana landsberg
gcctcttgttcctgacaagttcaacatcgaagatgagagttccaatgtagaactacagaattgtcgtcgtgtcgatagtcttcaatggattgataccaacttaagagattatgatatgtaa

SEQ ID NO: 177843 - DNA, 421 bp, Arabidopsis thaliana landsberg
gtcatttggtttttcgacctatcgacatccagcgcttcttgggagagtatgagccacaatgggatgagttgtttctggcttgtggtgatgaaaaaggggtttccaatatcaatgatgtggtaagtttgctggcttttcatctccttctctcctgcttactgaatcgaaatagtaatctgaattgatgatatgtttactatagatgtaatatgagtttgggtttcctgtgttgttggtccaggagaccatcatggggaaatgcaatgttgtatgcacatctgatgaccgaagaaacccacgaccaggaaccaaggagctgcggagagctaaatatatcttctcccgcacttttgatacaagactcagaattatatcaaaagactttgcagatgctatagccggaattggaggtttggattag

SEQ ID NO: 177844 - DNA, 128 bp, Arabidopsis thaliana landsberg
atggcgggcttctggcagatgggccccgcgggcggaggcgcgcctggaatccctgcgccgctaacatgtgggcccgagcagccgatccactcagctctgcatgccctcaacctcccactgtatgacgg

SEQ ID NO: 177845 - DNA, 62 bp, Arabidopsis thaliana landsberg
atgaataaactccataagtcggataggatgtccgatgacatatttcgaaacagatattcaag

SEQ ID NO: 177846 - DNA, 149 bp, Arabidopsis thaliana landsberg
atgagcaagagtgtgacgtatatgcagacacttaaaaaccaagagattgacgagattagaccacgagatatactgagtccgtacccgagatataagagtcatcaggttatcatcgggtgcgttgaggtggttcgttacgtttctactcg

SEQ ID NO: 177847 - DNA, 259 bp, Arabidopsis thaliana landsberg
atgaatgatgcagacacaaacttggggagtagtttcagcgatgatactcactctgtgttcgagtttccggagctagacttgtcagatgaatggatggatgatgatcttgtgtctgcggtttccgggatgaatcagtcttatggttatcagactagtgatgttgctggtgctttattctcaggttcttctagctgtttcagtcatcctgaatctccaagtaccaaaacttatgttgctgctacagccactgcttctgccg

SEQ ID NO: 177848 - DNA, 500 bp, Arabidopsis thaliana landsberg
atgtcatccaaaaaggaaagagatccttcacctaacaggcggtttagcttcagttttagtcagatgagtagaagtttcagttccaaagaaagctcatcgtcattgtcaagcacatctcatgcttcagctaaatcaggtcctttgacattcaccaactcagtttacaccactcactcgaccagaacaaagtctaatggtcacaacagaactagatcaggtcctatattgaaacccaagaccgaaaaaaataatgtaccatcattacaagtggcttcaaaaccttccaacacaagaccaccaaccaaggaaaagaagcaaagcagctcaagagttcacgctcttttacaattcacattgagaaaaggtatcaatctgtttcagttcgttgttggagacaacagcaataatgttctcgcagctaccatgaagagttcagattcttctacacggtgttacacattgtacaccgtcaacgaagtaaagaacatgaccggaaactg

SEQ ID NO: 177849 - DNA, 1039 bp, Arabidopsis thaliana landsberg
atggatgtttctaaacttgatgatcttgatagacgcctgtttattgatgatctcatcagacatgttgagaatgataatcatgtcttattgcaaaagattaggaaaagaattgacgagtaagtgtacgccttttggccgttgacctttgtatttatatgttgttcctattacattagaaatgttaattccatgtattttgtagggttgggattgatttaccaaagattgaagcgaggttcagtgatcttttcgtcgaagcagagtgtgaggttgtttacggaaagcctatcccaactctttggaatgctatttcaagcaaactatctgtaagtgtcattcaattgctttgacttgtctttctattctcaattccttctgagattagaaaataatggttgattttgacagagattcatgtgttcaaatcaagcaaagaagatcagcatcttgaaaggtgtcagtggcatcataaggcctaaaaggtagattcttgtagcagaaatttcctaatcattatccaaagaatgattggtttaattccagaagagttagtggttttcttgtagaatgactttgttgcttggtcctcctggctgtggtaaaaccactctactactcgcattatctggaagactcgacccttctttaaaggtttggcttctttttttttctctccttcaaaacgtctctattttttttcagaaatcatattggttgcttccattttacagactagaggagacattagttacaacggtcacttattttcggagtttgttcctgagaaaacatcgagttacgtaagtcagaacgatctgcatattccagagcttagtgtaagagagacactcgatttttcgggatgttttcaaggcacgggaagccgtttaggtatgcgtaatactaaattcttatgcattgaactttattgacactaaaaaccactgtcttttgttcatcagaaatgacgaaagagattagtagaagggagaaactgaaagggattgtaccagatcctgatatagatgcatacatgaag

SEQ ID NO: 177850 - DNA, 161 bp, Arabidopsis thaliana landsberg
gtgcagccgatagaaggtggaaccatagagtcaatgtggtacgtagggtctccaccaaggagaaccggaaatcctcttgtgcacgaccttcatttcattcactgcctccatcttctccccaatttctcaagaacgaaggcttgatcatcacatcttcttag

SEQ ID NO: 177851 - DNA, 430 bp, Arabidopsis thaliana landsberg
taaaatctactcgacctacctctcttcatcttaccaccgacactccaatttctctatatcaccacgaatcacagagttactcggtttagacaacttcactcgattttgtcgccatactcgaccaattcacccatctcaatcgcagtctcattctttcaagagtcattcaacttcgtcctatagactcgacctccactcgacctccagtgttaaaaatcagaagacatactcgaccacaagaagcgaaccgctgaaacctgagcaatactcgaccacactggatctactcgacttttgcgggaaagaaatactcaaccgcaacagaaggagagataatcgaattccaagtttcactcgaccgcagggttggccgcagtggaagaagagaaatcgagtatcctcagagcggtgctggccgccacagacctga

SEQ ID NO: 177852 - DNA, 206 bp, Arabidopsis thaliana landsberg
atggagaacaagaagattaacgaggataagagatcactaccggagaaggataaagacgagagtactgttggtgagagtaatactaagaataagggttatgaacacgtgacgcttgaggatttaggggtttcggtggaagatctcaagagtgtcccatgggaagcgtttgaatttgattcgacatgggagattaggtcggatccatg

SEQ ID NO: 177853 - DNA, 608 bp, Arabidopsis thaliana landsberg
atggtgaagaacgattcggtgaaatctggattgttaagtgtggaagcacatagcttcgataagcaacgaaatctcgctatagacttcaccggcaatctcgtgagtatctcgataacgagatcgaacgggatcgtttctgaatttttctcctctcttttccttgaattcgaacaagatcgtgtattgcgccgtgttttcatcgttaactgaaagatttcagagatcaatcttgtttgtgttactgatcacgatcgaatgtgtacaacataaatacagagcctttacaacagaacccgtaaactcaggaaaatctatacatttgagaagatctaactctatctttcgatgcacaatatcagcatctgttaaagcatattcgttgttgagtaacccaagagaagaccaaacataaccggtcttaaccatcctctaatattaaccctagataaaccctagctagtctactcgacgatttaaaaaaaaaactagggcttttcagatatacaaagatggcataaaacgtaactcaggagttaatcttcaaacgacgtcgttttcagaagctggctattgaaaacgacgtcgttggtgattttatctataaataa

SEQ ID NO: 177854 - DNA, 357 bp, Arabidopsis thaliana landsberg
atgcatgatgagaacacggtcatttcactccttgaccggcttgatgtggatgtgatcatgctgaccgacatgctcctcgaggcgctcgaagcacctctggggcagaccatgtctcagtcataccagctctacctgacgcccgatcttgcacaggctttggaacattccggccgcatcgcgcaggaactcaacgattcatatgtgggtgtagaacatctcttccttgcactccttgagcattcagggcctgcgatcgaagtgctggatcgtgcccatgtcgacaagaagaaggtccaacatgcgctttgcgaggtacgcgaacatgcagtggaggacgcacagtcttcgaacaagaag

SEQ ID NO: 177855 - DNA, 100 bp, Arabidopsis thaliana landsberg
atgaccctgagcacggctacagaagggcagctcacttctaagatcatccagacctgtagtatcacaactaaggagacatgttggattggccccaccagtg

SEQ ID NO: 177856 - DNA, 264 bp, Arabidopsis thaliana landsberg
atggtgcagaggcatgaaaaagaactttgctatatcagcgagcagcaacaacgtctaatgcttcttttcgtggagaagtaaagttattcattaagggtatgtttgattcttctttcaatagttttgcctagaacatcggcaaaagattggcgaaaacgaaaggaggatgtatctaaaatcaagggaatgattgctacatgtggggttacaagagaaacgacttcgacaccgtcccaactactaaaagtgcagcataattctttg

SEQ ID NO: 177857 - DNA, 730 bp, Arabidopsis thaliana landsberg
gatattttgatgaaccgtagcatcaagaatgctcttgttgcagaggaaaagttctttcgtagtcgtccagtaagactgcatcattctctcgatttgttttctgatagcgtttccttgactcttctgcttatatgttctgttttggtttgttttctaataaacaggtttacagcggtctcacagatcgtttgggtgtccctcaactggcaaagaaattaaatcaggtattatctgcagtcttgagatcgtctaatttctttgttatgattatcttgttatgcagtcaagacacgagtgtcataaggaatacactttctggattttccaatgtgtctctaattgagacaataaattggcttttgtatgtaacattcatgtttcttatttcatttagcaggaggagctaggatctttgtaggacattagtgtgtatatatttgaaaaactcagcgacatcttctcactattgttgttgattcatatggtggattctttttctgtgaatggagtagacctttttctaaagatggcatctcataagtttcatagctggtaatattattactaaaattatgagctgtctgatgggagctagttctttttcccttctttgcaggtccttgttcaacacatcaaggcactgcttcctagtttaaagtcacgtatcaacaatgcattgttccctacagcaccggagtatgagagctatgggaaaataacagagactagg

SEQ ID NO: 177858 - DNA, 66 bp, Arabidopsis thaliana landsberg
atggagaagcgcctttcttattcaatgttagaaaactttttccagtcgagggatgtacgaaaactc

SEQ ID NO: 177859 - DNA, 489 bp, Arabidopsis thaliana landsberg
gtagtaggtgaattgctcgatcatctaacaagctgggacgctcttagagctgtacttcccgttggaaccgtgagcggagccccaaaggttctctctcactaaaacaacaaacattacacattcaccatactcaaaaatcatttgttacaggtaaaagccatggagctgatagatgaacttgaagtaacaaggcgtggtccttacagtggaggctttggaggcatttcgtttaatggagacatggacattgccttagctctcagaacaatggtcttcccaacaaatacccgttatgacacattgtactcatacaagcatcctcagagacgtagagaatggattgctcatattcaagctggagctgggattgttgcagacagtaaccctgatgatgaacatagagagtgtgagaacaaagctgctgggctagcacgtgctattgacttggctgagtctgcattcgttaataaaagtgatacaacaatctag

SEQ ID NO: 177860 - DNA, 376 bp, Arabidopsis thaliana landsberg
atgggtttagggtttgagaaagaggaagaagaaggagaagaagaagaagggtttgtgctactactgcaacagaagatgaagagaagctctctggttccaggggtagaatagtcatttcgaaaatcaggtcttctcgtcgtcgacctcttcttacaccaaagcaagtaataaagctcagcgagaagagctaatagcaagcaaccaaagactatgcttagagcaagtcccacactgctcagagatctcatctttcttcttctagataagattcacttctcttgttcatcgttactccaacacaaagagaagacctttttatccgattcgaccaaatgtgaaatgcagaaggaatggacactatggcggttgtttatga

SEQ ID NO: 177861 - DNA, 325 bp, Arabidopsis thaliana landsberg
acagcatgcaaacaccacattctctgtccttgcgagaagtccacaaggatatctggtacagagattcatagagagacgaaccttaccactaatgaggcggtcgcagggacatttgaagcagattctcgccaaacgatgtccaccgaggagatcattgaggtgccttcgaagacctccacattgctttaggttgtaacctctattgaggatgttgttttggtggaggatgcatcagatgatgaggaagctaccttggttatgcaaactacttttgatggccccatctttcttaccaccatcgaagacggtccttctcattctatgg

SEQ ID NO: 177862 - DNA, 288 bp, Arabidopsis thaliana landsberg
cctaaagttacaataggtataacaaaccataatcattcaacactaagatcaaaaagctgtcgaattcagattaaaagatggaaacctgacagagaagaccagcaagaaggtatttccagttctcagcgaggagaccaatctccgttgttatttccgaacaaaatctcctccatagctacaaatgtacaaaaccaccacaattcagccaattacgacaaatatgatcgcaaggaagcaaaatcagaaagaaaaaaacgacgaaccttggaagcttcgcggcgaatataa

SEQ ID NO: 177863 - DNA, 488 bp, Arabidopsis thaliana landsberg
ttgagccggaaacagaggtggtaacagaggttattcccagtcagcaggatttgcagaaggatcctttgttggtttcaaatctgctggttaatcagagggaagtcgagactaatggaactgagaaaaacagtgaagctgagactacagaacttaaggaaaacgagaacgtcatagctgtgattgaaaaagaacaggatgacggtacgtggcattctgtctcacctgcaaagggacatcaacgtccgaaacttcagcacgtacatgagaaccaaaatcacgtttctccatctagatatacagttctagctatggaagacgatacagatgaattagagaatcaagaggaaggtgagattgtttctaagcaatcaactgaactcttggtaacttcagagctagtcaatactcaggagactcgtccttcttttcctcgagcgtccaaaacaatgcataaggttgttaaaggatccgtcaatcaaaacacatag

SEQ ID NO: 177864 - DNA, 450 bp, Arabidopsis thaliana landsberg
gtgaatgaaggaagtgctagtgcaagtgaaattttggcaggtgctttacacgataatggtcgagctatacttgtcggtaaccggacatttgggaaagggaaaattcaagtatgtacattaatcagctttaaacaatacaaatttattaatattgatcttatgaattttttgttgttgtatgttttgtgattttgcaagagcataacagagctaaacgatgggtcggctttgtttgtgacggtggctaagtatttgtctccgtctttacacgaaattgatcaagtagggattgcacctgatgtacagtgtaccacaggtatgatcgattctttgaccgctgagatagttgagaagatgaacagttcggttccattgcttgaagcagactcatgtgttatggtcgctgagcacgaacttgaggctcgacgatctaatggaacagcttcttga

SEQ ID NO: 177865 - DNA, 1450 bp, Arabidopsis thaliana landsberg
  unsure (1)..(1450): unsure at all n locations
gtcgagtgtcttcaggtagatggtgttttgcagaaaaggaatctagtatattgtgcttctacaaggtatcttcatcgttggctatgaatctgattcaaagtttctttttcatacattttctttggatcatgatagcagtattattaatctcactaggaggcttctatcttacaagaatttattatcaatttnnnnnnnnnnnnnnnnnnnnnnnnnnnnnnnnngttttgttgcagaagtcttgatgctgcgccgggtcataagaactggaaaaatggcattgcttgtactaccttatgtatccatttgtgccgagaaggtttctgttgtttctccaagcatcctacacgttttgcaatattactttctgtaagtttaatcgcatttcaaattgggtgcaggcggaacaccttgaggtccttcttgaaccacttggtaagcatgttcgtagttactatggaaatcagggtggtggaacacttcctaaagacacttctgtggctgtctgcacgattgagaaggcaaactctttgataaatcgcttgcttgaagagggtcgtttgtcagaacttgggataatagttatagatgagctacatatggtatgccttttcacatatatcatctgcatggatctcggataagcttataagttataactgtctgaaaacatctttattttttatctttgcttgtattttgctctatcttcatatagttgataacaaatgcattaaaaggaatcttttgatcattgtttatataggtgggtgaccaacataggggttatcttctggaacttatgttgacgaaacttcgttatgctgctggtgaaggcagttcagaatcaagtagtggtgagagttcagggactagcagtggcaaagctgatcctgctcatggcctacaaattgtgggtatgagtgctacaatgccaaatgttggcgcagttgctgactggcttcaagtaagcaaaacaaatcacaatttgtgtgtgtatgtatatattttgccctcactcagttgcatgacacttttctgcatgtctgtgggaatttataaaatatggtatatatgaaattgcgcagagatactgtttgagattgttaataaaatttatgtttcctgtaaaatgaagacctctgtatctccagatctcttaaatggatgatgataggttttatgtatctgttactttcggaagctattttttcacctctattgaaactctttgtaaagttattgtggccatttaaccagatttttttttttttttacatgttgaaaggcagctttatatcagacagagtttcgaccagttcccctggaggagtatattaaagtaggtagcaccatttacaataaaaagatggaagttgtgaggactataccaaaagctgctgatatgggagggaaagacccggaccatatagttgagctttgtaacgag

SEQ ID NO: 177866 - DNA, 240 bp, Arabidopsis thaliana landsberg
tattgggagattttcctcgatgctacgttgaatgttgtaagtgaacgaatcactgcaattcaagtggaggtccatgattcgaacaacaaagctcgcaatactttgttctcctgcctctcgttgggtgagtttgagcgagttggacatctggctatggctcacgagatctggtccaccatcgagaaattccatgagcgcaatgatcatgtaatgaccagactctttgagatgtatcgatga

SEQ ID NO: 177867 - DNA, 2104 bp, Arabidopsis thaliana landsberg
atggaggttgttgctgcatcatcgaatttggtaccagctaaacgcaccttggtgttgcagaagaaggctgtggaagtttatgctgcgaatgattgttctggcgacttagaggttcgaattcttacttgcgaaacttgtttttgtggttaggggttactgctatgtcaattgaattgaacttgtttataggaatctgtctttgtgagaaaacgtgttttcagtgatgttgattatctgtatctcgtgtatgtgttttggtgttgtcctgtcttttcgggttctgtaatctatgatttatatgtaaactacttgtgattttttggatgattatgaagtctattctcgtcaagacactaattcaatgttatgtctttctctatgtaggtttcagtcaaagacctcaatgaagaagatcatgatcatcacagtgcaagcataacatgtcacatgtgctatttggttgaagttgggaagagtgagagagccaagatgctttcttgcaaatgttgtgggaagaagtatcatagaaactgcgtgaagtcttgggcccaacatagaggtattgtttcataggaatctattgtttatgacttatgagtctttctgcctagattcttataccggtttttgctagcagatctttttaattggagctcttgggcgtgcccatcttgccgaatctgtgaggtatgttcggacacaactttgtgctcaatgattattcttgctctttacatgctgggctaggtatgactgctgcttgattatttgtattcttttgatcatttttcctttagggctgcgggactttaggggatccaaaaaagtttatgttctgcaaaagatgtgatgatgcatatcattgtgattgccaacatcctcggcacaaggtatagtatttattgcgtctgtataaggttcttatcttatcttttgcaaattggtttattttaatctctgaatattacagaatgttagttctggaccctatttgtgtcctaagcacaccaaatgttacagttgtgagtctacagtccctgggaatggccagagcttacggtatttaactttttgccttgtgatacttgaaatttattcatgtaaagtgcactatctcttattattccttctaaactttgcaggtggtttttggggcatacttgttgtgatgcttgtggaaggttgtttgttaaggggaattattgtcctgtatgtttgaaggtatatttacatattctcctcctcggtgataggaaaacgtgcgctctgtttccaagcatcatatttagatattcttggccataattaatagagttatgtattttggagttgttaccctatactatccagacatctgtattgcaaaagcagttatttgcagaattttcttacattctttgaattgacaaattattttgatttcatcacgtaggtttacagggactcggaagcaacgccaatggtgtgttgtgacttttgccagcgctgggttcattgccagtgtgatggaattaggtacatatcgttaatgaaattgtacttctgtgtcctgtaagcatgtctcccaagtgtgtatccaaatactttaaaataacgctaactttgtaagctaccatcgcagcgatgagaaatatatgcagtttcaagtggatgggaatcttcaatacaaatgttctacttgtcgtggggaatcctaccaggtgtgtttcatgggtccttaagtcttttttgctatctcatatttgtcccaggttctagttgattgctgtgaatgacaatttggttatcccattttctcttttctgatttgtgtttatgatgccaggtcaaggatcttgaagatgctgtacaagaaatttggaagcgaaaagatatggctgataaagatctaattgctagcttgaaagctagtgctcgggttgttgggcaaactggtggtgcccctcttatgaatcagcctggctctgtggaaagaaaagtttctgaaaaggctatggtcaatggtgaagaagagaagccattgagagttctcaggataaaaagtagcaggcctcaagattcagatagtgagaaatttggaaaacacgctacagagctgagcact

SEQ ID NO: 177868 - DNA, 764 bp, Arabidopsis thaliana landsberg
gtatcaccaaatccggatgaaagagtccgaccaactcgcgacttctttcatcacaccgttcggcatgtactgctatgtgaccatgccgttcggtttgaggaatgcgggcgcgacgtaccagcggtgcatgaaccatgtgttcggcgaacacatcggtcgcatagtcgaggcctacgtcgatgacattgtagtcaagacaaggaaggcttccgacctcctctccgaccttgaagtgacattccgatgtctcaaggcgaaaggagtcaagctcaatcctgagaagtgtgtcttcggggtgccccgatgcatgctcctggggttcatcgtctccgagcgaggcatcgaagccaacccggagaagatcgcaactatcaccagcatgggacccatcaaggacttaaaaggcgtacagagggtcatgcggatcgtcgcggccctgagccgtttcatctcacgcctcggcgaaagaggtctgcctctgtaccgcctcttaaggaaggccgaatgtttcgtttggacccctgaggccgaggaagccctcggcaacctgaaggcgctccttacaaaggcgccagtcttggtgcgccagcggacggggaaaccctcttggtctacgtcgccgcgaccactcaggtggttagcgccgtgattgtggtcgaaaggcaggaggaagggcatgcattgcccattcagaggccggtctacttcatcagcgaagtgctgtccgagactaagatccgctacccacaagttcaaaagctgct

SEQ ID NO: 177869 - DNA, 101 bp, Arabidopsis thaliana landsberg
atgatcaccactttcggtctgctgatgcccgccgttacgtcttttcgcatcctcttttgggcttactaccgtcgctaccctctttacagccgtcacgtgtc

SEQ ID NO: 177870 - DNA, 567 bp, Arabidopsis thaliana landsberg
ggtttcgtttcgtaatcgtttcttagctttgaacattctcatgtttggaatgaatttagtaaaatccgacacatacattttctcgatttctgggtttaagtgagattgttgcgattgttctagttagggttttggatgtggctctgtcttcataccttgatatatctgatgttctattcatgaattcttactattgattaccttgttggttactaatgactaagaggaattttcagtttctctgagtgtttatatctgatgaagtctttagttgttgtgctaagagtttccatttggtaaattgttgtttgatttttttatagatggggtccgcagcttgagcaagcaacctacaagaatcgccagcgtctgtacctctcagagcaagtaagtttttagctttctcttgtatcttgttgtctcatcttctttatatacttctcatcgtattatttgtatttttcttggttgtgtcaccagactgatggaagtgtgcccaatactttggtcatagcaaattgtgaagttgttaagccaagggttgctgcagcagagcacatttctcag

SEQ ID NO: 177871 - DNA, 659 bp, Arabidopsis thaliana landsberg
atgattttgagaactccgcagccgaagaggctcaggtccgacgccggagaaagccccttccccaccggcgctactggttccggcaatcagctaatcatctacgaagattctcctcttcctgctcctgctccgctacaaacttctcatgatcattcggcggatcaacatctttgcacctatcaatgccgccaaatggtcactacttatacctatctatctatatcccctcacgaagattagcgaatctgaggtttgttcttgttgttgttaggttaaagctgatgttctagatgccttgagcacagcagagaaacaagttgaggaatctaaaaccaaattacagactcttaatgccaacttcaccgaagcaggtgagagatcgtttgtgaattcgaaattacaaaggtcttgattccgaatgtctctgctttaactgttgttaacgaatttgattttgatattctacaacagatgctgaaagaaagcattttcgagataaattcttatactcagagcaagagcttgctgctgctaaagcgcgtgagaaaatgcttcaggagcagcttcttatggagatcaacaattctcaagagcggtataccaaagaactacaatcttgccatgaactggaggttgatctaactattaaattgacttga

SEQ ID NO: 177872 - DNA, 53 bp, Arabidopsis thaliana landsberg
atggacttcgaggttctgaagggtgcacacgccaccagcgttcagtggtcaag

SEQ ID NO: 177873 - DNA, 65 bp, Arabidopsis thaliana landsberg
atgaagagagcagaagaagtgacggaggaggttgccggagtctctgcacgagaccgagtgttccg

SEQ ID NO: 177874 - DNA, 156 bp, Arabidopsis thaliana landsberg
gcttggaatgtttatgcttttgtcatggttcggactagagataacgatgattttaacgggtttatggagaaaaagaattggccacaaaaattggatgagctcctacatttcaatatagttacggtctcggatataagcaatggatggccacaataa

SEQ ID NO: 177875 - DNA, 192 bp, Arabidopsis thaliana landsberg
attcaggagaaggagttaagacggtgttcgccattcttagaccgcttatcattgccaagggaggctgctttgagctctaatgaatggaagtctgttcctgatatttggagatcatctgtggagaagtacggtgacagagttgcggtggtagatccgtatcatgacccgccttctacattcacgtacagacag

SEQ ID NO: 177876 - DNA, 126 bp, Arabidopsis thaliana landsberg
gaaatgcaggtggacacggagcccttcccaataaatatgatcaacttcaatggcaaaaaagtcccacattcgcctagcgcggccgataagggaaaaggcaaggaggtcctcatcggtgatgcatga

SEQ ID NO: 177877 - DNA, 88 bp, Arabidopsis thaliana landsberg
gaaggtctatgtcgccggccagctctaccccgacatccgcgtccccttccgcgaggtcgccgtccaccccagcgccaacgagccgccg

SEQ ID NO: 177878 - DNA, 87 bp, Arabidopsis thaliana landsberg
ggtaataaaaaacagagctttataatggccgatgaagaggaagaagaagaagaagaagaaggaaaagatgatagtgaaaggatttga

SEQ ID NO: 177879 - DNA, 158 bp, Arabidopsis thaliana landsberg
aaggatcaggaattcaggatgagttaagaaggagattggtacgatgtaccttgtacgcttttcgcctacgtaaaccggaaaatgtccctttggtacgtcaagagggagaccttcctcgtcgtagcattgtttcttgcctaagctcgagcatctcttga

SEQ ID NO: 177880 - DNA, 997 bp, Arabidopsis thaliana landsberg
atgatcatcgactcgatatttcttgcagcatggcatgtttacttctggctagcttttattcctttgatcgtaagtccctgaaaaccttctcaaagcatgtctatgcttcaaacctatctaaatcaactctttttacgcggttttctcctcagcttttacttgccgtggggacgaagttagagcatatcatcacagatttggctcatgaagttgcagagaaacacattgctgtggaaggagatttggttgtccgaccatcagatgatttgttctggtttcaaagtccccggctagttctcttcttgatccatttcattcttttccaaaactccttcgaaatcgcctacttcttctttatccttgtaagtactctttaccattaatcgatctaaaccaataatctagaagatatcaagatacgtacagagaaaagtgaaaactcatgcaattgtaacaacagtttcaatttggttgggattcatgcatcatggatcatgtcaagttcgtaattccaagactcgtcatcgggtaataatagccaaagctacttaatatcgatcttgttatgagcttcttgatcttgaaatgtgaaatatttttgcagggtaataattcagcttctctgcagttacagtaccttaccgctctatgcactcgtaactcaggtacagattctacatctcttagtcaattttcttgtgttcttatatcaaactagaccaagacacaaactcaaaaccaaaccttctaattttttggtgaaaagatgggaagttcattcaaaggtgcaatattcaacgagcagacacaggaacatcttgttggatgggcaaaaatggctaaaaggggagtgaagaaaggcgcaacacaagtaggtaccagtcatgatgctactagtccaagaccgtctattcagttgaactccttgctaggaaaaggctcctctcaacaaaatcagaaccccaaggaaaaatcagagattgctcaccatgattaa

SEQ ID NO: 177881 - DNA, 82 bp, Arabidopsis thaliana landsberg
atgatcattggatccgatccagacccgatctgcgagaagcctctctttgagcttcatactgcaatacagaactttttacctg

SEQ ID NO: 177882 - DNA, 578 bp, Arabidopsis thaliana landsberg
cttccgtggggaagacgttcgcaggaactttctcagtcacattcaaaaggagtttcaaagaaaaggaatcactccgttcatcgataatgagattaggagaggagaatccatcggtcctgaacttattaaggccattagagaatctaagatcgcgattgttctgctctcgaggaactatgcttcttcaaagtggtgtcttgacgaattggtggagattatggagtgtaagaaaaagtttggtctaaccgtgtttgccgttttctatgaagttgatccatcccatgttaagaagctgaccggaaaattcggagctgtctttaagaaaacttgtaagggtagaacaaaggagaatattatgagatggagacaagcttttgaggaagtggctacaatacgtggttatgattcaagaaactggttcgtctttttgattttccactttgctcttaatctttcaacacattagaggaaaatggactaaccctctctgtttttttttggtagggaaaatgaagctgccatgattgaagaaatttccaaaagattgattaattcctcaccgttcagtgggtttgaag

SEQ ID NO: 177883 - DNA, 531 bp, Arabidopsis thaliana landsberg
atgcgtgccaactaccgccggatcaaggtggccgcgaagaacgtcgactccctcgagcacgacatcgccgactccgacgactacttccagtaccacggcggcatggtcgccaccgtccgcgcgctgaccggctccgaccccaaggcgtacgtcggcgactcgacctcgccggacgccatcaagacacgcacgctgcaggaggagaccaaccgcgtcttccgggcgcgcgtggtcaacccgcggtggatctcggcgatgcagcggcacggctacaagggcgcgttcgagctcgcggccaccgtcgactacctcttcggcttcgacgccaccgcgggggtcgtgcacgactggatgtacgacaagctcgcccaggagtacgtcctggacgagacgaaccaggagttcctcaggaagtcgaacccgtgggcgctgcgcggcatcgtggagcggctccacgaggcggccgagcgcgggctgtgggccaagcccgacgccgacgtgctggccgcgatgcagcaggtctacctggag

SEQ ID NO: 177884 - DNA, 620 bp, Arabidopsis thaliana landsberg
  unsure (1)..(620): unsure at all n locations
atggaggcaaatggaatagagccagattcgattgcttgttcagctttgatgagagctttcaacaagggaggtcaaccgtcaaatgtctttgtcctgatggatttaatgcgggaaaaagaaatccccttcactggtgcggtcttctttgagatattttcggcttgtaacacgtaagttcttgtatgtctatttaaaacattacannnnnnnnnnnnnnnnnnnnnnnnnnnnngcaatatatcacccttcttctttcaacattgcagcttgcaggaatggaaaagagcaatagacctcatccaaatgatggatccgtacctgccatcgctttctatcgggttaactaatcagatgctgcatcttttcgggaagagtggtaaagttgaagcaatgatgaaggtacaacgaacttttagttgatcagctaattagacttccacattatctttcttttctgccaacctgtttacaaaagaatgttaacgaaaccatgttgtaccactaaacacacgcagctgttctataagattattgcctctggtgttggaatcaacctcaagacttatgcaatactgttggaacatcttttagctgttggaaactggagaaaatacattgag

SEQ ID NO: 177885 - DNA, 895 bp, Arabidopsis thaliana landsberg
tgccgaaccaagaactcttctactatactccaaacttgctccattcgatactcctggtggaggtgggttttacaaaaatgcacaaaaacaaaaatacagattaaagttcagtaactctcatactcagaaagacaatttagagtgaagtaaaggtttttgatatggtaatccgtatcgaattcggcatagaagcagctaaattctcataactccagcagccaaactaatgatagccattagattaagcaaacagaccaagtacattaagtcttatacttagaatgacaactagattgagcagaaggttcttgatttagtaatctgtgctatattctcataactccagtagccaaactaatactagccattagattaagcaaacaaaccaaagtcttatacttagaaaggcaaatagattgagcagaaggttcttgactccgtaatctgtgttaattttggcaaaactaatcatacattgcgacagccatcaagattttggtttacttatatcaatgctataaacaaaagcttctcgatcttttcgcttattcgatatatcaagagagataagtaaaagagaaaccttgtgtgtaatccagaggcagtggtgaaggtggagaaatcaattgcgacgaaaatctctccgagtgatgatacgcagctctatccgaatgctcgaaagccaaagactgaggtctcgctcgatgaccggaatttgcagaatttgattgtaacttatcctgtccagatatctaaaatccacaagaaccacaacaaaatcaagaacaacaataaacatcactatcaattcaaagatcaaaagacacagaaacaagactcacagcgaatttcaaagttcgattgtagagagaaacaagtccagagaaaagcttaa

SEQ ID NO: 177886 - DNA, 610 bp, Arabidopsis thaliana landsberg
atggaagaagctgatccccataattccaatgccacagctgcaagttctgcttctagcacacagatggaagatgctgagccctataatcctgatgtcacagctgcaagttctacttgtagcacacagatggaagtagctgagccctataatcctggtgtcaccgctgcaagttctacttctagcacacagatggaagaagctgatccctataatcctgatgtcacagctgcaagttctacttctatcacaccgatggaagtagctgagccctataatcctgatgtcacagctgcaagttctacttctatcacaccgatggaagtagctgagccctataatcctgatgtcacagctgcaagttctgtttctccgaggtatttgtttctggtttctctcgatagaaattcattagaagcaacaaatatagttaatagatttgctttctgttttctattaatcatatagcaagaggtctggaggtttggttgattatgaggatgacgaagatgagctagagaagagtaaaagacagaagctcagttcaactagtgaaggaaataagaacaccccagaacaaggtggtgaagctaaggaacctggagaactctaa

SEQ ID NO: 177887 - DNA, 477 bp, Arabidopsis thaliana landsberg
gggatgcgagagaatcagaacgtggattctcgaatgcatgatccaagacgccatgatacagagttgagactcgaacgagagaagatggtaaacagagaacttgaaaagcagaggatagaacctctaatcggtccactagtgaggcgatacatgcaagcaaagagagataaagaagttgaacagagagagagagctagcattgagagccagaggatagtggctcaagagaatctgcgacaacagagattgcaggttaaaaaaactgaaacaagacatgattctgtttctttactttggatgatacaacacatagagaagataacttatactatgttttcttactgtgacagtgtgacttgtcatttgatttattgtttcggttcacaggggatgcgagagaatcacaacgtggatgctcatgatcaagagaaaactcaggaactcggtttcaaaggaaaagagggagatggagtttaa

SEQ ID NO: 177888 - DNA, 146 bp, Arabidopsis thaliana landsberg
ctccacatattttctttaaaacaaatcgaattattcttaaagaaagtcacgtaaaaaagattatcataaaaataagaatttatcggagaattaacgacaccgaccgacccaaccaaatcctcgtggacccgttttcttttggttga

SEQ ID NO: 177889 - DNA, 390 bp, Arabidopsis thaliana landsberg
gaagacttccgaagagagttcaagaagaagtattttccacaagaagttagagataagttggaagcgaagtttttggagttaaagcaagccaaaagaagtgtgcggaaatatgaaacagaattttcaagacttcgtagatacgcttcttgtggcaatgaagctgccaaaattcgaagatttatttgtggtttcagactagatattcgaagcagactccaagtagttgttttctcgagtctacaagagttagtcgaaagagttgttaatatagaggaagcaatagctaaagaggaagcgacattgctactaagaaatggtggaagtaattcgagattgatagcaggtcaatcaagtaatcggagaaaagttaaagttaacctaaaaggttga

SEQ ID NO: 177890 - DNA, 67 bp, Arabidopsis thaliana landsberg
atgactatcgtgttacagactcaggtttatgattcaatcaacaccattggaaagcgatttggagaac

SEQ ID NO: 177891 - DNA, 671 bp, Arabidopsis thaliana landsberg
atgaatccacaagctgtgattcatggctctaaagagagggataaagagtggaactcttcacaaaacggtgaagaaacattgagtctgcgaaactcagaagctaagtctactaaagagattgagagacaagaagttacacaagaagaaaaatctgtgagtcatgggtctagagaaaaggataaagagagaaattctttacaatacggtgaaaaaatgtgttttctgcggaactcggaagctaagtctactaaagagattgagagaaacaagtctcaagaagtatcacaaggagaagaatctgcgagtcatggctctagagagagtgctaaagagaaaaattcttcacaacaggatgatgaaacgtcgactcatcgaaacccaaatgacaaaaaaggcattaaggaacccgaggacgaagagagcaagaaggtagaacgcgaagaaacgggagaaaacgtggaagaagcatcagtagagtttgtaaatgattgggatggaaacgaaatggaagaagaagaagaagaatatggagattattttaatggagatgatgattggattcacgatatatcgcggccacgaagttactgggaagatctaaggaaagaaaggtatcttgaggttctcaacactgaatcagagaagaaagatatttgcaatctcattgagag

SEQ ID NO: 177892 - DNA, 178 bp, Arabidopsis thaliana landsberg
atgctgtacgccgcgaggaagtacagaggtctcggtctggtcgaagtgggaactgaagtactactacagcatcacaacagagcggaaaagttgaccaaggtaccagacgcgcgatttcaagcagtgtacgacggcagcagtgaaatggatcagtgcaccagggccctgggcatagaag

SEQ ID NO: 177893 - DNA, 629 bp, Arabidopsis thaliana landsberg
  unsure (1)..(629): unsure at all n locations
atgttgggctactgtaacgaggtttggcgcctagaagacaagttctacgggctcgagcccaaccacgttgcccgacgctacaacgagactgcggacgagctggctaagatagcctcgggacggacaatggttcccccggacgtcttctctcgagacctacatcaaccctccgtcaagaccgacgacacgcctgagcccgagaaggtctcggctctgcccgaggcgccctcggctcagcccgaggcaccctcggcccccgagggtgaggcactgcgcgtcgagggagagcggaatgggtcccgcctaatcgagactagcagaccccgtacctgcaatatctccaccgaggagagctgcccctcggaccgagccgaagctcggcaganctcgcggcgcgccaagtcgttcgtcttgctcggggacgggaaggagctctaccaccgcagcccctcaggcatcctccagcgatgcatatccatcgccgaaggtcaggagttattaaaagaaatacactcgggggcttgcggtcaccacgcagcacctcgagcccttgttgggaatgccttccgacagggtttctactggccaaccgcgtggccgacgccaccaggattgtacgcacctgctaa

SEQ ID NO: 177894 - DNA, 165 bp, Arabidopsis thaliana landsberg
gcatatcatcgaacaacttacaggcatccaccaaagtctaccaaagaagagcttcttcttgggtatcctctacagaagatgagttcttatgagattgggcatataaatctgatctgggcacaagccgacttcgaagttcatggcctacagagaaagaagaaataa

SEQ ID NO: 177895 - DNA, 597 bp, Arabidopsis thaliana landsberg
ctatgtacacagtcgaattccagaaagaggccttccgcatgctcacatactttcgtttatggactctaatagtaaactaccaacagctgacgacatcgacaagataatatctgcggagattcctaacaaagacaaagaacctgagctctatgaggttatcaaaaactctatgatgcatggaccatgtggttcagcaaataccagttctccgtgtatggttgatggtcagtgttcaaagctatatccaaaaaaacatcaagaaatcactaaagtgggtgctgatggttatccaatctataggagaagactcacagacgactatatagaaaaggggggtgttaaatgtgacaataggtatgttgtgccctataataagaagctatctttaagataccaagctcatatcaatgtcgaatggtgtaaccagaacggttctataaaatacttatttaaatacatcaacaaaggtccggaccgtgtagtttttattgttgagccagtaaaagaggcaacaagtagtgacactacagctcctgtagttgagtcagatacaacagagaaaaagaaggatgaaataaaggattggttcgattgcag

SEQ ID NO: 177896 - DNA, 264 bp, Arabidopsis thaliana landsberg
ggctgtgccgacgccggcctgtgctacccgccgcaaaccacgctgatcgacctgggcggcagtgtgccgccggcggccgaacaagccagtgaccaggccctggccagcggtctgcaaaaggggcacctggcctggagcctgctggcgttctcggcctgggcctgttgctggcttttaccccctgctcgctgccgatgctgccgatcctcccgggctggtctgggcaatggcgccagtgcccggccggctggatattgccggggt

SEQ ID NO: 177897 - DNA, 3268 bp, Arabidopsis thaliana landsberg
atggcggtggacgtagatgccataaacctgattgccagaagggagctgaaggtaaaacagtgtactgtaaagcccacggaggtggtcgcagatgtgaatatcttggatgcaccaaaggcgcagaaggcagtactgatttttgtatagctcatggaggtggtcgaagatgcaaccatgaagattgcacacgatctgcttggggaagaacagaattctgtgtcaagcacggtggaggagcgagatgcaaaacatacggctgcggaaaaagcgctagtggtcctttgccattctgccgagcccatggtggtggtaaaaaatgcagccatgaagattgcacaggatttgctaggggaagatcaggactctgtctcatgcacggtgggggaaagagatgccaaagagagaactgcactaaaagcgctgaaggtctttcgggactctgcatatcccatggtggtggtcggcgatgtcaatctattggatgcacaaaaggagcgaaagggagcaaaatgttctgcaaagcatgcataactaaaaggcctctaacgattgatggaggaggaaatatgggaggggtaacaacaggtgatgccttgaactatctcaaagctgtgaaggacaagtttgaagacagtgagaaatatgacactttccttgaagtcttgaatgactgtaaacatcaggggtactctcttctatctttccattatgtctctcttcttacagcaggaaatatattaattttttgtggtgactcatgttggatgtagagttgacactagtggcgtcatagcccgattaaaagatttgttcaagggccatgacgacttacttttgggttttaatacctacttgtcaaaggagtaccaaataaccattctgcccgaggatgatttccctatcgattttcttgacaaggttgaggtatgtatataatgtagtaaacccgatacctatttcatcatgatcaggtttaagattcatctacaatttttttctcggtgccttttgatcaggtagacttggttattttagataggtctttcctattttcttttaatagggggatttagttttcaactcaaggtaactagccggtttcccttctattgctcttctttatcttgactctgtatctaagcttaccaagtcggatgtgtgcttggatttgttttcccggttcttgttttaactcgatatgtaacaatgtgcagggaccttatgaaatgacatatcagcaagctcaaacagttcaagccaatgccaatatgcaacctcaaactgagtacccttcttcctctgcggttcaatcattttcatcgggtgaacctcagatccccacctcagctcctgattcttcactactagctaaacagtaatacctcaggtttaactatcatcgagcacatgtcacaacatcctctaaatgttgacaaacaagttaatgatggctataactggcaaaagtatgggcaaaagaaagttaaaggcagcaagtttcctttaatctattacaagtgcacatatctaggatgtccttccaagaagaaggttgagagatctcttgatggacaagtagcagaaatcgtctacaaagatcgacacaatcacgaacctcctaaccaaggaaaagatggtagcaccacatatctaagtgggagttcgacacacatcaattgcatgagctctgaattgacagcatcacagtttagctccaacaagactaagatagagcaacaggaagcaacaagtctagctacgacaatagagtacatgtctgaggcaagtgacaatgaagaagacagtaatggagaaactagtgagggagagaaagatgaagacgagcctgaaccaaagagaaggtaaagttataagctttgttgatgattgataatccatatttttggttttttgagtggagagatcatggaatctgcagaattacagaagttcaggtttcggaactagctgatgcttcagatagaaccgtgagagagcctagggttattttccaaacaacgagtgaagttgataatttagatgatggatataggtggcggaaatatggacagaaagttgttaaagggaatccttatccaaggtaatacacaaaaaaatcatcgatcggtatacctattaaactctttgaatagcggaaatcggtgatcaatatagctttatgtctcaaaacattcttgctaatattctctttttgacccttaggttttcctcctctaaagattatgatgtcgtaatcagatacggaagagcagatataagcaatgaggatttcattagccatcttcgtgcttccctctgccggagagggatttctgtctatgaagaatttaatgaagtggatgcacttccaaaatgtagggttttgattatagtattaacaagcacatatgtcccttcgaacctcttaaacattcttgaacaccaacatacagaggatcgagtggtttatccaattttctacagactatcaccatatgattttgtctgtaacagcaagaattatgagagattttatctccaagatgagccaaaaaaatggcaagctgctttgaaggaaataactcagatgcctggctacacattgacagataagtacgtgatccctgggttctaaatgtagaaagtctttggttttagagaattgaataaatttttatttggcaaagtaaggctatagaagattagaagtttattatactatcctctctttcgtctgatgtttgtattgtctactttattcttaaaatctcgcaggtctgaatctgaacttatagatgagattgtaagagatgctttaaaggtgctatgttctgctgataaggtgaacatgattgggatggatatgcaagtagaggagattttgtcactgctatgcattgagtcccttgatgttcgcagcattggtatatggggtacagttggtataggaaaaacaaccattgctgaagagatctttcgcaaaatctctgtccaatatgagacctgtgtcgtccttaaggacctccacaaagaagttgaggtaaaaggtcacgatgctgtgagagagaattttctgtctgaagttttagaggtagaacctcatgttatccggatatctgacattaaaacaagcttcttgagaagtcggcttcagcgtaaaaggatccttgttattcttgacgatgtgaatgattacagagatgttgacacctttttggggacgcttaactattttggtccacgaagcaaaattatcatgacctcttga

SEQ ID NO: 177898 - DNA, 667 bp, Arabidopsis thaliana landsberg
atgaattggactagaggaaaaactttaggccgtggctcaacggccaccgtttccgccgccacttgtcacgaatccggcgaaacactcgccgtaaaatccgccgagtttcaccggtcggagttcttgcaaagagaagccaagattctctcctcattaaactctccgtacgtcatcggatacagaggatgcgaaattacgagagagcccttccacaacaacggagaagctacgacttacagtcttcttatggagtacgcgccgtacggaacgttgaccgacgtagcgaccaagaacggcggcttcattgacgaggctcgggtcgtgaagtacacgcgccagatacttcttgggttggagtacattcataactcaaagggaattgcgcattgcgacattaagggaagcaacgtgttggtcggagagaacggagaagccaagatcgctgatttcgggtgtgcgaaatgggttgaaccggaaataaccgaaccggttagaggaacgccggcgttcatggctccagaagcggcgcgtggagagagacaagggaaagagagtgatatatgggcggtgggttgtacggtgatagagatggttaccgggtctcagccgtggattggggcggattttaccgacccggtttcggttctttaccgggtcggatatttag

SEQ ID NO: 177899 - DNA, 219 bp, Arabidopsis thaliana landsberg
atacctttggaacatcagcagctgggtcatcgaggcgttgcgtcgacgggaagagatggtgccactggtgcgtggggaagtggatttgagaccagagaaagctggtatccaaacgcagttttcagagccattgtgagaggagagctctcacaagcgctagagaacatgcagaagacattgatgctctctatggttaaattgaaagagagagagaaatga

SEQ ID NO: 177900 - DNA, 967 bp, Arabidopsis thaliana landsberg
atggacgatcaagctactctggtagaagacacagacaaatacgatgatgataaagaagaagaagacttgtgcaggatttgccgatcaccggaggaaccaggaaaccccttatggtatccggtgcgcgtgtcgaggctccatcaatgttcatcaagactgtcttcatatctggctcaatctccgcggatacaagcagtgcgaggttattatacaaacctctttttctctaaagaatgaggttcttgttctatagcgttatgtgacaatttcgttttcgattaaacttcaatttctgcgattttagaaagaatatcaaagttatttactagtattttgttatgagtgatgtttttggggattatatttgtgtcatggtgttgggattttcgatttcttctctgtttcttgtaatatgggtttaagaagaatctcgcacaccaaatgtttgatgaaatgctctctgttttcattgtaggacgctccagagagacttccagttcacgagtttctaatacgtgtttgtgttaatgagagcatcaccttacgtgagaatggttgttccttgggctatggcgtttatcttgaacacatactgcctttctttacatcctttgggccaagaagttgttgttgggttcaagagagattatggaatgtctaccaagtccgcatgtttcttaaatggcctgttatacaacggtcatcttgtgtttttcatgaggatacccatacacgagcccattatcgcgagacatcctgctgggtttcaggctgacatcttgattaagaatgtcttaggagatgggtttgtgcttgttttatggaaatataacaagatcgtttgtgagtggtattattctctattgcaaagcttcttcggggacctcctaggctagttggtgttgctcttcacgaacttggagccattggacggctgcttttctttctggataacaaatcttttgat

SEQ ID NO: 177901 - DNA, 395 bp, Arabidopsis thaliana landsberg
atgtttacgcgggagataacagcaaaggacgtgaaagccactgagaaaaacaggattcgatactcttccaaacacataaaacatcttcctcctggaaccattactgagttcgaatggaaggattattgtcccttgggattcaggttcttttccctctctctctctctgtatgtctttgaggatttctcattgtctcatttttctttacttttggttggttcttttcttgcagacttatacaggaacttgaggatatcaatcatgatgagtacatgaagtctatctgtaatgatgagaccttaaggaagctttcttctagcaaagttggtaacatgtttcttctttccaaagatgaccgttttctcattaagattctacgcaaatccgaaatcaag

SEQ ID NO: 177902 - DNA, 327 bp, Arabidopsis thaliana landsberg
gtgatgtcgcctccggagaacttcccgattcctgacgtgggcaggttcgtcgatctgttcgggtacggtccgctccgcggcggcattccgatctcggtctacgcacccgatggtcagctgctctactcctacgtcacaacggattccagcgtcggcgccatgcaggagatgccgaactggctgatgaagatgctggtcaacatagaaggcgtggtgaacaccggaaatgccgcgttcgcgcaccaccccgtctacatctccaacgccgacggtggctcaatgaccttctacggcaacccttctggagccaacaccgtagagctgtga

SEQ ID NO: 177903 - DNA, 443 bp, Arabidopsis thaliana landsberg
gacgtaagctaagaccaaattatattcgggataatgaagatctagagtggtattttgaggatgtgagtgaagaaggatttagaagtatattgcatgttgaatcaaatatgaggatgaatgagaatgaacgatttgataaaatattaagagaggatttggttagacaaaatgttgtaaataatgaagatacatctctaattgttggaacggatgagattggtggtgctgtccttgctatgtatgtaggagaaccatcagaggttgtggtggagaatgaggatatatatttagaagaaaatgtgcgtggaccaattttatgggatgataagcttgaaattacaataggccaagaatttggaagcaaagaagcaacccaaagtttagttgaaaaggatggacataacaatgtctttgagttttttgtaatgaaatatagccgttaa

SEQ ID NO: 177904 - DNA, 384 bp, Arabidopsis thaliana landsberg
ctgacggatatgacattggcaaaagaacaccaaaccaacttcgtgaatttttatcagttaacaagaccaaaaagctgggaatggatttcactgtcactgtacttactactggtttttggccaaagttacaaaacaaccgaccctcaatctacccattgaaatggtaagtcgtttattttgtaagtcttgaaacagaaaagaagaagattgtctgagctccaattttctttttggttcaggtcaactgtggttaaggcttttaaggcctattatggaccaaaaaccaattccaggagactttcatggatttattctctaggaacttgtcagttagctggaaaattcgataaaaaaacaattgagatagtagttaccacctaccag

SEQ ID NO: 177905 - DNA, 78 bp, Arabidopsis thaliana landsberg
atggagaaggtactagaacgctacgagaggtattcttacgccgagagacagctgattgcacctgactctcacgttaat

SEQ ID NO: 177906 - DNA, 624 bp, Arabidopsis thaliana landsberg
gttgttaggttggttaaagagggaactggaaaaaccacattggcaataggtgatggtgcaaatgatgttgggatgattcaagaagctgacattggtgtaggaattagtggggttgaaggaatgcaggttcagtttttctctcagcaccatgccttttctgtttttcaagccatgttttctgtttcttgactagcagaaagttcattgaaaatcaaaccatgtcgacatttttgctgatccttcttacttttgcaggctgttatggctagtgacttttcgattgcccagttccggtttctggaacgattactcgtcgtccacggacactggtgctacaaaaggatagctcagatggtaatatgtagttcttttggccattttagttactcttacatttagtttgtttctaaccttatgttgttctacatccagatttgctatttcttctacaaaaacatagcatttggtctcactctcttctactttgaggctttcaccgggttttccgggcaatcagtatacaatgactactacttgttgctcttcaatgttgtccttacctcattgccagtaatcgcccttggtgtctttgaacaggatgtttcttccgagatctgcttacag

SEQ ID NO: 177907 - DNA, 48 bp, Arabidopsis thaliana landsberg
atggctgtggtggtgcagccgggtcccccccccccccggcccgggcgg

SEQ ID NO: 177908 - DNA, 131 bp, Arabidopsis thaliana landsberg
atgcatggcccaccggtcagtgaccaagcgcgtgtgaacgggggaacggtgactgacgatgcggcccacgtatcagagacaaatggtacaaacgagtgcgaggctgagcaaatggcaagtgggcccatcct

SEQ ID NO: 177909 - DNA, 302 bp, Arabidopsis thaliana landsberg
gaaagaatgtgaagatcattcatctgaagaccagattgtgacagctcctatcacacgggtatggacaatctattagcttcacttcagctctatcgaaataccaatctccaaccgctatcgccaccgcctaaatcgccgtttcaaaacgtttaaaatttgattatttctcataaatttgatgttttaaacttctcaaggcaaaatgaaacatggaatgcatacctttttgtgtataacaggagaatcatcggcgaaccaagtgtcttgcctttcggtttggcaatgagcaaagcaagaattga

SEQ ID NO: 177910 - DNA, 73 bp, Arabidopsis thaliana landsberg
atgatcggagggatcaacgaaacggtgaagagagatccgaaagttttagtacctaagaagaagtcaaccaatg

SEQ ID NO: 177911 - DNA, 399 bp, Arabidopsis thaliana landsberg
gtacaagtataacttcccatttcttgaaacaaatggctatttgcgcattgatgaaaaacgtgttgaacctctatacaagcatgtctttccaccagcgcttgcccctggacttgctttcgttggtttgccagcaatggttagtatcaattgaactttttctcttggactttcgagttcacgtctcactttattagttttgatctgtgattttctttttaaattcaggggatagtatttgttatgtttgaaatccaaagcaaatgggtggcagcagtcttgtcaggacgagttacacttccctcaacagataagatgatggaagatattaatgcgtggtatgcgtcgcttgatgccttaggtattcccaagagacatacgcataccataggtagaattcag

SEQ ID NO: 177912 - DNA, 114 bp, Arabidopsis thaliana landsberg
cgaggacagcagccagaagggagtcaaaacaatcaccttcagagagacttcagagaggagtctgaagctcgcacagtcaatagcactgtgccagagtcaaagcacatttattga

SEQ ID NO: 177913 - DNA, 244 bp, Arabidopsis thaliana landsberg
ttctattgtggactgtgcctcctctgaaccatatggccaccatacaatggatgcacccttatcagaagtttctcccaatttggttcctggttacgcatttcagttctttcccaagaaagaagaactgctaaatgacttgaagaatgagtttatccactgtcagtcggatggtgcaagccgaatggtttttgatagacatgtaggattcgataacggaacttcagagaggaattctgggcctgat

SEQ ID NO: 177914 - DNA, 199 bp, Arabidopsis thaliana landsberg
gatgcaaatagaagaagcgattgatgagtacattagggaaagaagaggtagactcgtggggctttcgacacaaacttatcttaccggtagtttaatagcagcttcttcgccggttagaaagctattgcttgtagttatgttgatgattctgtttcgtgatcaaattggtcatactcgatatgattgtggcagtctataa

SEQ ID NO: 177915 - DNA, 305 bp, Arabidopsis thaliana landsberg
aaaatacgccagttgcgagggaagaaaccgtcgctagtccctcgcaaagagcagttaacgagggaattgcgacgaattttagttcctcgcaaaacgcgcgtcgcaaaatcaaattcgtagcaagtccctcgcaaattttgcgaggaacaaattacctcgcaaaacacacgcaatttgcgagggaagtaatccgtagcaaattcacggcaaattatgggtctcgcaaatttctcgctagttgcggcggacgacctgtctcgcgaagcacacgcaatttgcgagggacgtactcggtagcaaattag

SEQ ID NO: 177916 - DNA, 611 bp, Arabidopsis thaliana landsberg
atggcaaaagaaaatgagaaggtgcaagatgcatttacatccacattttcctcaatggatgctaactttgtctctaggacaaatgaacttcacgcagctgttaatggtaaccacactaaacctctgttccattccctactcaagaactactcaaaaacgtcctaatccttggttttacagactcattgatgcaagaccgtgagaacaaagaaacaacagaggctatagtagagacttgcatgaaccaggtcacattattgcaggagaatcatggacaagctgtttcaaacattagaaacaaagcagaacagtctctcataaaagactatcaggtacttaagcaatcataatggaaaatctatagtgtgatctatatgtgtatacattaacagcaaagctttggataaaatgaacaggttgatcagcacaagaacgaaacaccaaagaaacaatccataaatgtgccaagcctggattcgattgaggagatgaggactttgttttcgcagaatactctcagcgaagaacacacaagtttggagaaaatatcaacaaaacaaggacttggcgaagctaacaacagaactccattcttggaagtaaacaaatga

SEQ ID NO: 177917 - DNA, 54 bp, Arabidopsis thaliana landsberg
gtggtggaggaggaggaaaagaaaaactatcacacggatggtgatgccatgaag

SEQ ID NO: 177918 - DNA, 714 bp, Arabidopsis thaliana landsberg
atgacggtgagactatagtaaagaggaataatcaaactcattgcaattgaagtttgatttacgaaaagaaaaccctaaaacacctcagcaaaaattatgttattaatcaacacactaaatatagacataaagttacttttagtgtttttcttcttatatttcgttacttaataatagaaatttgtgaacttggaacgatgaagaaaaagatcatggttatataataattacgtataaactaaaaaattgtattatacgtttgaactttcttatagtcaaaggagaggttagtttcgtcaatagaggttaccaatatttaatggacttgagagaaatttcgttcgtttccttacaagtccattgtcacgatcccgtaattaatataaatcttaagcttaactcatcgacatcaacaaaagattagtcaagaaaaaaaaaaaactcttacggagagaaaacattcaaaacaaaatgaaagtttggagccaaagattatcgtttctaatcgtcatgatcttcattttggccgggcttcattcctcttccgccggccgcaagctccctagtatgacgacgacggaggagttccagcgattaagttttgacggcaagagaatattatcggaagtgaccgccgacaagaagtatgatcggatctacggagcttctgctagattagttcccaaaggtcctaacccgcttcacaacaaatga

SEQ ID NO: 177919 - DNA, 664 bp, Arabidopsis thaliana landsberg
gaagtttaagagcgtagatgtgccaacgactctgcttataacaacaccagatacatgtgctgtcttcattgtgtctaaagggaagctcttaacaagcagatcagcgagtcggcctcagacacctcaaggtcctcacacgcctcaaggtcctcagacacctcaagctcctcaacaccctcctcatccttcaaaacatccctcaatgatgtctgatcctggcccaacaagttccacttccagtgaatccggaaggtaattaatgaactcaaattttatccggttgtcttgtgaatgaatgccttttttgcttcatagtagtcattgggtttgccaatcttgcaggtcatctcctgcattgaacggagaattatctccacctacacctcattacaagccatctttgtataggagttctatgtcagagcttagtaatgaatttcccagcgatcacagtgctgaatcaaatgctagcttctacagcatcctaggacgatccacatatggaggaagctcacactcttccatggttagtattcccatcacgtttcaaatcgatattcttaccacctatttgcctggcgttgacatttttttttcgaatctgtagtctgagataactgatggagaggaaagcttatctgggggcaatatcactgaacaccag

SEQ ID NO: 177920 - DNA, 59 bp, Arabidopsis thaliana landsberg
ttgacttttcctcaaactcagtcaacgttaagaagtcgtcactgagacttgatcagccg

SEQ ID NO: 177921 - DNA, 121 bp, Arabidopsis thaliana landsberg
tgaccaaatagcgacccaagaaggattacggcccaacccaagagagttatccagcttgattacgtcccagaccccctatgacccgatccggaccggctcagaccatctcacaaaccgataa

SEQ ID NO: 177922 - DNA, 414 bp, Arabidopsis thaliana landsberg
aaccggactcgtgtttcgatgatcttagtgttcgagtttcgtaatgtgaaggtaaccaatgatgaggtaacgtttctaacgcgtggatatgcgaagaaggatgatgttgttttgtctcttatgcatgataagcttaagctgcttattgttactgatggagagaaaggttgcagatactacacaaaggtaagggatcaaattcgacatgattgtgtgtgttttggagttatctaaacaaagtttttcgactgtcgaaaagcgcagaaattcaaagggagagtgcctggatacgctgtgaaaacagttgatacaactggagctggtgattcttttgttggtgcatttcttgtctcattgggaaaagatggctccatactcgatgtacgtataaccaaagacattttcagttcatag

SEQ ID NO: 177923 - DNA, 440 bp, Arabidopsis thaliana landsberg
aaaaccagtgtcaaggaacttgacttagaggctgcattgaccgagcgccaggtttaaattctcttccctacttgtcgtcaccaatttcctttaacccactgctacggaaatattctcgtttgtatttgtttatttttaatagatttccacttcacactgtcttggtaactccgattgtcgtcacagttccattttaaggctttgcactttgtaattgacacattgttgtatgaatcttttatactgatagtggttaataactcaatactctcctgttgtcttgtgcagcaccacaataaactaatgatggaagctaaagcaagaggagaaggatacaaaattgacaagctcagacgaaatatagagatggacgagtatgatttcttacactggcgccgatctttggaggaaagagaagcattgctcagagatatcagctc

SEQ ID NO: 177924 - DNA, 316 bp, Arabidopsis thaliana landsberg
atgtacaagcagcctagacaagagcttgaggcttatgattttgagcctacctctgttgacaagcttaggtactcaccggttaaccactctcgtagacggttttgtacgctcgagccatctcctgactctcctcctagtaatgctctatcgactgctacatatgatcatacatgtggctcttgtgtatcggatgatttgaatgccctcgaacaccagattaggggaatcgaatcggccatgatggggctgaactcgtccccctcccttgtcgattgcacggactcgtttaaaaacaaaacgagtcaacagattaatg

SEQ ID NO: 177925 - DNA, 539 bp, Arabidopsis thaliana landsberg
agaagataattgtggaaggagaagaagaagaagtagtagatgagattgaaaagtttttactctgttttgattttactacagagaggtttggaccgcgtcttcctctgccatttcactctgatgttttggaaactgtggctatatcttgtgttagagatgatcagcttgcggtgttatatcagcggtttgaaacatgggagatttgggttaccactaagatcgatcccactgcggtgtcctggagcatgtttttgtcagtggatatggaaccacccactggttttcagttcgacgacgaagctgggagcttctttattgacgaagagaacaaagtcgctgtattttttaattcagacttgtttaacccaagagtagaaaaccgaaaccgccgctacccgacagcttacatcattggacaagacggatacttcaaatccgcgactctccgggaagctcccgatctcgtaaaacctgacccctacttgtattgttgcccacttgtgtggtcttcttatgctccaagcttagtgcaactctaa

SEQ ID NO: 177926 - DNA, 1996 bp, Arabidopsis thaliana landsberg
tggtggtggtggtgtactggtgtattcagactcgaatccattgaaacgtatattacacgcagacgctactcttgactcagatggcaacccaataaggaagaagaaggtggtcgttcttggcagtggatggagcggctacagcttcttgagttacttgaacaaccctaactatgatgttcaagttgtctctcctcgtaactttttcctcttcactcctctcttgccaagtgtcaccaatggtactgtcgaagcccgtagcattgttgaacccattcgtggtcttatgcgcaagaaaggatttgagtacaaagaagcagagtgtgtcaagattgatgcatcgaacaagaaaatccactgccggtccaaggaagggtcaagtcttaagggcacaacagagtttgacatggattatgacattctcatcttagctgttggtgctaagcctaacacattcaacacccctggagttgaggaacatgcctatttcctcaaagaagcagaggatgctctaaacattcgtcattcagtcatcgactgtttcgagagagcctctcttccgaatctaactgaagaagagaggaaaaagattctgcatttcgttgtggttggtggaggaccaactggagtcgagttctctgcagagcttcatgatttcctagtccaggatgtggctaagatttacccaaaggtccaagagttcacaaaaatcactcttcttgaagcaggcgaccacattctcaacatgtaagttccacccatcaagcttcattaactttggctaaatctactgcttttctaatgttggttcaattctacttcaggtttgacaagagaatcactgcttttgctgaggaaaagttccagcgagatggtattgatctgaagacaggttcaatggttgtgggagtgactgctgatgagatatccacaaaggaaagagaaactggcaagattgtctccaaaccttatggtatggttgtgtggtcaacaggaattggttcacgtcctgtcatcaaagactttatgcagcagattggtcaggttagataacacttgatcacatgaagaaatcatttgactaaccaaatcatttgctagtgtcccacctaactagattgagtatggttacagggacagagacgtgtcttggctaccgacgaatggcttagagtagagggatgtgacggtgtctatgctttacgtgacactgcttctatcaaccaacgcagagtcatggtatcatcttcttgacattgttcctttgtgtcacatctcagttgatgaatgaatctttaaccttctgttttgtcttgatgttgttgaacaaacaggaagatatagctgcgattttcaacaaagcagacaagggaaacacaggaactttgaacaagaaagatttcaatagtgtggttaaagacatttgccagaggtaccctcaggtggagctctacttgaagaagaataagctgaagaacattgcaaacttgctcaagagtgcaaatggtgaggacacacaagtgaatatcgaaaagtttaagcaagctctctctgaggttgattcacagatgaagaaccttccagcaactgcacaggtaagcttgttatagatcaaaacaagatgaaatcaatccaccacacagattttgatgttttgattcttatacaggttgcatcacaacaagggaagtaccttgcaaagtgcttcaacaaaatggagaaatgtgagaagaagccagagggaccattgaggttcagaggagagggtcgacatcggttccagccattcaggtacagacattttggatcgtttgctccactgggaggggaacagacagcagctgaactgccaggagattgggtctccattggacacagcagccagtggctttggtactctgtctacgccagcaaactggtgagctggcgcacaaggatgctcgtcatctctgattggactcgacgctttgtctttggccgtgacactagcagcatctaa

SEQ ID NO: 177927 - DNA, 104 bp, Arabidopsis thaliana landsberg
ctcccaaatcaaacatccaaaacagcaattttcgcagagatccgcaccaagtttgcaggagaatccgcgtaggatatagcaatttcaatctgaagtcggattga

SEQ ID NO: 177928 - DNA, 403 bp, Arabidopsis thaliana landsberg
ccgggaaaaaataaaggtgcagctttgtcgaagatagcgactaacaatcaacacggtgagaactcagagtactttgatggatggaaagcttacgacaaagatccttttcatctttcccgtaacccccatgggatcatccaaatgggtcttgcagagaatcaggtacagattatatataatccaataaatcatgttatatgttgatgtcgatgtgcatgaacttccatctattagctattatatatgaacacgtatacacatcaagctaatacctttttttcttcttttcaagtcaagttaaatacttaataacacatttttctaaacttcttacagctttgcttagatttgatcaaagattgggtcaaagagaacccagaagcttctatttgcacccttgaag

SEQ ID NO: 177929 - DNA, 690 bp, Arabidopsis thaliana landsberg
catactatatcgataagatatcttcatccggaagaaacccgatgttcttcttgcaaaaccctttcaagaaatctccttctttgagaaggcctagtttgcagaggcaaggctccaaagtctcagttgatatggaaaaaccagatgttactcacgaggtatgtccaaaggctttacaatatattctatgtttttgataatatatactggttctgataacaaaaaatgttccaatcagagtaaaaaagtcgagcggttgatgcttgagtcgagtacaagccatgcgattgtttgtgacaacctgaagaaggtgtatcctggtagagatgggaacccgcctaaattggctgttcgggggttatctcttgcagtgccttcaggagaatgcttcggcatgttaggtcccaatggtgctggaaagacttccttcatcaatatggtcagtcaaacggacaaaatattttgtgcacattagaccttagcttccaatatcattgctgatcgagaaactctatctagtgtatgcccaaacgaattgtgcgtcagccttagtaatatgtcctttgttttctttgtcagatgactgggctcctgaaaccgacatctgggacagcacttgttcaaggtttggatatatgcaatgatatggacagagtatacaccagcatgggcgtatgcccgcagcatgagtaa

SEQ ID NO: 177930 - DNA, 207 bp, Arabidopsis thaliana landsberg
aaatccctgagagctgaactgagagcagaaactctagtcacgagtttattaagagagaaattgtattccaaggaacaagaaatcgaacagctgcatgcagaagtagctgcaggggtacggggtaacgaagttcttcaatgtgaaattcaaaacgtattagacaacctatcactaaacaaccatcaactaaaagacctcaagctgcag

SEQ ID NO: 177931 - DNA, 65 bp, Arabidopsis thaliana landsberg
atgaatattccagaagatcctcagagactcactaaaatcgtttacgagcttttcggcaatggcag

SEQ ID NO: 177932 - DNA, 290 bp, Arabidopsis thaliana landsberg
agaaatacgaacgtgtgagcgacttggtcgggacacgtggcgaaaccgctggatacttcagcaactactcggatattttatgaccgttcgattcgacgtgatcttatctggtcggatctggaattcaacggtgtgtgatataccgttaggactttaatatgatctcgactattttactaatttaccctcgtctttctaacttcttcagttttgacgtttacatcttttctatatacagtggttgccgtttttaggtatggaaacaacgagacttatccttgagcgtttga

SEQ ID NO: 177933 - DNA, 205 bp, Arabidopsis thaliana landsberg
ctgcacagaatcagctgcttcttacttcgcgtctcatatggtcggagtcccgtacaacacagccagaaacaacggaacaggggatgctctgtttttgagcaacaatgagtataactactttaacaacttgaccggagcgttgactcgcaaatctatatggacaagcaaatctttcctttttatagtagatcttcttattaattaa

SEQ ID NO: 177934 - DNA, 284 bp, Arabidopsis thaliana landsberg
ctcaagaagtccggaccgcgaattcttatgaaatagtggaggataaattttgcaaaagaagagaagaaaatagtatgattgatgatgaggttgtcgtatctgcattgcctcgtgaagacggtgtgtttgatccgagttgcttgcctaagaagatgaccacgacgatgatagctagctctactcttagcccgagcagacagaaagatgaaacttgcttgggagagaaaggtgatgaagctctaagtccaccttctcctccattcatacacagagaagctagttag

SEQ ID NO: 177935 - DNA, 171 bp, Arabidopsis thaliana landsberg
atgccatctgtgggaaaaaaagaagaagatgcattatatggatggcaagtctggcacacgaacggcacaaaatgtccggagggatcaattccaattcgaaggctgatttcccttgggaacgagactatcatcacttctaacgccggggatagagtcaccggtggacacgag

SEQ ID NO: 177936 - DNA, 265 bp, Arabidopsis thaliana landsberg
gcagattttgtacaaaaagcgaggaaaagggtcagcgatgcactctggatcggcatattgctggctatcatcgtagcgatcatctttctgcgctcctggaaagccagcagcaccatcctgatcactattcccgtcacattagccttgtcgctcattgtgatgcatgccgtaggatataacttaaatatcatgactctcggcgcgatcgcagcttccatcgggctcattgtggatgatgccatcgtcgccgtggaacagatccatc

SEQ ID NO: 177937 - DNA, 785 bp, Arabidopsis thaliana landsberg
aatctggtgtacatctctggcttcaaccagattccttacatcatcaatcctattcttagccacgtcgtcgcttgcactctccagctctcttcttggctttaccgtaactccttattcatcattgtctgcattctctacaaaatcacatgtcatctacaaactcttcgtcttgatgacttcgctcgttgcttcgcttctgagatcactgacgttagatcagctctcggcgagcatcaaaagattcgtcgtaatttgaggattgttagtcatcgattcaggagatttattcttttgtctttgattcttgttactgctactcagttcatggctttgcttactactacgagagctagtgttgctgttaatatctatgaagttggcgaactcgcggtaagagttcttaccggttctgttttgttttgctctgtttattcggattgaactcatcactaaatgttttttgttttggtctatacagttatgttcgttgagtttggttacaggagtattcatatgtttgagaagtgcaacgaagataactcacaaagctcaatctgtaacgagccttgcagctaaatggaacgtttgcgcaacagttgactcgtttgatcatcttgatggcgaaactcctactggttccattattgaatctcaagtttccctacgcggcaatgcgatagagacgtctgatgatgaagaaggagaaggagacgatgatctcgataataccaagatacatcccatctatgccaatacaatttcttaccaaaaacgtcaagctctag

SEQ ID NO: 177938 - DNA, 372 bp, Arabidopsis thaliana landsberg
atggagaaagaatatggatcgagtctcgttgcaccgtcttcaagctctgtacaagacatgtattgtaaggtaaatttgtgaaaacgaattctctagtctatatatgagctcaaatgaagtttgtgaaggttaatgtttacgttttgcagggaattaaagcgcatgaggaaaagaaagactgttctagacactgcaaagtagttatgaggaagattgcggatgaagtaagagctgaagcagagcaatggtcacaaatgcaagatatgttgaatcaagtgagaaaagaaatggaggaacttcaatcttgtcgtgatttcatggcaaaaccgcgccctcgaagcagattccgagatacaaaatctacattcctct

SEQ ID NO: 177939 - DNA, 71 bp, Arabidopsis thaliana landsberg
aaaaagaaatgccactaagattggcgtcgaatatttttcttatcttctgaaaaaacgacacttaatgaaag

SEQ ID NO: 177940 - DNA, 66 bp, Arabidopsis thaliana landsberg
gggcgtttttcgggtactttgtgcggaggaaggatgtccagtgccgtgggcgagccgagcacggag

SEQ ID NO: 177941 - DNA, 1772 bp, Arabidopsis thaliana landsberg
atgaacgaaagaacgaccaacgtgggcagtcgaactcgaggaaaatgttctctaaaaccaattgatgtatttgtgttgaccatcaactacactcacgtaagcattcaatattgtggccctaacaacgaactatatttagaaatgccctaaagctatggcttgttttactttataagagggtcggacctataatacacatatcaaaaaagttaatgtacaccaaaagagcaatatttatcatttatcaatcaattttactttatcagattgcagaacctttgccacagctgatatatagatcaatatataggcacagcttaacgagtcagatataattaaagactagatagtagagagatatattaccctatccaaatactgtacatttggaactaaatatgtaatgccgcgtgatcttctcaataataatctctatgtggataccataatactacaaacttttgtccatttttgttagagaaaataaaaacttttgtccatttcccactttggatcgacataggaaatttccttttcagaaaaggacaaaagaaaaaaaattgtgaataaggtgtgaagtccaatcccatgataccgttgggtaagcatagaagacaaaaaatcataaatctccattttgttttgatataatcgggtactcttatagtaataatcgaaaaaacgagtacttgaccatcaaaatttatcacaatccatgtccttaattatttagactattataattcctttcttctatttataaattattattatgacacatacttaacaaaaacattaagcgaatctacgattaattaattatcaattgtatacgtacgaatacgatctatggactttctattatgattttctttttgagatcaagtttagagcagaaagaaaacatgctaattaggaaccaagaaaacattatgattgttcttttggacataatttacatgtcaaaggtccgcatgagcttgtaattaattatcataacccgaagatgatagagattatgcacgtttcatccggatgaggaataaacatttattggcatcatattttcttcaccaatatctctcttttgcttcttttcaaatcagggtacttgcacaaaacctttattctttatctaacgcatttaattagcggcagatctattatttgtactgtgttttgaatattcaagatcacatttaaagaaaagaataggtgcacgagactaattacgaaaggatgatatgaaaatgaatcttgcattacgagatagattaggtacattacttcactctaagaaattgactcaaagttttcttctaccatcctatatcccaaaacattacttacaaatgcaaagaaacaacttccattttacggcgttttctggccgataagtctagtgaattatgtgacgattgtaagatatatgaagtaagttaggttgatctcataactgttatagatctctattaatcacttcgtttatttagcttaatctcattatatttgttattcaaatatgttgcatctctatatgttttcttctctattatcaaaacagttttatgtccttctaccatattatttccattttggttagtgaagtattgattttctctactaagaagaatacaaataaatcaacccggcaatagactaattaacgtactgttacgtctacgaaatagatattcatagaagtctctatccgcatgatacgagagataaccttttactcacatatcatcgcctacaatgcaataaaatag

SEQ ID NO: 177942 - DNA, 372 bp, Arabidopsis thaliana landsberg
gtgtttatagcctgtggagtctcaagttctggtggtaaaggtggtaaagatgacctttaccgcaaacccaaggctggaatgtggcaactcatgaagaagcattttaactctggaattgcaattgatatggataagttagttttctccccacctgctcctaaaaacttgaatttacctgaaacttctagcaatgctggaagattacactcatttgtccaccagccttactgattaaacactccgtttaagtccactagcacattttttgttgttgatactgacatctgtgctatgctcatcagatccttctacgttcgggatgcacctggaagaaaaatggatcgcaaaaacgctgacaacaaatttgcacag

SEQ ID NO: 177943 - DNA, 441 bp, Arabidopsis thaliana landsberg
atgcgcctgtcgtgccgcatcgaacaagccgagttcgcggaagatgcgcgtaacgccattcagctccgaccacgccgtctcgacatcgacattggtctcgcctgcggcggcgcaagcgaaaccgatgaggctttcgatgtggctgccgctccgcaggtagatgtctgcgaacgtgaaccagccttgacgccgtcgccgcccggtcccgctggaaaggcgaagagcctgttcggccaaatccctggcctgctgcgagcgccccgcagaaatgtatcctgcggccgcgaacctgaatgcggaaaggtcgtaggtttggcgcttggtatgggcattgatggagccgacgactctgagaagaagggtgagtgtcttgacgtcaacatcatcactggcttcagcggcgacgcgatcaatgacatgcatcaggttgatcgcgaggcg

SEQ ID NO: 177944 - DNA, 260 bp, Arabidopsis thaliana landsberg
atgacggcaaatcaggtagtatagatcataaatcaaaaattatgtttagaaactatttaaaaattgctttcaggaacctttggaaaaacaaaggatacaacgccgtcaacattctgggaatggcgctcgggttcgctgcttttttgctcattttattttatgtaaattatgagagaagttatgatagaatattcccccacccccaacaggtagtaatagcgggaaatgctgaaacgggacagaaacaaaacggaagcacc

SEQ ID NO: 177945 - DNA, 27 bp, Arabidopsis thaliana landsberg
atgagtgacaacaagcaaaacgatacg

SEQ ID NO: 177946 - DNA, 471 bp, Arabidopsis thaliana landsberg
gtgaatattttgacgcacatatctgaagtgcccaatatgcaacctggaattggaaatctgaaaaagaagcatgccgaacaagatctcaaggagctgtatagctcagtagctaacaaggaggaaatgatggagattcttgaaaattccagacaacaagtccaaaatgttgaaactgatgatggagctctttgggacattttccgtagagaagatattcctaaattagaaagttacattgagaaacatcacaaggagttcagacatctctactgctgtcctgtgtctcaggtacaaactatctttgcatgcttatacatttttcattctcatgttcaaaagtttgattggtcacagttttgcatgtatttgcttatcttacgttgaccttcttcttttaggttgttcatcctatacatgaccagaacttctatctgacgcggtatcatataatgaagctgaaagaagaatatg

SEQ ID NO: 177947 - DNA, 377 bp, Arabidopsis thaliana landsberg
atgacatcatacgatatggagaaggaagaaaccaaccaagagatgtgtttcaatgagaggtatgaaaaactatggcatgaagagtactctgaatcagattttgaggatgaacttggccgtgaaatacaagaacccgaaccgcctgactcatacataaccaataaaggctattgtaaaccatggattaaatttaatgatgattttgcagccatgattcgtaatctccattgactcgagatatttctttttcaggaaaagaaaattatgttaagcagagagaagtcatggactataaaggggcaacaacgaaggaataccattgccaaagtcctcgaaggcgtgaagataagattgaccgtcacactttgttttactga

SEQ ID NO: 177948 - DNA, 302 bp, Arabidopsis thaliana landsberg
atgaaattcacgtatgttgtttcttcacaaatgtttggagcccaacaatcatctggggatcctcacgcgcaggatatacttgacctgatgataaagtaagcttttaaagttgtacatgatctcagttagatttagtagccaaagttgtacatgcttccctaaagcactgttacatgactgttgcacttaggtatccatctctccgtgttgcatacgttgaggagagggaagaaatcgtgttggatgttccaaagaaggtttactactctatattggtaaaagctgttaacggtttcgatcag

SEQ ID NO: 177949 - DNA, 1113 bp, Arabidopsis thaliana landsberg
  unsure (1)..(1113): unsure at all n locations
atggatggtgagtgaatgattcttgtgcaattgtgattttgtttttgcttcaaggaaggccctttcttcacttatctttgggaattggtgaattagatgtagaaacttaggaaaatgctataaagctttgttctttgctattgttttgtatgatgtaaaacttcttagtataacttgttaaaatcccaatctgcattaccatcaatgcgtagaaattgcttggaaaatttaaattgaggttgcatggtttttgaatcctaagaccatttttcgagaactnnnnnnnnnnnnnnnnnnnnnnnnnnagttgattcacaaccaatgatggaggagactatactggtcggtgatgacctaatgacgggtcctccatctcctgttatccctcctgaaattgcttcacatgtgcttgaaggtgttgatttgtgcgatgggattttgaggaatctattcctgtgtatgtctctgtatcctcggtttggtttataattctacccttacttctgtcagtgagtagaattgttttttttttttcttgttttaggtttgcaaatcaatgatattgaaccattttgccaagatgagcttgcattgtatcgacaatgtgctgaaaagagggtaattgttgtttagccatcggctcggattatagttatataaagcttttcattctcatatcatatccacatccatttccttgacttttcttgttcttctatcctttttgtaggacaaaatattgagagttagacttcaagagagcgaacacaagttaggattgtctatgcccattgaactcgctaaggaaaggattacgcagcttgaagctgaagccacatcttttgagaggtactctttcttaacaatgcagttatattttgttttggattttctttacgtgaagagtttgtgctaccatgtaatcatgtatatctacagatgttcacaaatcgaaactatgttcttaaatccaaatgttcactaaaacagttcatttgttttataatcaggcacttgattctagcaagtggagctgaaggaatagaaggatttcgccggagatggagtttacacggtcggatgacggataccaagtactgtaacaaaacctaa

SEQ ID NO: 177950 - DNA, 555 bp, Arabidopsis thaliana landsberg
gccgcacgagacacaggagcccttagagaggcgaaagagaaacaacaggagctggaagaagcaaaaacccaagaatatgcaaaacaacaggaggctttacaagcaatgcggttgcaagttgaagaagcaaacgctgccgtagtcagagagagggaggctgcaaggaaagctattgaagaagcacctccagtcattaaggagattccggtattggttgaggatactgaaaaaatcaatttattaacttcagaggtggaggctctaaaggtacgtatgtgtgttttcacgtattggataatccgttatgtattcactaacaaagtttgtaaatatatgttgatgagtcccttaataacgtgaagcggattggttggtttaaatcatattttattacagactgaacgacaagctgcagaacatttgaaaaaagctttctctgaggcagaagctagaaattccgagctggcgacagagcttgaaaatgcttcaagaaaagcagatcagcttcaggaatcggtacaaagtttcaatgaatatatgaaattgttggattaa

SEQ ID NO: 177951 - DNA, 715 bp, Arabidopsis thaliana landsberg
acattttttaagccagccacagttactagatgggctgttgtgaacttctctgctcgctgtgacccgcaaaagattattgatgatttgaccagatgtggaaagatgaaaggaattgtaagcttacttttcgtcatcaggaccattggttactacaataaagaacactaataacaaaaccctctcttggtttttttgttttgttttcattaccagaacgtagattctccataccatgtcgtctttgaagaaaatcctcagtttaaggatgccactggttctgtaagagttgataagatgtttcaacatttacaatcaacactcggcgaagttcctccaaaattccttctatgcatactcgaaaagaaaaactctgatgtttatggtaacactaagcacttaacctttcctgaatcatatagtatacacctttttttttttttctcatatggaaaattttatcacttaggtccttggaaaaagaaaaatcttgttcaatgtggaattgtgaatcagtgtattgttcctcctcaaaacttaaatgatcagtatctcacaaatcttctactaaagataaatgccaaggtgatgatctcttcttgaatcaatctttgtagtttctgatataataatcttatagttaatctctgccatttctgtatagcttggtggattgaattcagttttggatatggagctgtcaggaacaatgcctctg

SEQ ID NO: 177952 - DNA, 934 bp, Arabidopsis thaliana landsberg
atggagttcgcaaacacgaaatgggtggctgcagcggcgagcatatggatacaaagctttagcggagcaagctacacttttggaatttattcttctgttcttaaatcatctcaatcttatgaccaatctactcttgacaccgtctctgtctacaaagacatcggagcaaacgtaggcatcctctccggcctcttctataccgcggttgcaagccgaaaaagcggtagtggtggcttctttagtgggccatggttggttatatttgtggggctactccaatggttcgtcggatatggattcatatggatggcgacgtcaggagtgatcccacggcctcccgtggctatgatgtgtttgttcatgttcttcgctggtcattgtcagcctttctttaataccgcgattgtggtcaccgccgttcgtaacttctccgactatggtgggaccgccgttggcattatgaaggtaggttatcttgagacgtgagaaataagatattaattcttgtattaaaaaaaaaacagtcgatatattaaaatgatgatacatacgaccggtcttttttcctatatatagttacataaactagtgaaaatcagtagtttggatgttgtcttgtagaccactaaataagatacatcggtagataacaatcatagataattcttaatacgtacataattctcattacaaacatatatatacttgataagttttgtagcccttatgtgttgtatttcttattttttattttagggttatcttggactaagtggagcaattctggttcaaatgtaccacatcttctgtggaggtgacccaaggaattacattcttctcttggccgtggtaccatcacttctcatcttgacgttcccgcccttcgttagaacgtacgacacagtcatcgcaggcgacaagaaacacttgaacg

SEQ ID NO: 177953 - DNA, 415 bp, Arabidopsis thaliana landsberg
atggagcaggtgggtttggctcttgaggatcttgctaacattggagatgattttggcgcaatgcatagcatctttggtggtatggtgcgtatactgctgttaaaaatttcctttttattgtttcttcattgtcatctcgagcaaaaacatgtctgactaccagaattatgtgaccaccactaagactttttctcttttccttgcttataactgttaacattaactgaaattcatgaatatagcaaacaaaagatacagaggttctactggtcgttattgcatgctgattccatctatatccctatttttcagggtgggaaattagacagcattgagtaccagcaggtacgtcttgttattatttatgtattcaaaaacacttggagggatgaatcccagcgaagcatgcagtcaa

SEQ ID NO: 177954 - DNA, 306 bp, Arabidopsis thaliana landsberg
atgcatcgccctgttccgaccaataatctgcatcgctacatccgtagtagaagtcaacaaactcctagacggatggccgaacaaacttgtaatcaaaatctgaaatcaatcatcgggtttcaaaaggaggtaatagttgaggcagtccttataaaagagtctacgtatatttataaagtttttatttcggttttttacatatagggaccgccatcaaactttcacatatctgtaggcattcttgcaaaaattgttagctatatagctgaaggtggaattaaggagttaaagaatcggaaatcgccg

SEQ ID NO: 177955 - DNA, 367 bp, Arabidopsis thaliana landsberg
ggaaggtcttccgtcaaggctttttcattcttatatgtctcacggttttcaactgaaccaaacaatgagtttggtcatttatcaaaacgaaggtctcgtgggcctgttatggcagccaagaaagcatctgaaggtttgcatcgcattgcttgtacttctttcttaatactatattgcaatgtggcactcatttaccgttgtgtgttggttaggggaaaagcaagaagatggaaagtacaagcaaacggttgatttgccaaagactggttttggtatgagagcgaattctttgacaagggaacctgaactccagaagttgtgggaagagaaccaggtcttcaagagagtttctgataataacaatgga

SEQ ID NO: 177956 - DNA, 217 bp, Arabidopsis thaliana landsberg
attcatcccattcagtggagggcctagaaaatgtgtaggcgatcagtttgcattgatggaggcaattgtggcactcgcggtgtttcttcagcggttaaacgttgagctggttcctgatcagaccattagcatgaccacaggagcaaccatacacaccaccaatgtatgccaatgttctcacactcgagagattaatgagagtgtctgttttgtttag

SEQ ID NO: 177957 - DNA, 403 bp, Arabidopsis thaliana landsberg
atgttttcgacacggcaatgagacaaatgccttatgctgtcccctatgagtacataccctttgaaactcctgatggaaaaccccgtggaagttatgacgaaatggtttatcatgtatttcttggggtaagttacatattgatccctaagttttttcttttttctttttttgatcataaatgtaaattattagccgaaatcatgagacctttataaaactttttcttgttcttacaggagtttgatggagcagtaggggataccacaatcttagctaatcggtctacatacgtagatttcgcgttgccatactcggagacgggtattgtagtcgtggtacccgtcaaggatgagagggaaaaaggaaaatgggtcttcttaaagcctttaacaagggagctctg

SEQ ID NO: 177958 - DNA, 1062 bp, Arabidopsis thaliana landsberg
attggaaaggctagggttttgtgtactatttatgccattgatacggattgggcatggtattacattagttgtaagacttgcaacaaaaaagtgaaccacatccatgctggagtccatggtgtgaataacaaagggaaaaaaccaagattttggtgtgacacttgcaaaactgtggtcactaatgtcatcccaaggtaataagagtaattataatggacttagttaaactatttcattctaaattttctgtaaaattctgggacaggtatatgctttacgctaatgttatggacaataccggcgaggcaaagtttctcttatttgattcaatttgctctgaactcattggcgagtcagccgcatctgttctcgacggatcactcgatgaggtatgttctctctgtatattaacacacacagaaacggtagaaaagggatagatgcaatactgattgtaatgtgttctttgtaattaggttgtggaccctgagaatttgccagagccagttaaaaacttgattgaaaagacctttctcttcttggtgtgggttgaaaaagaacacatatcagatggaaaggaagtctacaaagtttggaaagttctttgcaaaggtggactactagaggaacagcttcttgaatattctgctgatattgtgaatcctgcctctattgagtcagctgatcaggtttttaaatcaaagattaactcaaactttgtagcccgtgtatttacaattagaaactaatatggtaaacgatttttttccacagccacaactcatgttagagaatagccacgacacatctgactccggtactccttcttccaagcgtatttacgcaaacccggatggtactgctgatgaatcttccacctctaagaagatatgcattaaacctattgacttggaaaagtcaaacccagaattcggccccacttcagaacacgcacaacttggagatcctagcgttaaggatggagatccaagtttgaggagcagcaatcagtatgaaaagaagaatgtggttgtgagggtcaaagttgagaagaaggagtga

SEQ ID NO: 177959 - DNA, 540 bp, Arabidopsis thaliana landsberg
gttacacctttgacatggcttgaagcttggcttgacaatgtaatggcaagtgtgcccgagttagcaatttgttatcatgagaacggcatcgtccaagggtatgagcttttgaaaacagacgatatatttatactaaaaggtatctctgaggatggtacacctgcttttcatcctcatgttgttcagcaaaacggccttgctgttttaaggtttcttcaatcaaattgtaaagaggatcctggagcatattgggtaatgttataattctctgcgaactattatattgtttgtccgaattatttatgttcatgtcattgcttaaaccagttgatttggctatctccttttcagctctacaaaagcgctggtgaagatgaacttcaactctttgatctttccattatctcaaagaaccattcctcaagcgttcataatgacagcgctagctcaccatctttgattcacagtgggagaagtgattctatgttttctttaggaaatcttctttaccgtgtcggtcataggctctctttgtcagtg

SEQ ID NO: 177960 - DNA, 827 bp, Arabidopsis thaliana landsberg
gaactatggccttcccttgcatctaatacgggagctctacgaaacgttcagaaacttcaagattcgtgtgactgattaccttcgatatcggaaaatcacttccaatatgaatgatttgtttcctgttgcaactcctgaagaacttagttcgtaagttccagatattcccacaagatttatgtttccaaatattctaaatatcttttgagcagtttcttaaaactaattatgcttatatatctagatcaatcacatttctttatttggggtttgcagaaatgatgccacttgtatcatatgtcgtgaagaaatgacctcagcgaagaaattagtatgtggccatctatttcatgtacattgtcttcggtcatggttggaacgacagaacacatgtcccacctgcagagcactggttgtcccagctgagaatgctacatcaacagcttctggaaaccgtgggccacaccaagaatccctgcagcaaggtatcggtcttgctattcagacatatttttgctgatattgaactctgtgctcccaattatatttgtctcttgatgttcttagtatggatgatgacttatgtgcttcagattgtccagaagatgaatgcgtttgattttttgttaacatggtgactaatgacgatgctctacgcttcatacaggaaccggtacttcaagttctgatggtcagggttcttctgtttctgctgctgccagtgagaatatgagcaggcacgaggctaggtttcaagccgctgcttctgcagcctctatatatgggagatccattgtttatccatcttctgcaaacacactagtatg

SEQ ID NO: 177961 - DNA, 842 bp, Arabidopsis thaliana landsberg
atgcctaagagagcaattcaggtaagaagaagagaactttctgagagaactcagtttcaaacgagtaaagttgaaatctttttgttgtgagttctctctctctcactgttgctttggactttggttgtggttttagtttggatcaagaatcgctcgtgaatcaaaccggaagaattttggaagtaaccgtgccgcaaaccaggcttctgccgggagcgtgagattcctagcaccgtcacactaattccctctgattcatgttagatcaatcattgttatacattgtatcctatacaaagagacattctttcaatgatctcaaaactggtttgaacactgaacacaaatggactaataagaggacatgttaagacttaaaccacttggttcggtattttgctcaatttcaagggtaaaattggaaaaatcacaagaaaaacaaaagccctaacattattgtctaaaatcaattttctcctccggtggtgatctctgtgctccggcgcataaacccctgtaaagccaataacttgttgttccccaaagtttggttcttcatgttggaaaccgaaagcagtgtctgcgacaacatcgccggcaatgagaaatggcgagcggaagctgaaattggtggcaacgagagagctctgcaagcgcttcgagaactcattatcttcccttttcgttaccctctcgaagctcgaactcttggtctcaaagtacatatatccacacctctgttggactcatagcttctctctttcgcttaatttgcttaatttgacttatcattgcagaggcctagaggattgcttctctacggtcctcctagaaccggcaag

SEQ ID NO: 177962 - DNA, 2449 bp, Arabidopsis thaliana landsberg
atgcagaaatcctcattcaagcgatatgaaatatctcatgtctacaggagagcaattggccattctccaccaaatccgtgtcttcaggtattgtggtcgcacactctgctaatataatttctggccaatatagtataagataaatgctggctgtccattttaccttttattttctctgtgaaaaaagagcatatgcttataaaggttttgatgtttgattgccaataggcggactttgacattgttggaggcacaccatccctgacagaggcagaagttctcaaggtgcgagacacaaatggaacgaatctatttttatatcgagtaatgatcattacatgtttataagtcacactgccaacttttggaggaaatgtagtaagtgttgtgatggtgtttctgggaaactaacgtgaaactgaacaattattttgccttatgcattttcctacagagagcttacatctcctgcaccgttttaatccattaactttacaggtgatagtagacatcaccaacccacatctttcatcgcggatcttgtgacattcatttgaatcatggagatttgctggatgcgatttggtcctgggcaggaattaaggcagagcatagacgaaaggttgcagaggtatggttattgttagttcaaggatatgggtcattgtatcaatggtttatatcggtatcttgaccaattctttttcctgtttttcaattgaagcttctttccatgatgggatccttgcgtcctcagtcatctgagcggaagctaaaatgggttttcataaggcgtcaacttcttcaggtttgaggctacacaataaccctatacatggttggcaatcatagtaacatgccacataccaatattatagtgtactttgtcttactcgggaatctcctgcttaccaggagttgaagttacctgaagctgttgtcaatagactgcagactgttgcttcaaggttttgtggagatgcagatcaagcacttcctcgtttaagaggggctctgcgtgctggtacgatccaactttcgccactcctaaatttgtgaagcagattataattggttccatctgctgcagatagacctacccgcaaagcactcgatgagttgtcaaacctcttaacctacctgagagtctggaggatagaagagcatgttcatattgatgttctgatgccaccaaccgaaagttatcaccggaatttgttttttcaggtacaagtgaattgtggggcttttttgggtctttgttaggcttttggatgttttatagcttaatgcgttgtttacaatgattgaattacttactctggtaacaggtgaagagatgggttctgcatagatgattagttgatgcatagattgttgttgattctgctatatgactgtatgtttaacatctgcgaacttcatacaaatgtttgtcaggttttcttaaccaaagaaaatagctctgggacatctaatgatggcgttttacttgctgttggtggtcgttatgattggttggtgcaggaagtgtgtgatcgtgaacatgtaagttctttccacgtatttttcatcttgcatggagagaagctataggatatgtagcattgataaatgattattcacgtaaaagatacttatcatggtatcagtgtatgaactgaaaaccgggaagtgaaatttatcctcttatctactagtgtcactgtgaaagttgagtgcaagaggatggtaaaatatgttattgaaaattttttattattatttttgttattggatccagaaaatgaacctccctggtgctgttggagttagtcttgcactggagacaatatttcagcatcttcctatggatctaaggcctattaggttcattgtccttctgaatctttttcatgatcttaaatggaaacacctcgctaatttgtattgaactgcagaaatgaagtcagcaccagtgtacttgtttgttcaagaggaggtggtggtttactggtccagcgcatggaactagttgcggaactatgggaaaaaagtataaaggtgaagaaagcttgaatatgttatgttgatagatctgtttggacatatcatttgtgttaccaactaataacatttacatgtatgcattggcaggctgagtttgttccaacacctgatccaagtcttactgagcagtacgaatatgcaaatgaacatgaaatcaaatgtctagtgatcatcacagagtctggagtagctcaaaatcaaatagagtttgtaaaggtaataaatacatcatgttctgcttactattgaagaaagccgtgaaaatgaccagtaaatttgtggtttgcaggttcgtcaccttgaactgaagaaggagaaagtggtaggaagagaagaacttgtcaaatttctgctggatgcaatggctgttcaatttaaaaacccctctgtttggagctaa

SEQ ID NO: 177963 - DNA, 468 bp, Arabidopsis thaliana landsberg
  unsure (1)..(468): unsure at all n locations
atggagaagtttccagatggagaccctgctcaacatgttatacaggaacttctagtccgtgcagccaagaaagctggtagataaaacttgcctttttatacacaactgaatatctgtgcgatatggtttgatgattgattgttttaaaaacaggaatggattttcatgaacttctcgatatcccgcaaggagatagaagaaagtatcncgatgattgcactgtattagtgatagcacttggaggaagtaggatatggaagtcatcaggaaagtatctttgagaccataaaccacacagttcgatgaagccaacagataaaaaacgctccttatagattaacttcttttgacttaatgcagcataagatcaaaagggtgccaagttttcttgctttttgtttccttaggaattttgggtcagattaggtgggggtgttttatattttgtttctttgttgaatagggtag

SEQ ID NO: 177964 - DNA, 400 bp, Arabidopsis thaliana landsberg
atggctaaggagaagaaggtacgtattcgagattctcctaagtactcttcttctagtgatgaggattctttcgatgatgaagtagattacactgacttgtttaaaggactagatagagcaaaggtagacaaatttaatgaattaattgatgctctaaatgaaaaggatagattgctagaaaagcaagaggacattatgtatgaggaacatgacaagtttgttaatgttcaaaaatctcttgctttagaaattaaaagaaatgaaatgatatcctctgaattgtctgcttgctatgaatctgtctctagtttaaagaatttaaatgatgaattaaatgctaagctagagaaagttaataaagctagttcatgtgtagagcatgttgttatttgtaatagat

SEQ ID NO: 177965 - DNA, 332 bp, Arabidopsis thaliana landsberg
atgccaacgggcgatccatgcatcgtgtcacttgaactcagcgagcaggaccgcgtcaccacgctcgtctgcaacctgacgttcgcgtcgaagcaagcgcgtgaagacgcagtctccaccggcatgaccgacggcatggagcacagctacacccgcctcgacgacatgctcaaaactgcaaagtgaaggaacccggtgtcagcgttgattttctacaggcctcgcgcaattgaagtccactctgaccctgaggtttcggccgtactcattcgcgcatcgattcatggcttctgtgacgccgcatatgccgcgacattgatcattccggcaag

SEQ ID NO: 177966 - DNA, 1390 bp, Arabidopsis thaliana landsberg
atggtttttgtttttgctcgtgggttgcgaaaagctgcatcggttcttcgatcttcatatccacttctcatttcttccaggttcgtatagttgtcactatacaacatttagtttagtatgttgtcccaaaatgtgattatgttcttgtcaaatttcccccactaggttgcttcctataagccaagagttttatgattcaacattgacatttgttctaccgacaagaccgatatgtaggaattttagtcatggttatggtacggtgaatctagtgatatcagaagggaaaccaaagtttgaaactagggaacttgatcctccaaagaagtataagtggttgacgaaaaagcggttgaagttaaagagaaagaaagaaagagaggaaaggaatgcagctaataggaaagacccgaggcgacttactgttaaagggaagaagaagaagtttgttaatgcagaggaaagaatcaagtataagcttgaaaaggtcttgtgagagtctagtctaaattcaatagcaaaactatgagtttaatgtattgaagtgtgtgtttttggtgttgcttcgtgtatcaggctaagatcaaagaagcattgctgattgagagacttaaacggtatgaagttgcaaaagtgcaaggacctgaggttcgacctcatgagattaccggggaagaacgtttctacttgaagaaaatgggtcagaaaagatccaattatgtaccgattggtagaagaggagtatttggtggtgttattctgaacatgcatctgcattggaaaaagcatgaaactgttaaggttatttgcaataatagtaagccaggccaagtgcaacaatatgcagaggagcttgctaaactgagtggtggtgtgcctgttaacataattggcgatgatacgatcatattctatagagggaagggttatgtgcagccacaagttatgtctccgatcgatacattatcgaagaaaagggtaagtcctcaaatagtttatcattatgaagtatgctcattggaatgcggctatgtttcgtttgctagttctcaacatggtcttgtttcttttgcaggcatatgaaaaatcgaagtacgaacaatctcttgaatctgtgagacattttatagcaattgcagagaaggaacttgaactatattacaggcatgttgctctctacgatgacccgaataacagaaaccctctttcgattttggatgattctccatcggaatcacgtcaacaccatgagaatgagttttttctgagttgttcggataccgactctagttccgaagatgaagatgaagatgaagagctctgtgaattagataatggttcttcttcttcttcttctgcaaaggaagagttgtctgaaagtgaaaactga

SEQ ID NO: 177967 - DNA, 236 bp, Arabidopsis thaliana landsberg
cgagatatagtactaagtgttatccagttcctgaagagattgctttagtagacgtgaaacgtcttctagagaagaagaagaagcttgaagaggaaggagaagagatcatcgtagagattgagcgggagatcatagacgcgcttgtgcgagaaactttgtccgaattaagtcttaacaagagatcaaacaaaacgacgtcggacggaaagttgaatcattatgtactattagaatag

SEQ ID NO: 177968 - DNA, 228 bp, Arabidopsis thaliana landsberg
atggcttggagacggtcccgactagtggccatccttttggccccggtgaatgttcaagctacactggctgcttccggcggaaaagtaccggcgccaccataggttgatgaaatagagagcgaacaagcatatgattacgtcggtgagatccatgtttattattatcgaagcgagaaagatgggagatcagtgaagaagaatgttagtcagagttttgaacaagtttag

SEQ ID NO: 177969 - DNA, 76 bp, Arabidopsis thaliana landsberg
atgggcccgaacagttttgggctcttgatcatgtctaaaacagacgataaagttaactgcaatttagttggttcag

SEQ ID NO: 177970 - DNA, 507 bp, Arabidopsis thaliana landsberg
atggttaaaggagaaaagagatccgagatgatgcttaatctgttcggagataattccgaggaagaagagatcgaatccgaacatgaatccaatcgtcgtcagcctaactacgcttccgtaactctctccatctttatctccttcgtttcgtcactattgattgtttcagttttcgtatttttcactgccactgttcttcaattacaccttggaatacgaatggtttctggagttcttctcgcttgaatttagggttttaggttaattgcaggaaccaatgcaacttattaggcctaattcagcttcagttcttcttaatatcaactagactaagatatcagtgaaattgtggctgaaatttccaatgtaaacactgataggatgaggctgagggcggggtggagcctgaaggagaaggtgaagctgaggttgaagttcacggagaagctgaagctgagtctgacggggaacagggagatgtagaacttgatcctggagaaagtgagg

SEQ ID NO: 177971 - DNA, 486 bp, Arabidopsis thaliana landsberg
gatgatttggagtctgaagcagagatcttgcttgatcctaatattcttagtgatgatggaacagtttctttaaacactttatctattagtgaggatgctaagtatttggcttatggccttagctctagtggtagtgattgggttactattaaagtgatgaagattgaagataagaaagtggaacctgattctttatcttgggtaaggcgtcttcaagttgaattactcgttagtttgaagtttcattattgacattgacatgaaacttgttctgaaatcaggttaaatttagtgggatcacatggacacatgatgggaaaggttttttctacagtcgctatccagctccacggtgagtctttggtttaactaactgtgaaactttttggtgtaaagctgagaactttgtttgagaagtttgagcttttattactgctttctgattttggttttgtttctgtagagagggagagaagatagatgctg

SEQ ID NO: 177972 - DNA, 353 bp, Arabidopsis thaliana landsberg
cctgcgtcgcttctggggcggcgaatatctcatctctaatcgcccctcacgccactaaatccccacctaactccaaaaaactccttatcgtcgctatctccggcgcttcctccgctgctttagtcgctctacttatcgctttactctattggcgaagaagcaaacgtaaccaagatcttaacttctccgatgatagcaaaacatacaccaccgacagtagccgccgtgtctaccctcctcctccggcaacggcgcctacaacacgacgcaatgcggaggctagaagtaaacagaggaccaccacgagctccaccaataacaacagctctgagtttctttacttaggaacaatg

SEQ ID NO: 177973 - DNA, 205 bp, Arabidopsis thaliana landsberg
gagcaccccaaacaatagcccagccgccccgacaagcaaacgaaacgagaaaaccacgcccacaccaagacaaagcaacagcggaaacaaaggacaaaccaaagcagacaaaccacactaccccccctgctgccgagagcccaaaggaggcccaaccagcagccccggcaagctccgcaggaacaatccccagacaaccccctaa

SEQ ID NO: 177974 - DNA, 76 bp, Arabidopsis thaliana landsberg
atgcaggacagtgcatccgcactgacggataacgtcatgatgtgcaggctacgcgatatgcgatcatcacatgcgg

SEQ ID NO: 177975 - DNA, 431 bp, Arabidopsis thaliana landsberg
tacttggttatggaatatagcaagagggatcagtggagaagaagtgcaaggtcgccttctccccaaaagtcatggttctggaaagacatttcccggacctcgtgctttgaagtcactctcaactgtaagagtagaatctcaacaatgcacttcttttccctttgctatcagttgctctagttgataggtcataactgaaagtgcttatagaggtgaaacgttttggaaaaatagtagcaaaagtatcccctttttatcttcaatcatatcatagaactagtttttagaataagtgttgtgttctcttatatttctaggttcagcattggctgaatcagctttccgaggaactaagcgagcgcctcggttctgacttggagcagaataagcggattgcaagcacccttacccttcatgctagcgctctcaga

SEQ ID NO: 177976 - DNA, 27 bp, Arabidopsis thaliana landsberg
atgctcgtcctggtcgttgtttggggg

SEQ ID NO: 177977 - DNA, 138 bp, Arabidopsis thaliana landsberg
aaacatagtcggatgaagatgcaaacgaagccatctacagtggaagcaaagccagtctacaccgctgagaaagccggtgcaaccagacgacaaacccgcttcaagcgggacaaaagtcacagattaacacatcagtga

SEQ ID NO: 177978 - DNA, 68 bp, Arabidopsis thaliana landsberg
atgctcatccagtttgctataccaacatatctgtcgaaactggtgattgagatcacagcgggctcacc

SEQ ID NO: 177979 - DNA, 121 bp, Arabidopsis thaliana landsberg
ttgttgtgaccgccagactccaacagagcaaagtggctatggccgagataaaaacagtcagccgatgatgaacgaccggcgtcaacatatctcattgacgctagtattaccaggctactag

SEQ ID NO: 177980 - DNA, 151 bp, Arabidopsis thaliana landsberg
ggaccaagaaagtgaatgcagtagaaattcagtagacaaatctgattttgaaaatgaatcgaagtgcataatggtgtcctctgcacaacgtcaaacgacaacggtggaggcactacatcagttgacccgtggcgtggagtgtttgatttag

SEQ ID NO: 177981 - DNA, 487 bp, Arabidopsis thaliana landsberg
gtcggagaggaggtcggaagccttccgagtcttgactacgatgtcatcgacgtaggcctcgaccgtgcgaccgatgtgttcgccgaacacatggttcatgcaccgctggtatgtcgcacctgcattcctctttgatgaaccctgccgccattagcttgtggatctcttcgccaatcgctctgcgcttctcctcgtcgaatcggcgcagaggctgtctgacgggtcgggctccggcccgaatatccagcgagtgctcggcgacatccctcggtatgccgggcatgtccgagggactccacgcaaagatgtcggcgttcgcgcggagaaagtcgacgagcactgctttctatttggggtcgagcatggagccgatccggatctgcttggcggtgtcgcactggggtcgagggggacggccttgacagtctcgctggctcgaagttccggcatgggcttcacgtctgggactccttggagaggttcccag

SEQ ID NO: 177982 - DNA, 68 bp, Arabidopsis thaliana landsberg
atgaccgctcgtatcgctagtccttacgccatgagaggggatgccacattttcacgcattgctgagtg

SEQ ID NO: 177983 - DNA, 194 bp, Arabidopsis thaliana landsberg
taaaggttgagttagatttgtttttgactttgaagaagtctgttcgctgtagacgtagaacacgtactacatttactcatgccctctctattaacttgttgattacgcaaaacgacttttccgacacttatgacctagtccttattggtccactcgcatttctcggatgtttatgtcctctcaatgggatgtga

SEQ ID NO: 177984 - DNA, 123 bp, Arabidopsis thaliana landsberg
gctaagaaaccaatttcccgtgacggtgaagatcatggatccgagtacaccttccgctgtaaccaaagcgcacaaaaaaacgtttcaaaaggaagttctgttactatccaagatgaaacatga

SEQ ID NO: 177985 - DNA, 162 bp, Arabidopsis thaliana landsberg
atggggtcgtccacctacgaatggatgtgcgcaacgcggacccgtgcgcgccgaaacgagtccgcctggccctacacgcagcccgcctgggttttctcctcgcgccgcctgccgggcatcgaaggggcggacatccgcttcgtgcagggcgatgtgcggccg

SEQ ID NO: 177986 - DNA, 234 bp, Arabidopsis thaliana landsberg
gtatcttcctccatacactttatttatgccgttgacggaacaaaagacgatagagaaagaaggaggagatgatgattccgaaaatggaaagaaagttaaaaagagtggactcatcgtgtcacaactttcctttttgacgatatgtatctttctcatttcaatcaccgaaaggcaaaatctacaacgtgatccgataaatttcaacgtccttaacatcactctcgaagttagcag

SEQ ID NO: 177987 - DNA, 119 bp, Arabidopsis thaliana landsberg
cgactatgagtatgatatacagaaagatataggagggtacaaaagaaagaccgaagctgaaaacgaccgattctattacacgaactcctttggtcgcactgagagcaacaagcgtttaa

SEQ ID NO: 177988 - DNA, 266 bp, Arabidopsis thaliana landsberg
tgcaaacagatcccttcgaagttcgggcgtatactaaccaggatccgaaagatctagccaaaagaggcaagaagcactcagttatggatcggcagcaaaccaatacacacagtggcgcaggaattgcacgcattagccaactgaatggagaactgtatgatgcctgcctggatgagcacggaagtgcttatcgctaccgaggctctcagcctgaacacccacatgcgaacatgtctgttgcggcctcaggaccgacaggcacctga

SEQ ID NO: 177989 - DNA, 407 bp, Arabidopsis thaliana landsberg
aacgccggctacgcgccgtcgtacacggcgagcgggctgccgacggggctgtccatcagttcgtccggcctcatcaccggctggctgtccaggccgggcacctacagcgtgaaggtcaccgcgaccgaccgcgtcggcggatccggctcggtgtccttcacctggacgatcggtgccgccgcgaacagcggcacgacggggacgatcaagcagatcggcggctccggcaagtgcctgaacgacaccggtggcaagacgacgaacggcaaccagccgcagatgtacacgtgcggggcgaccaacgagaactggacctgggtccaggacgggacgatcaggttcggcgggaagtgcctgcagatggcggggcccggctcggcggccgacacgccgctcgaactggaaac

SEQ ID NO: 177990 - DNA, 261 bp, Arabidopsis thaliana landsberg
gctctgagaatagcagcacagtgcagccgccaagatgagcacgccggcgcaagcactgcggcagaactgggtgcacggcgagggattcctaagtacccgggccgctcccatcctgcagcgacgtccgccgaacaggagtccgagcaacaccggagatcccaacccgaagcggacggattggtgaactggggagcgcaatccataccagatatggtggccgtaatgaagctccccacggcgtgcggcggtgtagctactccg

SEQ ID NO: 177991 - DNA, 55 bp, Arabidopsis thaliana landsberg
atggagcacaacgttggtaaactgatacgtgtaaaaggctatggtagagacaaag

SEQ ID NO: 177992 - DNA, 107 bp, Arabidopsis thaliana landsberg
atggcgtctgatgccacatggtgttcgtgttcctcgtgtttggccatggcgtgtccaatgggcaaacagggttcaaatacagtgaagggtgatatgattgatcaaag

SEQ ID NO: 177993 - DNA, 267 bp, Arabidopsis thaliana landsberg
gactttgatttcaaggagattgatgaagtcctcaagttctaccctcaaggttaccatggtgttgacaaagatggaaggcctgtttacattgagaggctaggccaagttgatgccacaaagctgatgcaagtcactaccatcgataggtatgtcaagtaccatgtgagagagtttgagaagactttcaatatcaaattaccagcttgttccattgctgccaagaagcatattgatcagagcaccaccatcttggatgtgcaaagcgtg

SEQ ID NO: 177994 - DNA, 1237 bp, Arabidopsis thaliana landsberg
gcactgaaaccgttgaaagtccggccaagtcgggtgttgggaacaagagaggcttctccgagaccgttgatctcaaacttaatcttcaatctaacaaacaaggacatgtggatctcaacactaatggagctcccaaggagaagaccttccttaaagacccttctaagcctcctgctaagtaagttctatttacacaattccttaagaagaagaccttccttaaagggaagacttttttttttttttttgagataaaaagactaatagttgatataaaagttcttaaaatacatatatatgaaagatgtaaggatgcataagtaataacgttattgaatgtgtgtgtgtgttgttatattctatgtagagcacaagtggtgggttggccaccggtgaggaactaccggaaaaatgttatggctaatcagaagagcggcgaagcagaggaggcaatgagtagtggtggaggaaccgtcgcctttgtgaaggtttccatggatggagctccttatcttcggaaggttgacctcaagatgtacaccagctacaaggatctctctgatgccttggccaaaatgttcagctcctttaccatgggtatgcattttcagacatataagtcgaattatcattattatttttgtgtttacttacaattttttctttttaacgatacagttttttccatatacgactaattaatatgataagttttgggattttgattaattaagggagttatggagcacaagggatgatagatttcatgaacgagagtaaagtgatggatctgttgaacagttctgagtatgttccaagctacgaggacaaagatggtgactggatgctcgttggtgatgtcccctggccgtgagtttcctcattcttcttgctttcattattatgaccaaaattattctctaaacaaaaaaaacaatattctctaaagcattattattgatattacttatcaaaaaaatacacaaaatgataatcaatatccatgtgttataaacacgcacagccatcttttggttggcatgggacagaactcagagagatgtttatatataaatactaactcatcaatatgttacctcatttgtagctggcacatattctttcactttcaatagatttctaaatttagtcaccaacccaaatcccgatttcaggatgtttgtcgagtcatgcaaacgtttgcgcataatgaaaggatccgaagcaattggacttg

SEQ ID NO: 177995 - DNA, 72 bp, Arabidopsis thaliana landsberg
atgacgggtttacgtttttggcgggaaaattacgggtttaaatcgacaaccgtcttctcaatgtcatcgctt

SEQ ID NO: 177996 - DNA, 361 bp, Arabidopsis thaliana landsberg
atggtctatgaagaactaaggaaatggtaatgattcaaaccaagtgtgatcccactctaatataagagtaaactttacctaatcaggcaattactcatatatacaccatatgatgcaggacgtcacaatgctcgttccaagttggaccagttctgatcgtggatgaaccattcacggtaggttcttttattcgctctcactgataatcctttaatatgcaactcaaagatttgaacctcatgtgaacgttctatgaatatcgttacagatagacaacggtttaatgacaccgacaatgaaaataagacgggacaaggtggttgatcaatacaagaatgaaatagaaagactctacaagtag

SEQ ID NO: 177997 - DNA, 534 bp, Arabidopsis thaliana landsberg
atgcatatgcacaacaatggctctaacctcatcacgttcaaagctctcgtaagtccttcataaaattcacacacaattacaattagttctttgaaaagtgggcggttataaaaaaagtgaatgatggtgcatgcatgtggattcattagaacatgcaagcaagctgcatgcaaatagtgcttttgttcaaaatccaaatttaaattttttatattgaagaaactttcaacatttctataaactaaagcctttaataattagaacgatattcgtttaataaaatgttcaaacgtgatctccaataaatatgagactgtctttgtggataaataatcaggaatacaatgctacaatagactactattgggcacctttactggtggaatccaactcggacgacccgacaaaccatagattccccgatcggatagttcggatccaatcaatagaaaaacatgcaaggcattggacgaacgctgatatcattgttttcaactcttacttatggtggagaatgcctcatatcaagtcact

SEQ ID NO: 177998 - DNA, 301 bp, Arabidopsis thaliana landsberg
atgaacaatttattcggacgcctggcgctgtgtctgtgcgcctgcgcagcctttagcgtgactccagccttagcggcgcccagcgacggtgagatactggcgattgcccaagccgccaatacggcggaaatcgatgccggcaagctggcgaagagccatgcgcaaaacccgcaggtcaagcagttcgcccagcagatgatcaaggaccatagcgccatgaatgccgagctggccaagaacctcgatctcaagctcatggataatgacgaaagccagggcatccggcaggatgcgctggaca

SEQ ID NO: 177999 - DNA, 127 bp, Arabidopsis thaliana landsberg
gactaaagtcgtggggggtacatcaaataacactgacagctacgccgtcgttgaaaatcggataacgccaacatctaccgagccctactacagaaatcatacacttataatcagacaaaccatataa

SEQ ID NO: 178000 - DNA, 69 bp, Arabidopsis thaliana landsberg
caaatcattcgattacttttggaactttgtgattttatcaacgacaaaagaaagtacaaagattattga

SEQ ID NO: 178001 - DNA, 543 bp, Arabidopsis thaliana landsberg
atgctttgttgggcagttaaagtgcgactcgaattacttatttttcttatgctgataaatttgcagattaagccgctcgttggccccacaaggatgatagtgaaacagaacaatattccgtactcctggcatgattttgtgtcgagaagtaagtatggaatttgtagattttgtttcgtgagtagagttgaccatagacattgctttttcattacgatgcttaatatttagtaagcctagttgctagaaggattgtggtgtagtctgttagttctctctggaattgtacacctatgcttgttcgcggtataggacatcaaagccgaactcaaaaaatattcagtaaggtccttctagggatgttattaactctactattgggttttgtgttaagggctgttctgataatctagagtaatatatcgttctccgtgaaatttttttggtgtactaagtttcgcatgctctaatatttttttttacctcgttgcagaaaactacaatgctctgactgttgccagtttatgggctcctgtggtagct

SEQ ID NO: 178002 - DNA, 470 bp, Arabidopsis thaliana landsberg
ttcgtggtcccggtcgtgctggtctcggtgtgcttcatcctcggcctcgtctacaagagcttctccaagcccgacatcaacagcgggcaaacgtccgctgccatcggcctcctgctcgtcgttgtcgccatcttgtcgatctgctcgtggctgcacacgacgggcaacaaactcggtgatgctatgtccgagattcgcaggtaaagtgaatggctgcgtcgctgtgcatggcgcctcatggcctcattgcatcttccttcgcgcagtcgctttccttgtgagggcgacgtcgactgggccgcggagttcctgccgcttcgcaatgacatcgacagcatcggcgcgcactgccgcaacacgccgctgtacttcagcatctttggcgtggcggtgactctgccgctagttcagagtttgatctacgcaattgtcagcgcggtcatggccattgtccagagtcgcgcttccag

SEQ ID NO: 178003 - DNA, 441 bp, Arabidopsis thaliana landsberg
ggaaccaacgtcgtggacggcggagaagttataaaccaccgtcggggtcttttgggagatgatgaagtgatccacaacgaacctacaagaaacaacgtggagttcaacatcagaatctacaattacgtctttcaacagtttgttggtgcccccaacaccttgaactttgctccttatccgatgcctccgtctccggcaccggcacctgagactcctccagtgagtgatgagtatgttctgattgatgttcctgctaggagagctcgtcgtaacaactctacggtgatgacaaactcttggaaggaaaacgcaaccccgaagcggattcgcggttgtggtggattctgcggggggaggattgaagggatgaagaagtgtacgaacatgaattgtaacgcacttaacactcctatgtggcgaagaggtcctcttggtcctaag

SEQ ID NO: 178004 - DNA, 1336 bp, Arabidopsis thaliana landsberg
atggcttcatcttcttcatctcctatctggaagtacgatgtgttcttgagtttccggggagaagacacccgcaagaacattgtcagtcatttgcgcaaacaacttgtcgataagggagttgttacgttcaaagatgataaaaagcttgagctcggcgactccatctccgaagaaatcagcagagccattcaaaactctacatatgctcttgtgattctatcggagaactacgcttcatctagttggtgcttggacgagctccgcatggtaatggatcttcacctaaagaataagattaaagttgtccccattttctatggagttgatccttctcacgtgagacatcagactgggagtttcacatttgacaagtaccaagactctaaaatgcctaacaaggtcacaacttggagagaagctctcacccagatcgccagtttagcaggaaaggattttgaaacttggtaagttttcaccaccaacatatggtttttagtgtacaatatcgatggaactgataataattattcttatcatgttctatattctagtgaagacgaggcgtcgatgattgaagagattgttaaagacatttcaaaaaagttgttgattatgcagccagtagatttcagcgacatcgtagggatgaacgctcacatggagagcctgagtcctctattgagtatggactctgagaatgaggttcgtatgataggaatctggggaatggtaggcatcggcaaaaccaccattgccaagtgtctctttgaccagttttcacagggatttccagctcgttgtttccttgaaaacgtttccaagatttatagaaagggtggtgtctcgtctttagcagaaaagtttctttcaactacacttggtctgtctaagaagaagatgaagggttcgggcgtaaaacttggaccccaggagattaaggcaaggtttggatgtcgtaaagtctttgttgtccttgataatgtggatgacatgagacaaatgcatgcttttgctcaagagtcgagctggtttgggccaggcagtcgaataatcataccaccccgagccaagggcttgctcaatccatacggagtaagaactgtatatgaagttaagtgcatggataatgatgctgctcttcagttatttaaccagttggctttcaaaggagcgcttcctccttctgaactttatgaaaaactgtcaatccgagcgtcttggcttgctcaaggtcttccagtcgctattgaagcttatggattatttttccgaagaatgacatctttaaaggagtgggacgatgcattatgtagatttatagaagctcctgatgaaa

SEQ ID NO: 178005 - DNA, 520 bp, Arabidopsis thaliana landsberg
gaatttgtcgataaactggttgaagaggaagcattacctgctgaacaagcggatgaattcaaagtaagagtgaggtgtaacgtaactgtcagtttttgacgcttgagtaacttctctaattaccgtttttttccttctcaggaatatgtcaaagagcaagttcgagcagcaaagaaagcaaatcgagaggccaaagatgctcgaaagaaagcaatagaagaaatgagcgaagatactaagcaagcctttcaaaagatgaagttctacaaattctaccctcagccttcaccagatacaccagacgtctatggtgtccaggtaaaacaaaaagctcaaaaatccacctttaatttgtttaaatctgtttcagtctaacaaataggatactgataaaaaaagggttttgattatagtttgttacaaagctctgagtatgtgaatgatctggttttcgcttcttctgtttttgcagtccccattcattaaccgatactatggaaaggctcatgaagtcctttga

SEQ ID NO: 178006 - DNA, 333 bp, Arabidopsis thaliana landsberg
atgacacaggtatcgaggaaatggaaacaaattcttgtcttggtgtagctccatgtagcttgatttttctagctctaaaatcttatgttattccagaatcttccatagcactccaaacttatgtatcgagggttactacaaatgtgatttttttagggttttcgttcaacctcttccccgaatctttcaactgatgtggtgcagcaagtagatgctagatatcctgctttactttttaaacagcagcttacggcctatgttgaaacaatgtatggaataatccgagagaatgttaagagagaagtatcgtcactgctttcttcctgcattcag

SEQ ID NO: 178007 - DNA, 3182 bp, Arabidopsis thaliana landsberg
atgtcaacgtcacaaactctcggcggcgccacacgttgtggccggatcataggtccatcattagacaagatcataaaaaacgctgcgtggcgtaaacacacgtaccttgtctcttcatgtaaatccgttctcgacaagctcgaatctcttcccgacgacttccacgatccttcctccgtcgtctctggcctcgccgcatcagatgcagattccgttctccaaccttttctcttatctctcgaaacagcttattcaaaagtcgtcgagccttctctagattgcgcttttaaactcttctctctctcaatcctccgcggtgagatccaatcatcaaaacaagattcaatcctcttcaaactcgtcaacgccgtctccaaagtcggtgctatagccgaagaaccgattcaactcgctgttcttagagttcttctcgctgccgttagatctccatgtatcttgatccgtggtgattgcttgttacacgttgtcaagacttgttataatatttaccttggtggcttgagcggcacgacacagatctgtgctaaatctgtcttagctcagatgatgcttgtgatcttcacaagatctgaagaagattcgcttgatgtttctgtcaaaacgatttacgtcaacgagttattaactttcacggacaagagtgttaatgaaggaagctctgtttatttctgtcaagggtttgtgaatgaagtcatggctgcaggacaaggaagtcctcttcctcctcctgatgtgattcagattctgttgcaaaatcccgagactgaaaccgttatgactccggattcaccgtctttccgaggatacgtggcaaacggagaaggtgattctgagaccggtgacatgagtaaggtgagacaagacgcttttcttctgttcaagaacttgtgtaaattgtccatgaggttttcgtccaaggagaacaatgatgatcagatcatggtgagaggtaagactctgtctttggagttgcttaaagtcattattgacaatggtggttctgtttggcggactaatgaaagcttcatcaatgccgttaagcaatacttatgcttatcactactaaagaacagtgcggtatcaatcatgtcaatatttcaattgcaatgtgctatcttcatgagcttgttatcaaagcttagatcagtcttgaaagcagaaatcggcattttctttccgatgattgttcttcgcgtgcttgagaatgttcttcaacctagttacttgcagaagatgactgttctcaacttgctagacaaaatgtcgcaagatccgcagttgatagtcgatatctttgtgaactatgactgcgatgtggagtcttcaaacatacttgaaaggtattattagattagtctaagaaactgtcacaaaattgttgcatgactcgttaagagtaaatgtaatgtattaaagctcttataattccatcagatacttgcaggattgtcaacggtcttctcaaaactgctctaggaccacccaccggatcatcaacaacgttgtctccagcgcaagatagtacattcaggaatgattctgtcaagtgtttggttaacttagccaaggcaatgggaaattggatggaccagcagttgaaagtgaacgagacggtctggcctaagggctcacaagtttatgcttctatggacagtaatgcaagccagattagtgagttagaaggaactatatctgactgtgattcacagccagatactagtaatccagaagcttatgatgcttctatgcttgagcaacgaagggcttacaaaattgaattgcaggtccagtatttacaagtccttaaatctttttttatgatatatcagtttttatgttcactgacatatagttcttggtgatttgcagaaaggtatctctctgttcaataggaagccgtcgaaaggtgtcgaatttctcataagtaccaagaaaataggtagctcccctgaggaagttgcttcgtttctgatgaagaccgcagggctaaatggaactgtgattggtgattatcttggtgaaagagatgaacttccactaaaagttatgcatgcatatgttgattcgtttaactttgaaaagaaggattttgtcgaagcaatacggttctttctacgtgggtttaggctaccaggagaagcacagaagattgatcgaatcatggagaagtttgcagaacattactggaaatgcaaccctggttcttttactagtgcagacactgcttatgttcttgcatactctgtgataatgctcaacacagatgcacacaacaacatggttaaggataaggtatgcttcctttcttctgatatttatcaagcatatctactgagtagaataacttattgccttgaaattcacgtttgatgacatatgaagtgtaacaaatctggtcatttcctctgtttctgatcttgtacatacatgtacagaaatggtctgaatcgttctgatgtttgtgttcaaattcaatgtttgtttagatgacgaaagctgacttcgtccgcaacaatagggggatagacgatggaaaggacttgcctgaagagtatttaggttctctatatgatcgagttgtgaaagaagaaatcaggatgaactcggacactttagccccacaaaacaaacaggtgaatggcttgaataaactgttgggcctagacggaattctcaatctggtttcttggatgcaaccagatgagaaacctcatggtgccaatggacgtcttataagggatattcaggaacagttccaagctaagccagagaaatcagagtaagcattattgctagaccagcttctatgtgtcatatatattattctctgtgtctcactttgtaagcaagattctgaaatatgttttgcgatgttattcgtctgcaggtcagtttatcatactgttacagatatttcgatcttgagattcatactagaggtctcttggggaccgatgcttgctgcattcagtgtcactattgaccagagtgatgatagactagcaacttctctttgcttacaaggcttcagatatgcggttcatgtcactgcagttatgggaatgcaaactcaaagagatgcttttgtaacttccatggccaagttcactaatcttcattgtgctgcagatatgaagcagaaaaatgttgatgctgttaaa

SEQ ID NO: 178008 - DNA, 131 bp, Arabidopsis thaliana landsberg
atggaattactggggaaacgaatccaagaaagcccaaaaacaaaagtggtcgtggagaaggggacttattgtactgaaaaagttattgctagtgctcatttactctatacgcgtcttagtggactgacaga

SEQ ID NO: 178009 - DNA, 441 bp, Arabidopsis thaliana landsberg
atgcagaaccagtgcaagcagtcaaaaactcagatggtacagagcaaatctcacgtgaagtgactgtagacagagcaaaggaagaggacatagccccaaaaacagaagaggttttttcttaattctttaaagctaaagatcccattccctagtaaagcatttttcaggaaactttattaatactatttatccttcactgtgcagattcaagaacgtcctagtgaatcaaaagcttcactagaacctaaggaagaggtagatcatatctcaaatgagacagaggaacatgaacatgtattagagagagacgtacaacagtgtgagaccatagaatctgaggctgttgagacaaaagaagacacacaaccaagtctggacctgaaagaggataaagaaacagaggaagcagagacattcaagaccgtcttttcgtctgatgag

SEQ ID NO: 178010 - DNA, 90 bp, Arabidopsis thaliana landsberg
ggggaaagttgctgaaggtatcgattttgatcgtcattatggaagactggttgtaatgtacggagtaccattccagtatacattaagcaa

SEQ ID NO: 178011 - DNA, 186 bp, Arabidopsis thaliana landsberg
ctgcttagaagaggcccctctaagttgcgtagaggacatgtgaaacaaaagatacctaaatcggcagatgattctgatgcgcagattttcagtgtcaatgacgctgatttcactctttctgaaggagctttgaaattgttcatctcaacttggaaggaaacatgtaaagagctaagcatctcagtg

SEQ ID NO: 178012 - DNA, 108 bp, Arabidopsis thaliana landsberg
gttaaatccaagtttgaaatcaatctcatcgttaaaaaggtgaagatcacacaaagaaaacgtcaaatggatcatactgggcccattttgcagaccaagagaaagtga

SEQ ID NO: 178013 - DNA, 298 bp, Arabidopsis thaliana landsberg
atggatagtaggaacgtgaaggcaatgtataggagagcacatgcctacttggagacggcggatcttgatctggctgagcttgatatcaagaaagctctcgaaatcgatccagacaacaagtgagtaattttctattggtcctttgtttttttcgttgcgatgtattctaatttccaacatgggtatgcacagggaggtgaagatagaatataagaagttgaaggagaaggtgaaagagtataacaagaaagatgctgagttttacagcaacatgttgtcgaaaatgcttgagccacac

SEQ ID NO: 178014 - DNA, 156 bp, Arabidopsis thaliana landsberg
gaagagcaaaaagccatagcggaaaaagggttctacttccttccgagtccgagaagcggctccgagccggcaccggagcttttgccgctgtttcctcttcgttctcctaacggcactaatcaccggattcatgaagataatcatcgagactcttag

SEQ ID NO: 178015 - DNA, 151 bp, Arabidopsis thaliana landsberg
ttttatcggagcatacacaacatcgacatccttcagccacttcatattgggtacacggtttatgtgtacttcattagcaatgtcggacagatatttaccccatttgaacccgatcttattaaaacacttcttgaagtcgcccacccgcttg

SEQ ID NO: 178016 - DNA, 188 bp, Arabidopsis thaliana landsberg
aatcttatggaaaagcgcacgaggtaatcaatccggtcttggagcgtcgagagaaagttgacaagcttcgctcgactgtggggcttctggaaccctaccgcctgttcttcaacctccccaacacattgcaggagagcatcaaacaaggaaaatatcaacaggcggcacgcgactacaataagggcaag

SEQ ID NO: 178017 - DNA, 576 bp, Arabidopsis thaliana landsberg
atgccttacctcaatgagtcactgcatcaacaactcagagctctcttctctggcgatccatccaccaccctcaaggtaagtcttcttcttctccctttctctccatcgttttctctttttccttgaccttaaatgaagaagcgatgatgttttgcagatgggagtggtgttgtttttcttggccatgtgtggctcttctatcactctttcgaatcctcttatgattttatccgtttgtggttaatttatacaactctttactaatccattccaatgcgtttttagattaccaattactggaaagaattggaggaaatgaagcacatgaccaagcaagagttcattgcctccttcaggaggtaagtccaaatgcaagaactttacagaatctaattaatagtctaaatatgtgtctttgatagtaactagaggtaaaaatcgatctaatacatgaagagtagcggtttctctacaggagcttatataccaatgtgtgccaagatcatcaaaaaggactttggcaagcatggattggccgtgttaccgggaataaagatcattaccttggaaactttg

SEQ ID NO: 178018 - DNA, 550 bp, Arabidopsis thaliana landsberg
attgtcgtacccagtccggatgtccgtggacgcgaagagattttggaactctacctccaaggcaaacctatgtcagaagatgttgatgttaaagcaattgctcgtggaactcctggattcaatggtgctggtgagtttcttaaatctataactacagtttagtcaccctgaaattcagaagtgtcttcttttgtcactaacctatgaagattcaatgactcaccacatttttcccaatctcaccaaacttttttccagatcttgcaaacctggtaaatattgctgccataaaagcagctgttgaaggtgctgagaagttatcttctgaacagttggaattcgcaaaggaccgaattgtcatgggcacagagaggaagacaatgttcgtatcagaggactcaaaaaaggtatattccaatatcttaacaacatagaagtgtttggatgtggagttcaaacatgatatgacctgtcacttacttctttgcctctttagctcactgcataccatgagagtggtcatgctaatagtcgctttaaaatccaaaag

SEQ ID NO: 178019 - DNA, 151 bp, Arabidopsis thaliana landsberg
cacctccgtcttctgattctatctacgaatcattcgttcaatgtttctccgacaagacaaaatctccacaagcccaaatcaccgacaatgtcttctctcggacaaacccttctttctcctccgtccttcgtgcttacattcgaaatgggag

SEQ ID NO: 178020 - DNA, 149 bp, Arabidopsis thaliana landsberg
gcaaaaccgacggcggcagacgggaacagcaattgcagaagaagaaagaaaggataagcggctgttactataagaagaagagatacgaagagaaggatttgcagaccgcaacgccggagactgtggcggaatcagatcgaaggacttag

SEQ ID NO: 178021 - DNA, 71 bp, Arabidopsis thaliana landsberg
gtgttggatgcagttatcgaagtggtgccgcccgtgcgacaacaagttcgtatacgagttcatacagtcag

SEQ ID NO: 178022 - DNA, 6444 bp, Arabidopsis thaliana landsberg
aattttgggtaagctaaatgtttccacctgccatgcagctgagcacaactatggagctgtggtgtcactctggttaccagtaattctggtatatttttcttaaccacgcatctaaatgaattagatagaaagtccatggatgtctcatattccttaaatttgcttcaggtttactttatggacactcaaatttggtatgctattttctccactatatgtggtggtgtcattggggcctttgatcgtttgggagaggtagtttttctggaacctttttgctcacttcttttacccttgttttgttactacatcaaaataaaggtttccacattttctgaggatatcaagagcgtttgagatgattcttttacatttgcttatatcgcatcctgtgtttctactcattcgattaacattcgtgcattatatcttctcgttatttttaattagtatacatttttctaactccttaacgtgattgtagttagtgtaatccaaatggttcatgaagtagtatattccgtcgaaatagtttatatctagttttcaaatgtatatctcctagtgaaaattcattatatatcacagacgcaactgtgtaacttgatgcatcttcctgcatgaaaatatattaacaaagactcatttctgttctccttccagatacgaacgcttggaatgctaaggtcaaggttccaatcattacctggtgcatttaatacgtacctggttccttctgataaaacaaggagaagagggttttccttgtcaaaaagatttgcagaggttacacaagattgatgctcgttttatcaacaaagtgattgtggaaagaatgttgtcatacatctactaaattatatctgtatgcaggtcactgcagcaagaagaactgaagcggcaaaattctcccaactctggaatgaaatcatttccagcttccgagaggaagatctaatcagtgacaggtaacaacttaggtattatactacctttctttatgaataccttattttccgtgccttaaaaccaactattttttcagggagatggatctgttgcttgttccttatacttcagaccctagtttgaaactaattcagtggccaccatttttgcttgcaagcaaggttggtggtctccctttgtcatcaaaaataccgttttcttcttattgctaaacttctcatcttgttacagataccgatagcattggatatggcagctcagtttcgaacaagagattctgacctctggaagcgcatatgcgcagacgaatatatgaaatgtgctgtcattgaatgctacgaatctttcaaacatgtcttgcacaccttggtaattggggagaatgagaaaaggtatttcctcattcatcagaaaagttcttgattatgatttatgaagcactttataaatcattaagaatctataaggaaaccagcactccaacttttctcttctgttgaagctactggctgtcttattagttttgataatagatgttctctaccatgtctctacttgattttctgacgtattgtagtaacatttctcctcctaaggtggcatttttaagtgcgtcaacattcctctgttttgataataaaatagttttcttaacctttcacatatatatgtgctccaacctgcaatttcagtccctctattgagttttcattcatttaattgatactaagaaaagatataatgtcacaggattattggtattatcatcaaagaggtggagagcaacatatcaaagaattccttcctttcgaatttcagaatggcgcctttacctgctctttgtagtaaatttgtcgagcttgttggaattttggtaagtgaacaacatccttgtttaatcattggtattgatttaaggctggttattttttatgccagagacagggcaatcccctaatttaggtctgtttattattaatgttgtgctggaagggataatacttgtgaaatgttatctagggaactaaatagttatgtatacttatgatgctgcagaaaaatgcggacccagcgaaaagagacacagtggtgctattgttgcaagatatgttagaagtagtgactcgagatatgatgcaaaatgaaaaccggttagtgagctatagagaactcgaaagttctttttatgtagatgtatatagtaaccacacaaacaagatttgacatgggtggcacctttcttcagtgaattggtagaacttgggcatactaacaaggaatccggaaggcaactctttgctggtactgacgcaaagcctgctatactgtttcctccagtggcaacagctcaatggcatgaacaggtaaaatctcaaaacaaattataaggctaattcttagagatactctgtatataatgatctaattcattgttgtagataagtcgccttcatttacttttgacggtaaaagaatctgcaatggatgttccaacaaaccttgaagcacaaagaaggattgccttcttcacaaattcactgtttatggatatgccacgagctcctcgtgtcagaaatatgctgtccttcaggtatgtgctctggttatcactatttttgaacagaatttatgctcctttgaaggataccatgtgctatcaatattctccaatttaaatttttctacaattgagggatccaacttttccagtttttttcacattttgttttaatttgggctggaatgaatatacaatagaaaatccatgtagctgatactctggaactgttatgaatgcctactgcagatagcagctcttccttatttaacctttgagttttgttttcgcatttacagtgttctgactccgtactatagtgaggaaaccgtctactctaagaacgacctggaaatggagaatgaagatggtgtatcagttgtatactatttgcagaagatctttccaggcatgtataattgacgagctcttgttgttgaacttagttactcctaaatgctttcggtaatttatacggccccccaatttcagatgagtggactaacttcttggagcggcttgattgtaaagatgaaacttctgttttggagagtgaagaaaatatattgcagcttcgccattgggtttctttgaggggacagactttgtttagaacaggtaacttataccatccacgcctatttatattttgttatatggtctttttttgcttacacctatttgtatcctgcagttagaggaatgatgtattacaggcgggcattaaagcttcaggcttttcttgacatggctaatgaaacaggtgaggcttgattagttgacttgtgttgaactaaaatcagctgcacagattgaaacgttcaagcgttttcagctcgctgtattatgtcattcttgcattctactaccaaaatacagacgcaatgttgatcatttgtgtgaagtattcatagttccatatcgaacatatttttaacattctggaatacatacttataacatttcttgtgtttacagaaatattagcagggtacaaagccatttcagagccaactgaggaggacaagaaaagtcagagatccttgtacactcagttagaggcagtggcagatctcaaatttacttatgttgctacctgtcagaattatggaaatcagaagcgaagtggagaccggagagctactgacatcttgaacctgatggttaagtaagtccctcccccatatttgttgattccagcatttgttggttccctggtgagtctcactttcatattcaatgctgcagcaatccctctctccgtgtagcatacattgatgaggttgaggaacgagaaggcggaaaagtgcagaaagttttctactcggtgcttatcaaggctgttgataatcttgatcaggtattttaacttttttgaaatcttaacagattggctagatactatggtccaattcgagaacccccagatttcaaacgttgtatctcttacttttgaaaggaaatatatcggataaaactacctggaccagcaaaaattggagaaggaaaacccgaaaatcagaatcatgctctcatttttactagaggagaagctctccaggctattgacatgaatcaggtaaaatactttcccccaaccgaaagcttccacaacataaacatagtggacttttatttgttggaagagttttacttaccaataatatttaatttataggaccattacttggaagaagcacttaaaatgagaaatctgctggaagagttcaatgaagaccatggagtacgtgcacccactattcttggtttcagagagcatatttttactggcaggtatttgggaaatatggttattattttcttgtcgtgtaaagaacttcctgcattttgctagctgattgatatgtgtttcacttcggcatcttattcgcagtgtttcttctttagcctggtttatgtcaaatcaggaaacaagttttgtgaccattggtcagcgagtcctggcaagtcctttgaagtatgtcatgttcttctttctttcaatctacacacattgatgctcattttaactaaaagtttagtagctgttaaaaatgtaattccttctcgatatcatttaactcacacaggcaccttggatttgtgatttcagggtaaggtttcactatggacaccctgatgtcttcgatagaatcttccacatcactcggggtggcatcagcaaagcttcacggggcataaatcttagcgaggatatctttgctggttagattgtgaaccttacttcttcaaggaaaatttgatgttggttccttcatcatttacttatgattgattcatgtttgtatataggtttcaactcaactctgaggcgtggtaatgtcacccatcatgagtacatccaagtagggaaaggaagagatgttggtttgaaccagatatcactctttgaagccaaggttgcttgtggaaacggagagcaaacattgagtagggatctctaccgacttgggcatcgttttgactttttccgcatgatgtcttgttatttcacaactgtaggcttctacatcagctcgatggtaacttctgatcttccaatgtcaaactaagtttatcgttaacacataatttgcttaaaacaaaacataacggactaattatgtgtactacagattgttgtcctcacagtttatgcattcttgtatggaagactttacttgtcattgagtggagtggaagaggcgatagtaaagtttgcagcagcgaaaggagatagttctcttaaggcagcgatggcgtcacagtccgtagtgcaattgggtctgctgatgacactaccaatggtgatggagattgggctagagagaggattcagaacggcgttgtctgatctaatcataatgcagcttcagttagcgcctgtcttcttcaccttctcacttggaacaaaggttcattactatggtcggaccatcctacatgggggatcaaagtacagagcaacagggcgtgggtttgtggtgaagcacgagaagtttgcagagaactacagaatgtattcgagaagccactttgtgaaaggaatggagctgatggtgctgctgatatgttacaggatttatgggaaagcagcagaggactcggtgggttatgcgcttgtcatgggctcaacatggttcctggtgggttcctggttgttcgccccattctttttcaatccctcgggattcgagtggcagaagatagttgatgactgggatgattggaacaagtggataagcagcagaggaggtatcggagtaccagcaaacaaaagctgggaatcatggtgggaagaggaacaagagcatcttcttcactctgggtttttcggaaagttctgggagatatttctctcactgcggtacttcatttaccagtatggtattgtgtaccaattgaacttgaccaaggagagccgaatgggaaaacagcacagcatcattgtgtatggactgtcttggctggtgatcgtggcagtgatgatagtcctcaagatagtgtcgatggggagaaagaagttcagtgctgatttccagcttatgttcaggcttttgaagctgtttctgttcataggatcagtggtgatcgtggggatgctattccacttcttgaagctgaccgtgggagacataatgcagtctctgttggcgtttttacccacgggatgggctctccttcagatatcacaagtggcgaggccattgatgaagacagtaggaatgtggggatcggtcaaggccttggctagagggtatgagtacatcatgggagttgttatcttcatgccagttactgtactcgcgtggttccctttcgtctctgagttccagacaaggcttctcttcaatcaagcctttagccgtggtctccagatccaacgtattctcgccggtggtaagaagcagaaataa

SEQ ID NO: 178023 - DNA, 1207 bp, Arabidopsis thaliana landsberg
gttaaatatgaggggtcagatattatcctgcagaactcaaaggacattcaagagcagatttattctgttgattacattccttctgattactttacagagaacaacacttctgtagcagaaaatgaatgcttccgcaagattcaaccatggttcaaagatgccagatttccccttctagaagtggatgaagtaaacttgagcgaactatcaagcttatctgtgcttgataaagtatttactgttcttgagacgattgaaccccaagacactaatgcagggagttctctcattatcaattctaaggagcttataggctcaaaggattatgatctattggatgtactctctacggattgctatttgaacaagagtggccaatttgatgtggtaccagagtatatgttttctcaaatggatatagtgcctctcctggaaatatcaaatgctgaggaagttcagggaaaggcggctgtaccagtatcttatgagttattccagatcctggatgtggatatgtctgatgtttttgatatcgtcctttgtcttcaaaaagccattgaaccagaaatgtgttacggtatgttcagtaaagagatgtgcttctaggatttcgatcaattagttgtcagttccgaacttgccttcacagatgatgccttcaagtcttggcctcctcctgttttacatgattatgagatgacaagatctctggagttcatttatgaggatgttttgtcaaagatcaagcctcaatccttgtctgcctcaaatgacatatacttgccgtggaaccttcttgaggaaagaaaccacaaccattgtgattatccgtttgaagaaatagttacattcaacattgattataactgggaagcttcagaaggagacaaatgggtttatgatttcattttctctgaagatgctttctgcgagccacttgtagagaaatgcactgaacctttctatggtatatctaaccttgatgagcatgctcctgttaatacttcgcatgggttattggaaaaccctttccaaaaaacaggagcaagggattgcgcagtggatgataatgctaagaaggctacgctgttgttcaaatcaatgtctgcttttgatgacttaacatttttcatggatccgaagaaggctgtgattgaagataatctcgagtctagagtcgaagctgctaagactaccaaccataaat

SEQ ID NO: 178024 - DNA, 82 bp, Arabidopsis thaliana landsberg
atgtatgtcgatatccagagagaaatagggtatttttttggattcacttctcgacgaacacttcaaattcattcgacatatt

SEQ ID NO: 178025 - DNA, 1015 bp, Arabidopsis thaliana landsberg
atggtaacactagtgggaacatatggtacgaggatattggctgatcttatgcgggaaagcacagtaagaatgagcttgggaaggggatgggtagattttgcgaaagccaataggttgaagataggtgagtactttacactggagtccatttgggaaaatgactctcctattctcagtttgtatgggccaaatacttccaaaagtgataaaaggaagcgtagagagaactttccagtagcttgtgaaaaagagtatgtgtccactgaggctagaaatagaaatgaccccgagaaagacaagaacacacagcagatgattaatcaagcatcactaagcgaaaaccgattagtgataacactcgtaccagaagatgtcgaagccggtatgctggtaagcttataaaataaaccttgttttagagatcaattatttcttttatcttgaattctaatcaacaacaagaaatgtttatcaaatatcttgcagcgtcttccaagtcacttcatgaaagctaatggcatagacaaagttggaaaaatatatatgttgggtataaatgaaatggagtggtggtggggagatctattgacaagagatggaatcgtatctgtaggatgtggttggagatacttttgtgaatctaatggcgtaaagattggaaagtttttcaccttagaatatatgtacaaatatgacacaaggccggtacttaaattctgtcccaagtccgggaaataaaaataatgtttaattatagtatgttaagattttcatgtcttactctaaagccagtcctttttggttgttaagttaatggagtgtttgttgtttagttaaagatatataaccaaaatggccatattgtttaagtgggctctgttcgtttccctgtcgctggatccagcgacagcgacagcaaccatcgacaacatacattgttcgtttgtctgtcgctggattcagcgaccaattacagcgacaatcgctaataactgtcgttgtgttgttcgtttga

SEQ ID NO: 178026 - DNA, 113 bp, Arabidopsis thaliana landsberg
gacaattgggagataaagagatgggctatggaatggacgggaagacgaaaacagttgccatgaccatgagtgctccagcaggaaagctttcaaatggtgacaccaatgtttga

SEQ ID NO: 178027 - DNA, 207 bp, Arabidopsis thaliana landsberg
ggcagagaaaatatagagcgtttggaaattactggagttggtgatccctctggacggggtctaggattcagctacgtccgagttgcaccaaaatcatcagctgcatccgaacataagaagaaaaaggcagcagcctgtcgcggagtcccaactgtcactggtacagatgctgatcctcgcagattaagcatggaagcagctcgagag

SEQ ID NO: 178028 - DNA, 1902 bp, Arabidopsis thaliana landsberg
atgttactgcttggtgctggaggaggagagttaccgaaagagggaaaagaaagccgcgagaagaacgaagccacaaactcagggaactgtgatgtggtcagacaaatttagtgttactctagtgacattgaaaactaaggagccaacaagttgacagagagataaataatgatgtggataacctttgccttgcggatgccaaggatgttcaaacgatacaaggaacccgcaattatgccgcaaattccaggaaagatggatcttttccaagaagatagtagaagctgcaaaaaaaaaagaaaaaaaagaagattatcaatactaagaattcactactcgaacaacaatgatcatacaaacacctatggttttaattacctgcactcctgcgagatatatgaatgacttatcagagaagttgacaccaaatacgcgaaacctcgttgaaacaggaatgtccaagtagaagggtataaacgaagcaaatatcaggccgtatggtccagaggttagtaagtttgctgtggtatctgagaaacaaacaaacaacatatagttgcaataaatatatacaataaagaccaatgaactgaaacacataatcgaattcatgaccaggacaatatcttgtaagagatcttcatgaatattagaacaaaaagaaaaataggagggatactgaaaccaattaagaccatcgcagtaatgtaatcataactcatcagctcccacatcataatcagagaaccacaatccttccttttgcatttttttccatagtttttgtaggagtggtaatgaagcaaatttaagtgaaccaacaaccaccacgcaaatcctacttataagccaaatcaaaggctttaaagaggctgtcttgaaatagaatgatggatacctttaagcagtgataacaaaatgacctcgagtaatagagatacagtccctgagaacaagataaaaacctgcagcaggaacaacaccctttgatttaacttttgtaagtaaaagaaaatagtgaaatttaaatataaaaaacgaaaaaaagaatcatcaccagtaaacctttctagaaaccagttttccaagtgaacaagaaaaacataaaacacatgagaatatatctaagaagcaaagagagtcgagctacaagcatcagttaccgagtacttatttgagccaatctgtctctcaaaaactcggaagtagtatagcaaatacaatccgaacatcaattctggtgtggaggagaaggcaaaagtggacatgattaacttccatatccgaaatttctcaaaaatgtcctgcagcgtgtttggaagaagattaaatagagaaatagtattatgagatatcagatttacataacaagtagaaataacttagaatcataaactaggatgctagaatcaaacatctttcaggtaacagaaacagataattacatgcaagccatcgaactacttaacactcgacaagtgagtctaaaccctccttatcaaatcatgtaatattcagcatcacacgactgactaaaatcgaagttgaagctcataaatgatgataattagcgaaacgagaatcattccgagtgccaacaacgtttgttcaaaacagtaaggcaacagcacactaagtactgcatattgttctaatagatcaaaatcgaacaaattctaggttcatacagcaatttccaaagtaaatccccagaaatctacaccaaatgcgaaatacctggtaagacaaaccgagcttagaagaacgaccttggatcccgaagaagacagtgaaaagagcgctcgtaataacgaaggctttcgttaccggagcattatctgcaaagtcaacaattcatcactcagaaatcgacatttaaatcaggagcagagaagaaactga

SEQ ID NO: 178029 - DNA, 917 bp, Arabidopsis thaliana landsberg
  unsure (1)..(917): unsure at all n locations
gatgctcccattaaggagtctggtgacatagataatccaaaattccaaggtctgatcttatgattgcttttagcgattttgcagtcttgtttcctttattaacctttgtgctattgtcagctcttcagagagtgattaagaagtacaatgcttcaccacaccccattagcccatccaataagcaacggaaagcttatggctctatcaagatgcagatgacaacatcactgtttgatttagttcgtatgacagatcctgcagatgtgatcacctccgccaacccaatttcaatggaatctgttggacaggtatgtaatgtcaattgtctttattccttatacttgacggtgcagcgtaagcatctccctactcaccatggaatggtctattattattgtcctttgttttgtataaactgataatttattgtcttgctcccagatgttcggatttcttttatatgaatcttcatacatcgcaaaaaagagtgggaatacactaagaatacccaaggtatgaacctttttgtctgaatccaaaggcaatatgtataagggtcatcttctaacgtgatgagttgcaggttcatgacagagctcaagtgtttgtttcatgtctttcncaagatgttgatgtgggagtactgagatacattggtactactgagagatggaacaaccaacctattttctcttccaactattgagtgtaccacaaacactagcttatttattctggtaagagaatccttggatcctcagataagattctttacctctctatggagctctagaatcatcagttatataaaattttggttaagcaaattcttacttgggtcattaccttgctcatgtttcttataggttgaaaacatgggtcgtgtaaattatgggccatatatctttgatgacaag

SEQ ID NO: 178030 - DNA, 238 bp, Arabidopsis thaliana landsberg
gtcgctgagttcaacgtgcaagcagcacaacagggaatagtctatattgatgaagttgataagataactaagaaggtcagtatgcaagacatgataacttctgaactcgataagaacaagataattgggctttatgcttcctggattctcctttctgcaggctgagagtttaaacattagccgggatgtttctggggaaggtgttcagcaggcacttttgaaattactggaaggcact

SEQ ID NO: 178031 - DNA, 878 bp, Arabidopsis thaliana landsberg
atgggtacgggttttttaatgggtgtaaatatttttcacgggtacgggtttgggatagcaaaacccggtgggtttgtacccgttgccatctctactcttgtccattcttcggagtgggcccacagccggtgtatccccttcggagcatcgcactcccggttacattcgggaccaaggaaaacttccgcacagagaacgtccagttcgacgtcgcggaggttaacctccccttcaatgccatcattgacaggccagccctataccggttcatggccatttcccattacgggtatttggtcctcaagatgctgtccccggctggggtacttatcgtgcggggtgaccgcgccactacggtggtggctatcgagaagctgcacgccctggtgcagaaactgctcgcccggacgatggaggaggaacccctcgacctctggtaccaaggcacctacgaaggtgtcgaaggtgcggccatccagctctacgcgattccccctagaccactcgcattgcgggtgatctagaggaaaaataggaactcgcgctcgtcgccttcctccaggcaaatgccgacgtcttcgcatgggagccgtcgcagatgcctgggatccccagggaggtgatcgagcaccatctgaagatcaaccctgatgccaaaccggtgagtcagaagcctcggagacagtccattgagcggtaggacttcatccaaaaggaggtccggaagctgctagacgccggcttcatcaaagaggttcatcacccagtgtggctggccaacccagtcatcgtccccaaggcaaatgggaagcttcggatgtgcatcgactacactagccttaataaggcttgtcccaaggacccgtatccacttccac

SEQ ID NO: 178032 - DNA, 1180 bp, Arabidopsis thaliana landsberg
ctacaggcggaaattcggctgttgcacataagtcaggatctctaagtactccagcaacttctactggacaagcaggggataataagtctttagtagtgcatagtgttgttccacgggatagtgatattgggaaagactcttctgattcaggaaaggaatctatcactttctcaaaaacaaagccaggcatgctgttgagaccggcttatgtaagaaagacgccaacaaagtttgatgaaacaaagaagcagtcagtggctgttggatatctaaagaaaagtggattggatggtgagaagaaactagatactgagacggcgtttgattcagaaatgagtggtaggaacccatatgatgccgacgattctatcatcaagagtatcaccaacaagtttgaacaagctttattaccagaatcaccgactgatgaagcaaaatgtaggttctcccagatcataccttagtttcattagacttgagcgttcagatgatctaatcctatccttttggaaatcttgcaatctttgacttaggtatgctgctgaaaccgcctcgtgtgcagagatcaccaagtactaagtacaatgaggcaagatgggcgacatctactgattctggagctttagacagtaaaaagaatgggttagagtcctcaagagacatggacttgccaacagggctcaaggatgacagaggtagtaacccatgtgaggaagatatcgagaacaagagcatttcaagtaggtcagaaagagttctgtcaccagaaaaggctggtgatgaactaaaaagtaagttcttgattcaaaagtggcgtagactaattaatggggatttttgcttctaaagccaatgttaaaactagtgaaacgttatgtgtttggcttcctttcaccttttaaaactgttaattaagaagaggtattaaattgtctacaagaaaaatcaatctggaaaaatgagccggcagaaaagtaatagcattagcttgtaggttgctacatctaaatctttagctacttttagggcttccttcacagttttcttgtcagttgtggtcaagattctcagtattcaggcagcaatcattttataaattggttatgaatattttgtcatgcaggccttgaatcccctggaggtagcaaagaatcaaaatctgtgaaggttgttagaggag

SEQ ID NO: 178033 - DNA, 144 bp, Arabidopsis thaliana landsberg
gctgtcgcctggagacctgttgccgttctgcgcacgaccgaccgagagcggcacttgggcctccggatcaccaaggtccgtcggatgggcacgctacaccagacagcatgcgtcgctctaggatgcgctgaacgctacctacgg

SEQ ID NO: 178034 - DNA, 108 bp, Arabidopsis thaliana landsberg
gtgtgggcggcccagacattacgctattgcaagacaaaacaactcaaccaaactgaggaacaattgtcatcacctccaaaacgatcggctttgggaagagacaaataa

SEQ ID NO: 178035 - DNA, 691 bp, Arabidopsis thaliana landsberg
atgcattgtggcgaacatccggatgccctgtatctgaaaagctctggtcaatcagctacatcattgtctcattctgcgtcagaactgcataagagaccaatggatacagaagaagcggaagagcttgtgagacagtgggaaaatgttaaggctgaagctcttggaccaacacatcaagtttatagcctttccgaagtccttgatgaatccatgcttgtccaggttactgtttctatacatctcctattattcctttacttaattatgttagtttactacagttgaacatcaatgtttaggtagagtcaatatttctttgtttaatgcagtggcaaacattggcacaaacagcagaggcgaaatcctgttattggaggttcgttctgcttcatcttgaggttttgcaagcacatatattcgaagatggtattgctggtgaggctgcagaaatcgaagctcttctggaggaagcagcagaattagttgatgaatctcagcccaaaaacgcaaaatattataggtaaaaaaaaacatttcgctttcgggttacttttggactgagctggtatcttcttcactgatgcagcctttgtaaatttcttgtagcacttacaagatccgatatattctgaagaagcaagaagatggattgtggaaattctgccaaagcgatattcaaatacagaagtga

SEQ ID NO: 178036 - DNA, 934 bp, Arabidopsis thaliana landsberg
gttgatggatttggctcatcaggaattgtccctggccaaccatttttcgaagcttaaggtacacttataataatggtcctaaattttataatttagtgtttcttttttttctgttttgctggagatcttggacatacatcctatttcttgtgaaataaaaagtaaagttgtagtttatataacatggaggaaaaactggaactatacaaattgatgatttttttttcctgtctattcaggaaactaactgtgattagtcttgaccatatggatgtgctaacatgtttatgcaactatcagatacctgatggagccataaggaaacttctactaactacccctctccctgaaccggattcatatcgggttgatttccgatccgtgcatgttacctatctcaacaatctggaagaggatgatatgtacaagcgttggcggagtaatattaacgaggtaactagtgcaggatacatatgatttatttgtgaggatacatatgatttatttgtaggcaaggtgccatctggaaaataaaatatctaatggcctgtgttcctctcaccttgtaataagattttgatgcctgccttccctggacaactacgttacatccgaaagaacctattccatgcagtttacgtcattgatcctgcgactgcctgtggtcttgaggtaagtcttatacctgcactttcctggcattgctgactcttcgtcccttattcattagtacagatcttttgagctgactattgttggatctttacagtctattgaaactctcagatctttatatgaaaatcaactccctgtgagatttggggtgatattatattcaactcaactaatcaagacaatcgagaataatggtggtcaaatcccatcttctgatgcagtgactaatgcccaagttaaagaggacttatcgactatg

SEQ ID NO: 178037 - DNA, 528 bp, Arabidopsis thaliana landsberg
aaagttggatgtgttcttgagtttcagcggtaagatagctcttgacgttgattttggttatgatttgtcacgaaatggtatcaaagcttttaaatccgaaagctggaaggagagtagcttcaaaccaattgatctacgaacgcttgaggctttgacagagtccaaagttgcagttgtcatgacgtctgatgaagaagtttcttcagttgggttccttgaagagctcattgtaataattgagtttcaagagaaacgttcactcactgtcataccagtcttcctcacaaaacaccctttggatgtggaaaaagtctctcaaatatttcctgagagagccaaaatttggaggactgcaattgccaaactggacaacatagctgcacagtactcgttttctcggaatcttgcggtgatgcacggaacacaccggatcaagcagattgctgatgaccttaggcttatgtttcccccccccgcatcaagagatttcaaaggccttgaaaaaataaaccgtcacatgaaagcatt

SEQ ID NO: 178038 - DNA, 387 bp, Arabidopsis thaliana landsberg
atggcatttcaccagcgaaactcgttacaaaaaggtcgagaaaagtgagttgtgaaagatttcctattgaagaaggaatcccaccactgaaatagtttttagaaaggtcgagagtggtaagatgagaaaagttttcaatacaagacgggatttggccactgaaataattataggaaaggtcgagagtggttagaaaacgaagattttgaaccgtaaaaagactgctgttggaatgaaaccggctttggaggcagctacgactaaggtctagctcaagcacttccccggacttgtcattgcacgtgataccgtcccaatagcaacagtcactgttattcgcccatgactccgtcgtcggatgaaggccgtcgaaacaaggcttcttaa

SEQ ID NO: 178039 - DNA, 469 bp, Arabidopsis thaliana landsberg
ctccggcgagtgcgtccctgtaatgatcaagacaaagagggcaagtcagaagaaggatgttctagatgatttcaaggtcaagaagaaggacgttctagatgatttcaaggtcaagaataaggatgttctagatgatttcaatgtaaagaccgaatcaaaaacagagcaggaaaaagaaataaagcaaacagatttggaaacagagcagaaacagagctgtgtattgaatgagaatctgaagaagatttcaagaccaaaccatttattacccgtgacagtggtgctggttctaatattattggtgtttttcggacggaccgtctcgatcatgtgcacttgtatcgtttggtacttggttccaatgatcaaggaacagagcagaaacagaggatcaacatacgagacgaagaggaggaagaaactaaatattgaaaacagagctgctcctgataaaagtgaaacccggtga

SEQ ID NO: 178040 - DNA, 107 bp, Arabidopsis thaliana landsberg
gcgctgtctacaagccgataagcaagcgaaagccacccccaccgttcagttatgtcgagacaaggctatacacgggcgaaagacctatagccaacaaataccgcctg

SEQ ID NO: 178041 - DNA, 155 bp, Arabidopsis thaliana landsberg
aggtggatctatcagtccaaccgtctatgtctctccagggaattcacgaatcgatcgatccagaggtggatcgatcgatcccactgtatatgtctgaaacgttgaagtacggaccgatcggtccaaccgtctatggccgatttgttgtagcctga

SEQ ID NO: 178042 - DNA, 257 bp, Arabidopsis thaliana landsberg
cacaaatcagctccaatgagtttcaaaaacctaccggaactaataaaaaaaaagaatctcgagatattcagagaaatcgatcggaaagcgtaaaagacgaggagcttaccggctctaaagacaggtgaaattagcagattagggtcgaagaaaccatatccctttggctacagatacgaacttcatcgccttcaaagattctctgcttcctttctagagatttctatggcttttcgatcgatgccacagtagagtag

SEQ ID NO: 178043 - DNA, 690 bp, Arabidopsis thaliana landsberg
caacgtcaagggcagcatacccaggtaagcaatagtcacaagttcaatcctggtgaagatgcagctagcttccggatagaaccactgaagagtggaactgcaaaagacggtcacactcgttatggtgtgtcctcggtgaatagaaatggagagaatgttatgatgggctcgagtcggtctcctagaaaagaactgaggacacaacggtcttttgtccaacgcggaacagcccaattgtcaagattctcaaactcggtagctgctagagatggatcacatttcgctatagcaaatccacggtggtttgaagatagttataacaataataacggaaggcaaaacggaggtgcttggtcccaacgtttggtggttaaacacaaagagtttacaaaacacaaagaatctataacggtaaaaagaacatttgaactgtgtgtaattgtgcttctctttgcaatggaattctttgtgggctaatcacaatttgtatggttatctttaggttaacggtgaaaagaaagagagaatgcactgctcagggcctttggtttctgcaggaggaaacttagatgaaatgttgaaagaacatgaaaggcagattcagttagcggttcgcaaagctcgggtggataagaagaagaatagaggcgataacagacagactcaagcgtttcttgctgcaaatggcag

SEQ ID NO: 178044 - DNA, 462 bp, Arabidopsis thaliana landsberg
atgaaatatggggctccccatccatcgattcgattgagattcgatgagagcgacggagaccaacgggcaacatcaacggcggcggaggttggtgatgacgccgggataaaaacatcaccggcggtgtcggagaaggcgtatgcaggaggtacaaaggacgtatcaacgcaagctaaagcaggcatctttatcttcaccctcttatcagcaaacgatcaacaatctcactttacagaaattctcgaacaaaacaaaaactttcgagagaagaacagagcaaaaactgaaaaatcaaacctttttttttctaatttcccagaatttgtaaaggtaggggtttaaaaaccgccgaggccggagcctcggctaccccctcaggagaagacagaagatgaatctatccccgccgtgaaaaccacctctcgcagcccttcccgatccgagaatctccacgatgaataa

SEQ ID NO: 178045 - DNA, 364 bp, Arabidopsis thaliana landsberg
cggacgttgccgagtggggcaactggaccaaattgcggcaaatttctctagtcttcgataagcaacggaaagtgagacattctggagaacctcctattggcagtccatctcggaatggtagaaaaggtacgatgaggtttaggtgagagaaaataccttcttcgagccctgagtagaaatattatcataccccttctagctctgagtagagatatcaacatgccccttccagccctgagtacaaatatcaccagcactgagtttcccaaatcatctccgcgacctccttcagctgctgctctgagatttccagatctctctcccgtgggcaggatggcggaagacggaacagactcgcaaatga

SEQ ID NO: 178046 - DNA, 200 bp, Arabidopsis thaliana landsberg
tccagccgaaacgatgccgtttaatggaaaatatcaatagcttatctccgttagtttacgtggagcttaaggaaatttccccaatcggaaaattccaaaaacccataataaataaatcagatttgcaggatctcttcttacttcgtcgaactgtgacgtcatctttagtttccgataaaattttcatcttctccggttaa

SEQ ID NO: 178047 - DNA, 70 bp, Arabidopsis thaliana landsberg
atgcgcatgtatcggtccaaccgcttatgtttgcaggttcggcaccgaaagagcttccagcgactgcata

SEQ ID NO: 178048 - DNA, 650 bp, Arabidopsis thaliana landsberg
tctcccagatattcatcaataccatcacaatgaatcttctaaagaatcttcaagaagatcctcccaactcgaaaacaacaaccgatcgtccaactttgaactctctttatctcatcataaccatccaacagcaagaatcttccattgtcctgatcgaagaacccttaatcttcctcatcagcagcattacaacaaccctatcatcaatggtgttcatcaaagggtcgatgaatccgagattagtaatctccaccgtccaattagaggcatcccggtctatcacaaccgttcattccctttccaccaacaaaactcttcattaccttctcttggaggaggagacatggatcaaatctcaatcttaaactcatcttccggctacaacaacgcttaccgatcattacaatcttccccgaggcttaaaggtgttcctttgcatcatcatcatcatcataatcagtatggagtcgttggatcttcagattcgtcttctcctcatcaccataaccatcatcatcatgggatgatcagatcaagattcttgcctaagatgccgacaaagcgaagcatgagagctccaaggatgcgttggactagtagcctccacgcgcggtttgttcacgctgttgagcttctaggcggccatgaaa

SEQ ID NO: 178049 - DNA, 121 bp, Arabidopsis thaliana landsberg
atgtgcaattgggttcaaaggagaaaagcgcgtacgactcgaagcaaagggatttattacttgctggtgcttgaccaagatgcagagctgcggctgagctgtcagcaccaactcgttactg

SEQ ID NO: 178050 - DNA, 47 bp, Arabidopsis thaliana landsberg
atgtcaactgatctcaatggtgtgctgtacacagtcacagcatcaag

SEQ ID NO: 178051 - DNA, 505 bp, Arabidopsis thaliana landsberg
atgatgatcctgagtttgtcacggaatctcatcatcggatgttatggtcacttcttggaaggtatttacgattagttttctctttctcaagtttaataatgtctcaaaatgttactcagatttcttgccttttgttccatgttaaacagtaaagaggatgctcataattcaatggtccatagttaccgacatggcttctcaggttttgcggctaaacttaccaagtcccaagccaagaagatagctggtactcattcttcttctcacattttcttacatgaaatcttgattgtctcaacgagaccatctgattttttttcttttcattgataatgttgtttggccacagatttgcctgatgttgttcatgttgtaccggatagtttctataagctggcaacaactcgaacttgggattatctaggcctttctgctgctaatccaacgagtctcctacatggaactaatatgggtgaacaaattatcatcggtgttatagacacag

SEQ ID NO: 178052 - DNA, 63 bp, Arabidopsis thaliana landsberg
agtcaagaagaagattatggtgacaacaccgacgcaatgtcggacttgagacgcgtttattaa

SEQ ID NO: 178053 - DNA, 302 bp, Arabidopsis thaliana landsberg
  unsure (1)..(302): unsure at all n locations
atgctcctcatcaatcggtttgataaatgtaccggctggtttggtatgctcccagttttgtttaatttggatgtccgcatcaacttcctctaggactagcagaagtgaannnnnnnnnnnnnnnnnnnnnnnnnnnnnnnnttatatgaaggccaatgatagatgtgacataccttgaggactgtttactttcttttgtagcatgtcatgtcaacaaagttgtctctgaaagcactacagatgcaagatgtcagagatctcctcttcagacttcatcaggagacattgttgtcatctattga

SEQ ID NO: 178054 - DNA, 1952 bp, Arabidopsis thaliana landsberg
cggcgttttctaagaatcggtttggttggggagataagtgtgattctatcactaatacaacgaacgcggctttgttgaatacgactcctaaaactggtagagttgttgggagagcttattcggagaccaattcgactcagaatacgcctactaagagtgtatctaagcctccaggatcttgttacagagggaagttagatgggactggaactgttagagctggtggttatgcctcgttgtataaaggtttgtctagttcttctggacaagtttcaacagttgttaactcggtcgaagttcctcactttagccttaaggaagatccatctttctggatggatcacaacgtacaggtagcaatttgttcccatggtttacttttcgtttcttttggagtctttgaattgctgtactcttctcattgttcactgtccattagcttagctgcaccaagttgtgtcttttaacaacttgttttcgactttaagaagtttctgttaggcggcacacattgatggttactgaatgaattgcagattcttatacgtgtacgaccacttaatagcatggagaggagtataaatgggtacaataggtgcttaaagcaagaaagttcacaatgcgtagcatggattggaccaccagaaacacgatttcagttcgatcatgtggcgtgtgagacaattgaccaggtaagactcagaacgaaatcagaaaatttggtttccttttcttcacatatgtgaaagtatttttttgcatcctaaatttgtaggaaaccctttttcgggtagctggtctccccatggtggaaaattgcttgtctggctacaacagctgtatatttgcatatggccaggtatattactctgtgattctagagatagattatgagagtgatctactacctctgggtcaggctcaagctaaaaacactagcaagtttatttctgttaagccttgcgttttctggtgaccatggtaaagctgttctttgttttgtgataaagctggaaagatgtcccaatttaggtaatttggtgaggacacttaattctaatatcatgtcctctttaagaaattatttgttaattctgacaaggttacaatcagatgggatagttaaattttcagaataggagttagtggggatagtttctttctttggccttatatttctttcagttcctaacttgcaataatttgttgggattgtgcagacaggaagtggaaagacatatacaatgcttggagaagtcggtgatttagaatttaaaccaagtcccaacagaggaatgatgcctcggatatttgagtttttatttgcaagaatacaagctgtaattctcttatgatatagcttttaccatatctattacagagatatcttaaccttgctaattgcatcttgcttcattgttcttgttgcaggaggaagagagcagaagagacgagagacttaaatacaattgcaaatgctctttccttgagatttacaatgaacaaattacagaccttcttgaaccgtcttcaacaaatttgcaggtaacttttatattcttttgttggtgaaagtccaagtagatgcgaaaggcgtagttctctaatgtgttttcactttttagcttcgagaggacattaagagcggtgtctatgtggaaaatctcactgaatgtgaagtacaaagtgttcaagacatcttagggcttatcacacaggttagtattgccgtctaccaaacagttttgtcttatgtttaatgttcctgagatcttatctgttgtacaatagggttctttgaatcgaagagtcggagcaacaaatatgaacagagaaagcagccgatcacatagtgtatttacatgcgtgattgagagcagatgggaaaaagactcaacagctaatatgcgttttgcaagactgaacttggttgatctcgctggatcagagag

SEQ ID NO: 178055 - DNA, 234 bp, Arabidopsis thaliana landsberg
atgactcactacagacctactcgcatcactcttctcttcgcggatcgttccaagcgaatccctgaaggaatccttgaagatgttcatgttaaggttggtaactctgttatccctgctgatttcgtggtcctggactatgagaaggaacccaaggatcctcttatccttggaagagcattcctagctacaactggtgctaggtttgatgtgaagaaagagagaatctctctcaag

SEQ ID NO: 178056 - DNA, 864 bp, Arabidopsis thaliana landsberg
atgcgggttccagcttgcattagtcctgcggatattaacgcggaggaaacacttaatactttgaaatatgcaaaccgtgctcgaaacatccggaataaaccagttgtaagctattcagatatgtcaatcaaagaaactaattattcactgaaattacattactctaattatctctttctattgtttgattcttcaaaacaggttaatagagatcctgtgtccagcgagatgctaaaaatgcgtcaacaggtagaatacttgcaggcagaactctccttacggaccggaggatcctcatgtgcagaagtccaggtatggccagtcttcccagcagttttttcaggagtataaagattaagattttgtgtgattgtgcaggctcttaaagaaaggattgtttggcttgaaactgctaatgaagaactttgccgcgaacttcatgagtaccgtagcagatgtcatggtgtagagcattctgaaaaagactttaaagacataagagctgtaaaattctaactgatacctttttttttattttttctacatccttgtaactgttatgaaatggggagttatttggttgcaggatgatattgttggttctgtcagacccgatgggctgaaaaggagcttgcacagtatagagtcctctaattaccccatggttgaagccacaacaggtataagaaagataactagttaaagggtaaaagacagtaatgttattaaacacaagagttttcattatttgtaggtgattcaagggaaattgatgaagaagcaaaggaatgggagcataagctcttgcaaaatagtatggacaaagagttgtatgaactgaaccgccgtctagaggaaaaagag

SEQ ID NO: 178057 - DNA, 1072 bp, Arabidopsis thaliana landsberg
atggatttggatctgaacagtaagcgagtattgcataaacaagccacattgcgttctgtacttatatagcaatccatacgtaaaaaccaatgtttgggttggtgtctgcttttctctagttgtcacatcacatgttctattttaatttgaatacatgaaatatcaaatgttcacacatttcaagaaaaaaaaatataatgttctcggatgcttcatgggcttatgatgggcacatgcaaggatcatgcagaaaaaagctcattagttaaacaaatcacaaactcaaaagagagagaagaaatgttcattggagacataaattaatgttcgcataagacaactttttcacgtatccacaaacattaaggggaaacacaagaaatgggagtagtagttaagaatcaaaatgattcatttgaagttgttttttctgagttaaaggatacctgtagaatgattcatcaccgagtgcaattacgttccctgcacgtgatataactatctgcaatgttgtattaatgcatatggttattcacatcgataagcatttgttaatgctcgagtatgtgtgtgtgtgagtgtgtgtgtgtgtgtaacctggtagtctccttcggttcgagtcttgaagccagctgcacaatagtcgaaataatattcacatgtccttacgaatctatcgtcgaatccaagatccgtgatttgtctgcacaagtaatagtttttttttgggacatgagcacaaacacacataaaagggccacatatagagtccaaagagaaaacagaggaaatgttttttatattgatcttacttttgtctctcgaagaaattcttcctccacaatcttaacgtttggtagtaatgaatcccaatgttctcaacgttttcaatgctgtgttttttccagtgttaaataggtcgggactcggggaaaggaaagcagagaagttacatttggagctaataagagacttaatttaccatagcctagaagaagaggccatggctgatgtaactctggctaaagcaggaagatccaccagggaatatgtattcttttatgaaatctga

SEQ ID NO: 178058 - DNA, 519 bp, Arabidopsis thaliana landsberg
aggggtcggtcgtgactaggctggagtgtatgttaacatcggattgtccattgaccgatgcatttctgaaaaagaaaagctcacatggtacaaagaggattcataaaaggccgagtccttctctcagtgaagatagagaggaatcaacacctgatcaaacgataatgctcaatgcgtatgttaggaaggaggaaggaaacattctatatgttgaatgtggtgacgactttgttgatcttcttttctctttccttgctatgcctctggaatctgtatgggacatctcgggcagaggaatcatccttggatgcattggaaacttgtgcaaaagcttcaaggatttgagtagtgcttccgcaactgaagcttcagcttttaaatgtgttcttcctcattactacaagtgccagaagcagctgctaaatgatgttgtcacaacccatcagccaccaacttattaccgttttgtatcgttctctacggatcattttagagagtaccgtttgtctgaaaactctg

SEQ ID NO: 178059 - DNA, 404 bp, Arabidopsis thaliana landsberg
gaattttgcaccggaatttaactggcagcccgatatcggtcttttcctggattatcctgatgcggatatcagcctggaactctttcacagcagtatcagcaactatattttcctgcagaaactttttgatgcaaatggccggccgctcgagatcgttccgggaaatttcacttaccagtaccggcagggcagcgcaaaaatttatggcgcagaagccggctggaccatacatccccgcaactggaaatggctgcagtggcaacaaagtatctcattcatccgcggcgtgaatacagccaatacatctttaaacctgctgggtgatgatgcaaaataccttcccctgatccccccttttaaaacagtcaaccgcctgcggatcagctccgatgggaagaaggcag

SEQ ID NO: 178060 - DNA, 573 bp, Arabidopsis thaliana landsberg
tttcaccaagagaaaagctagatgatgttgttacgagagcaggtaccctctgttttggttaatatggaatgtagtgatttttcagatgtttttggagagtgtcagttgaattacctttggttgtaatatctgatgttgtatagatattgaaagcggcgagaaaagcggccttagtatgggagagaagcagcaaacttctgttacggaaaggctactggaagagaaaaatctcactgttaattcagagcttgtagatgggcatacccgtggtgtggtgaaggaagtaccagacaatcaaactattaaagaagctctagaaaaagtagatgatcttacgggaacaatagaacaaggtgaattttcttttttttaactatgattgagttttgggatcctttattagttgttatggagagttatggtatgcttacccttgataacatttctgaatttctgtagatcttgaaaagggaggaaaaactgctgatatagtcatgattgaccaagagaaggatcttccccctgcttcaaaacttgtagatgggcggattacctcacaagttgatgagagag

SEQ ID NO: 178061 - DNA, 308 bp, Arabidopsis thaliana landsberg
atgtctgtgacgaacaagaagatgactgtgacacagccggtgagagtagtaaagcccagaagagaaaagaaagagagattctaaggtaagaagaatccatgatgaatgatgatgatgcaaagaattgtagtaaccgttaagtaataatggtcggaaataaataggtgaaactgtgtgataattatagcctgtatctaattctacgatacacacagctaataaaagatttttatttatttgtttcatttttattgttcaatgtgttgttttttcttttctttcttttaattcaggaaaacacatcataa

SEQ ID NO: 178062 - DNA, 170 bp, Arabidopsis thaliana landsberg
tatgcaattgcatacatgattaccggacaaatgtgtacggaacaagggcaacgtttaatgtctggacaccaaaggtagaatcggcttacgattttagcctcgctcagatttggctggcatctgggtcatacgagactgcggatctcaatactgttgaagccggttggcag

SEQ ID NO: 178063 - DNA, 1066 bp, Arabidopsis thaliana landsberg
atggattcaactgtgttcatcaataacccatctttaaccttacctttctcttacacatttaccagtagcagcaacagtagcacaacaacgagcaccaccacagactcaagctccggtcaatggatggactgtcggatttggagcaagctaccacctcctcttcttgaccgcgtcattgcttttcttccacctccggcgtttttccggacacgttgcgtctgcaagagattctacagtctacttttctccaacaccttcctcgagacatatctacaactacttcctctccgacacaactgtttcctcttcttcaaacacaaaaccctaaagagttacatttacaagagaggaggaacaaacgatgatgattccaataaagctgaaggctttttgtttgatcctaatgagatccgatggtaccgtctctcttttgcttatatcccttcagggttttatccttcaggatcatcaggagggttagtgagttgggtctccgaagaagctggtcttaaaaccattctcttgtgtaaccctcttgtcggatccgtgagtcagttgccaccaatatcaaggccaaggcttttcccttcgataggtctctcggtaacaccaacctctattgatgttactgtcgctggagatgatctcatatctccttacgctgtgaaaaacctctcatcggagagtttccatgtcgacgccggcggattcttttccctctgggcgatgacttcttctttgccacggctttgtagcttggaatctggtaagatggtttacgtgcaaggcaagttttactgtatgaactatagcccttttagcgttttgtcctatgaagttactggaaaccggtggatcaagattcaagctccgatgaggagatttctcagatctccaagcttgttagagagcaaagggaggcttattcttgtagcagctgttgagaaaagcaagttgaacgttcccaaaagcctacgactttggagtttgcaacaagataacgccacatgggtcgagatcgaacggatgcctcagccgctctacacacagtttgcagcagaagaag

SEQ ID NO: 178064 - DNA, 97 bp, Arabidopsis thaliana landsberg
acataatacccgaacccgaaaaaaccgatctaaacccgacccaaaaaacctaatccaaattcgaacccgaaattttcaaatatccgaccgaatctaa

SEQ ID NO: 178065 - DNA, 510 bp, Arabidopsis thaliana landsberg
cctgggcacatccgggttcaaaacacggtccgcgaaaggagaagattcatgcgcaagaccctcactgccctgatgttcgccgccgccctgcggaccctggccatggccgccaccccggcaccgacaaacgctcctctgccgctcgccggcgcatcgatgatggacggccacggcccgcgcttcggcctcggcgtccgcgtcggcacgatgcgcgagctgaacttgagcaaggaacagcgccagcaggtcggcaagctgatggggtcctcgatgaagagccgccacgacatcaccgacaaatacttgagcaagctctcggccaccgatcgcaaggccatgcaggatgagctcaaggccagccacgacaagacgcagaaggacatccgcgcgctcctgacgcccgaacagcagaagaagttcgacgagctgaagacccagcgcgatcagcgcaaggcaaaatgggccgagttccagcagtggaaagtgcataaggatggcaagaccatctga

SEQ ID NO: 178066 - DNA, 550 bp, Arabidopsis thaliana landsberg
atgctactttgcttgtgaaacgctggatggaaaaattattgcaattggtgggttaggattgaatccaaacgctaaacgaacttgggacatctatgatcctttgaccagaacaagcaaatcttgttctgatgtgaatattgtccctgaaatagaagattcatttgtaatggacggaaggatttatattcggggtggtgttggaggatcttccactgcagtctatagtgcatctagcgggacttgggaacgtatggatgatgatatggcatcaggatggcgaggtccagcagttgttgtggcagatgatctctatgttttggatcagacttttggagctaagctaacaatgtggtgcaaggaaacgagaatgtggattcgtatcgggaagctatctcaattggtgatgaagcagccttgtcggcttgtatctgttgggaatagtatctttgtgattggtaaggattgctctactgtggtaattgatgttgagaatgtgaggaagaagaagatgaatggagtaatggtgtgttcttctataccaaagacttag

SEQ ID NO: 178067 - DNA, 281 bp, Arabidopsis thaliana landsberg
gcgactcgtgctttatttcttgtggcgtcatggcccgctcaacgatgccattggactatgggtggtacaccgaggcgaagacaggtttggtgccgatgaaaaagcaaaaatccctgaagtcttggctatcgaattgtttgccgttgtcgactatgagttcggatgggactccgaagcggcagacaatgttttgccagaagaatttttgagcggtcttcgatgttattatggatactgctctagcctcgatccactttgtgaaatattcgacggcgacgaag

SEQ ID NO: 178068 - DNA, 1087 bp, Arabidopsis thaliana landsberg
atggccagggagtcagagagagctgaaagggcgacattggtgacccaagagaaacttcagcttgcagggaacaagttcaaacccctcaggttgtccgagctgtggatccgtccgccttttagtgggcgcaagaagattcctgggacactcgaagctcatgcaaatggtttcaggtattcaactaccaggcctgacgagcgcgtggatgtcctgtttgcaaacataaagcatgcgtttttccagcctgctgagaaggagatgatcactctccttcattttcatttgcacaaccacatcatggtaggaactaagaagacaaaggacgttcaattctatgtggaggtaatggatgttgtgcagtctttaggtggtgggaggagatcagcctatgatccagatgagattgacgaagaacagagggagcgcgataggaagaacaagatcaacatggatttcaatcattttgcaaaccgggtgaatgatatgtggcaactaccccagtttgcaagtctggaccttgagtttgatcaacctctgagagagcttggtttccatggtgttccgcacaagacatctgcattcataataccgacctccagctgcttagttgagctgatagaatacccgttcctcgtggtgagtctgagtgagattgagattgtgaatcttgagagagttgggtttgggcagaagaactttgacatggccatcatcttcaaggacttcaaaaaagatgttctcagggttgactcagttcccacaagctccctagaggggataaaggagtggctagacaccacagatataaagtactacgagagcaaactgaatctgaactggagacagatcctaaagacgatcacagatgatccgcagagctttatagatgatggaggatgggagtttctgaacctggacggaagcgattcagaatctggcgggtctgaggagtcagacaaaggatacgaaccatcagatgtagaggttgagtctgagtcagaggacgaggcttcagagagtgagtcactggtggagtcagacgatgatgaagaagaggactcagagcaagagtcagagaaagagaaag

SEQ ID NO: 178069 - DNA, 250 bp, Arabidopsis thaliana landsberg
atgatgaagtcgaaatttctcgttatcgttcccctcgttttcctcgccgtagcttgcggtaagaaggacgaccagccggctgccaacgtggcggccgtgggcgtgacctgcgctccgggacagcagatgtataacaaccagtgctacaacgcgggaacctgcccggccgggcagatgtattacggcaacagctgcacgaccgcaaactacggccagccttccggttacggccagcccggcttttgcggcg

SEQ ID NO: 178070 - DNA, 102 bp, Arabidopsis thaliana landsberg
ctcgcatggctcgagcttgaaagggtactgggcggtgagggcggcgaaaagcgcgccgacggaaagagcgaaaaccgcgccgcagacaaggacgacatctga

SEQ ID NO: 178071 - DNA, 22 bp, Arabidopsis thaliana landsberg
atgagtattgctcaaattccgg

SEQ ID NO: 178072 - DNA, 523 bp, Arabidopsis thaliana landsberg
gttggtgactgatatacctgccaccactggaaatgcctttggtaagtttaagtaactctgtatagatacattaggtaagatagataaaactcatatcaccaagcttaggctttgaatagtgttagcatggagcatatatattcttaagaagatatctatgtttatatagccttcttaatttatatgtatgttgcaacaatcaaatctttaatctatataaaataagcgacacaaaacacttacctagtggataaattaggaagggctaattaatatttgtgtttatgattgtttatcaggcaatgaggtggtgtgctacgagagtccacgtcccccctcgggaattcatcgtattgtgttggtattgttccggcaactaggaagacaaacggtttatgcaccggggtggcgccaacagttcaacactcgtgagtttgctgaaatctataatcttggtctccctgtggctgcctcttacttcaactgccagagggagaatggctgtgggggaagaagaacgtag

SEQ ID NO: 178073 - DNA, 544 bp, Arabidopsis thaliana landsberg
gcaaagtcacctatgagatctttagatgaactaaatatcactgaagtaccatcaactccatattttccatctatcacggaaaggacgttgagtaacctaaacaatggagatcctctcgcatgttccaatcaacccaagtctgagactgctggtgttactactaatgttggagaagtggagggctctacagagggtgattcttttggtagaaggagacgccaccgctgctatgtagttacagcacgttcccggggttttctgtaccaccaggtttgatttctattcattgtctgtatctctggtgggatcatgtgtaacaactgtagtctcttgattgatacatatagtaatagttgtccacatgtccttattttgttgtgtgtgaaacttccaatgagaaacatatcaatttgatttgaaagtgtaagagacgaattgtgatgctctatgtggcgtgttgattagtctctttatgctgtgcaggttcgactgattgtaggagcactgaaatgcgtaggcactggagaattgacggtctcagacg

SEQ ID NO: 178074 - DNA, 113 bp, Arabidopsis thaliana landsberg
gccaaaacaaatatgctcgagaaaatttatccggtataagaaatagtcgaacaaatccaaatattatcagaagtgatcgagaaaaacccgatgttgaagatgatcgaacctga

SEQ ID NO: 178075 - DNA, 1435 bp, Arabidopsis thaliana landsberg
atgctacatgggaaactcttacaaagaggatctgagactgttctaggaatggctgctaacgagagggaactgttcttgactaatgaatgtcttactgtccagcttaaggacataaaaggaacagttagtctcgagattcgatcaaggctgtgggggcatcaatacaggaaagagaacatcgatgtggataagcttgaccgggcaagagcagaagaaagaaaaactaatggtttgccaacagactactactgcaaaagtttgtactcacctgagagaggtggattctttagtcttccaagaaatgatatgggtctaggttctggattctgcagttcatgtaagataagagagaatgaagaggaaaggtcaaaaactaaactcaatgattcaaagacaggatttctctccaatgggatagagtatcataatggagattttgtctatgtactccccaactacataacaaaagatggattgaagaagggtactagtagaagaacaactcttaagtgtggtcggaacgttgggttaaaagcttttgttgtttgccaattgctggatgttattgttctagaagaatctagaaaagctagtaatgcttcatttcaggttaaactgacaaggttttataggcccgaggacatttctgaagaaaaggcttatgcttcagacatccaagaggtaacaactgtttttactatattcttacgtaacatttctggtaatgtttaaaagcttatcttatactcctttttttctttttctttttgcaaatttttagttgtattatagccatgacacatatattcttcctcctgaggctctacaaggaaaatgtgaagtaaggaagaaaaatgatatgcccctatgtcgtgagtatccaatattagatcatatcttcttctgtgaagttttctatgattcctctactggttatctcaagcaggtaaatattttaattatttttgttctacttaatattttctttcttatgaatattttttgtttcttaatgaagttgaactgtttcttgaaatgtcttgtaacagtttccagcgaatatgaagttgaagttctctactattaaagatgaaacacttctaagagaaaagaaggggaagggagtagagactggaactagttctggaattcttatgaagcctgatgaggtacctaaagagatgcgtctagctacactagatatttttgctggatgtggtggtctatctcatggactagaaaaggctggtatgtatttatattctcatgtcatgcatatacttttatcttctaaacacttatgcatgttttgggtataacaaggtgtatctaatacaaagtgggcgatcgagtatgaagagccagctggtcatgcgtttaaacaaaaccatcccgaagcaacggtttttgttgacaactgcaatgtcattcttag

SEQ ID NO: 178076 - DNA, 573 bp, Arabidopsis thaliana landsberg
atggctggaggagcctttgtatcaaaaggtggtggtggaggaaacagctatgaaggcggagtcaccgtctttgtcatcatgacatgtattgtggccgctatgggaggtctcctctttggttatgacctcggtatctcaggttcgtaaattccacattcgcctttttcttcttcgggttgagttattttggttcgctttcgctgtccactctagcttcggggaatgtaacgtgacttcttttgttgtataggtggagtgacatctatggaggtgtttctgagcaagtttttcccggaggtggataagcaaatgcacgaagcaaggcgcgagactgcttactgcaaattcgataaccaattgctacagttgttcacttcctcactctacctcgcggcactcgcgtcttcctttgtagcttcggctgtcacaaggaagtacggacgcaaaatctccatgtttgttggaggggttgctttcctcataggttctctattcaacgcatttgctaccaatgtcgcaatgctcatcgttggtagattgttgctcggagtcggtgttggatttgccaatcag

SEQ ID NO: 178077 - DNA, 84 bp, Arabidopsis thaliana landsberg
atgcaatgtgacatagagcttgcatctacgactacgcgagaaaggaacagaaacggtcaaaactatggtcaagggataacacgg

SEQ ID NO: 178078 - DNA, 307 bp, Arabidopsis thaliana landsberg
atgagcgactatagaagcttcggcagtaactaccatccatcaagtcaatctagaaagatttctataggagttatggctgattcacaaccgaaaaggaatcttgtgccagataaggatgatggagatgttattgctagagtagaaaagttgaaatcagccaccgtaactgaattacaggcgaacaagaaagagaaaagtgatttagctgccaagcaaaggaattcagctcaggtcacaggacatgtgacctcaccgaggtctccgagatcgtctcatcggaaattagggactcttgagagtgttcttt

SEQ ID NO: 178079 - DNA, 311 bp, Arabidopsis thaliana landsberg
cgagaagcttgtttctggcgaatctgtgaaaactggaaatgggtttggtccgaatgttgtcagagagaagtcagataaagagaaatcgaatttggaattgcaagctaagcttatggaagcaaaggtatggtcaagtatgatgaatgagaagataccgaagattgtaccgaaaactcccattgttacgcctcctggtgagccagaaacgattaatacttgggaaatgatggatggtcttgaagatgttttgagtcctttacgatcacctaatcatgttaagagtttctcgtttgatgttggtcctaatggag

SEQ ID NO: 178080 - DNA, 195 bp, Arabidopsis thaliana landsberg
agccagaagtttactaaacgacaacgatttagccttagcgcgctgttggaaaaaacactaccatgcaatgttatgtcccacatgctactcccatcattgctggtgaacatatttacgggcttgcccttgggcgggacagacgaagttggattagtatcggacggtggagatggtttgatcgctttaattagttga

SEQ ID NO: 178081 - DNA, 1423 bp, Arabidopsis thaliana landsberg
atggttctttatgcatcccccatagttgaaactagggatgacagcgttatatgttcaccatctacaaatttagaaacccaaaagcttcttgtcagtaaaactggcttagaaaccgacatagttttgcctttgaaaagaaaaagagacactgcagaaattgagctggatgcatgtgctacagttgcaaatggagatgatcacgttatgagttctgatggggtcattccatctccatctgggtgcaaaaatgataatcgacctgaaatgtgcaacacgtgtaaaaaacggcaaaagtaagagtttttttagtgttgtctgtctattgaaacgatctgccaatgttgaatgttgggcagatgggtttgattcttaggatatatgttctgtattgtaatgagttgttcaaaattttgaagggtcaacggtgattgtcaaaataggagtgtttgctcctgcattgtccagccagttgaagaatctgatcacgtgacacaggttggtttctaattactttcggagacccgttaatcagtggactcttaaatagttagatactagatttacttatccttttacttgtaatctgcaattctattttgcatttgattaggatatgaaagaaactggaccagttacgagcagagaatatgaggagaacgggcaaatacaacatggtaaatcaagtgatcccaaattctattcttcggtgtacccagagtattgggttcctgtgcagctatcagatgtacagctggagcaatactgtcagactctcttctccaaatccttatctctttcttcactttcgaagattgatcttggagctctagaagaaactctcaattctgtaagaaaagtaagttacttgattttaaaaacacttattcttcaatgcacttgtgagttaagtacccagttattactggtgataagataaagaaagcaatagaaaaattgataaggtgttcaccgcattgcagccaaaaaaacaattctgtgttccatgctttcaagaggttgtcacataggtgttatgcctttctgtttgatgtttggtagagcaaaggttttgggtctatttgttttatgcttttttgaaacacatagaacctggcaaacttgacagttttggggttgcttagatatacgactattgtcggtcagcatcacattttctcaaggcctctttctgcatgttaatgtgtgaatatattaaaatcttctttatgtgtttgcaacttgttgacagacctgtgaccatccatacgttatggatgcatctttgaaacaactgctcaccaagaatctggagttgcatgaaatcctggatgtagaaattaaagcgagcgggaaacttcacctccttgataaaatgcttactcatataaaaaagaatggtttaaaagcagttgtcttctaccag

SEQ ID NO: 178082 - DNA, 227 bp, Arabidopsis thaliana landsberg
atggacgaaggcaggtgccaagtcctcgacaatggcatcatcatatgcatccacggttacgagcatattctcctcgccaagataaagtgctccaagaaccgcctgtacctggttgatctgaacattgtgcagctagtgtgcttggtggcgtggcacaacgaggagccgtggttgcggcgtgcccactttgagcacctgagcttcgacgtgctcgggtggatggcaag

SEQ ID NO: 178083 - DNA, 108 bp, Arabidopsis thaliana landsberg
gtcaaggataatcgttaagaatgttcccaaatatgtgacagaggatcaactacgaggtatcttttcggaaaaaggagaaatcacagacgtgaaattgaagcgtttaag

SEQ ID NO: 178084 - DNA, 650 bp, Arabidopsis thaliana landsberg
aataatatcatggagctgtggtccctttttgacttcttgatgcctggatttcttgggacagagagacaggtagcgcttatacattttccctgtttatatgttgttacaaatgaccaattttcagggtcacttttgaaagttatactttgaagaagtatttttggatattctttgttttcataaacgagacatatgtttcttttttgggcagtttcaagcatcttatggaaaaccattgctggcagctagagatcctaaatgctctgctaaggatgctgaagcgggtgtactggcaatggaagcactccataagcaggtaatgctgtttcttgagttcatcttttccgacttcttattttccgttgcaattgttgagaattggtaacatcatgacctgataaaatcttcaaatcacgtaggttatgccattcttactcagacgtacgaaagaggaagtcctctctgatttgccagaaaaaatcattcaggacagatattgtgaccttagtcctgtccagttgaagctttatgagcaattttctggttcaagtgctaagcaagaaatatctagtatcataaaagttgatgggtcagcagattccggaaatgcagatgttgcgccaacaaaagcatccacacacgttttccag

SEQ ID NO: 178085 - DNA, 168 bp, Arabidopsis thaliana landsberg
atggaggctctcagcaaaagtaaggataatgatgcaactgcagatgatgcaagtgctccaagatcatcagatggtagcggaaacacatgtcacaacggtgacgtttctggaactgactctggtgatggtgaagattgctatcgcgaagatgatatagaccataataag

SEQ ID NO: 178086 - DNA, 100 bp, Arabidopsis thaliana landsberg
ttcttgatgttgaagaagtagacgaagaagaagagcaagaagaagaattagaagaagaagaagaagaagaagaagaggatcgctttttccctctaggccg

SEQ ID NO: 178087 - DNA, 132 bp, Arabidopsis thaliana landsberg
atggaatcacctggggagattgcaaccggaaggttgccatcgatacttgaggtactcgctgtcagggcgaccattggacttgcagttaaactgtctctcgatgaaagggcaattcttggaatcatagagagg

SEQ ID NO: 178088 - DNA, 1681 bp, Arabidopsis thaliana landsberg
atgaagggaaattgctatcttgaatgggttagggtgaaaaataatggtgttaaggaaatattgagtagtgatggtaagttttgatccattttatacctttcggttcagattcctttccgccgccttaaaaatccgcttcagattattcattatgatccctgaacagagtttttggatttatcactggacgatgtcggggaaagcattgaacttatttacactcctgttcgtgaagatggaatagaagggagtccaaggagtatcaggactgatggtattgctccaggtgagctgtcttttcaaatttgaaagaatgtcaatcttgtacttagtttttgtagaatgtccatttaagctaaaggttatacattctatcttgggtttgtacactgttttcttaaatttacttatctcagctccttcaatttttccttgtaaacagcaaatcctatggggttggagcttttaattcctgactgctgtgagaaacaagaggttgtgcctcataaaacttattttgggggccatgaaggtgttggagagtacatctggtatcgaactaaggtcaagttgcatggatctgcacttacggaaatatcctatgccggtgaagaggttgttgtttgttgtagaacattgtaagagacatagatttcccaaactgtgttcaaatttctttcttagtttattcttttggataagagtgaatgatctgattctcttgcagaaaatatactccatcgcttgaagatgtgggggcttatctagtcttgtattggattcctactcgcgtagatgggagaagtgggaagccagttgttgtgataacaaactctcctgttgccccaggtacagatattgtcacactttctattatcttgctaattttgtcctaatcagataaaacattgtagttaccaataattgaataatcattgcaaatatcaatctagtttgttatgctaatgactacttgcataatatcacctatcgatttaagctttttcttaacctgtcaacattcttttttctccaatctgtttaagccatagagctgatgtgtaaaagtttatgttctgacggaataaaatgaataatgttgcagctgatccagaagtatctaatgttcgtgtgaagaaacttttttcggatgcttattctggagaaggagagtactttggtggacatgaaggtccaagtctcttcagttggtacagagagaatgatggaaccattgatcttattgatggggctaactccaaaacgtatgaggtgactgagtcagattacaattgccggatattgttcgggtatgtttcccctgccatcgattgctttgattatttctttagcatgcgtgtatttatggctgttttggtttacacttttgaatgttttagttttgtctcattcatgaaataaactcctaggcatgtgttaacgggtctgaggcctttaagttttcagaactggcaatggttgtcagttcatcgattttaatgtttcttgttttcgaagtactgatatagggttccttagctccatgatggtttttgacttttgtatgcgaactttgaatcttagaactttttcaacttattttgcaggtacacaccagttcgttcagattctgttgtgggagagctaaagatgtctgagccaactgaaattatcctcccag

SEQ ID NO: 178089 - DNA, 446 bp, Arabidopsis thaliana landsberg
ctattccaatcattgctgcggtgtgtcaaattatgggccaagaggcgaggtgtatacggtaatgtaagtgctaaatgcatatcactgctcatcatcaggctatcaatgaatgcagaagcttaattgattttgattccacttgttttcagttgaatggatttctagggggagttcatatggctattcttgctgcatttgtctgtggataccaaccgaatgcaacattgagttcccttctggcaaatttcttctacacatttgcgcattggcaatggcctacaccagtggtgttgctagaggacacttatccatctactggggctcctccaggcttaatgccaatccaactgccatgcggttcacatcaatactgcaactccaacataacaagaagcacattttacaagatagtggcagagtttctacgagggcataatttgacaaag

SEQ ID NO: 178090 - DNA, 180 bp, Arabidopsis thaliana landsberg
atgtaccgagatttgaagcaaaacttctggtggaagcggatgaaggttgacatttctaagtatgtggccgcttgtgaagtatgtcagcgcgtgaaggccgagcataagcggcctgcaggtttgctgaagccattagaaattccagagtggaaatgggagcatatcaccatggattttgtg

SEQ ID NO: 178091 - DNA, 128 bp, Arabidopsis thaliana landsberg
atggctaatcgctattttgattccgtctcaacaagtaaggatgacaggtcaagggaacttattgttggtttgttgtgttattgtgttgcaggtcccgagcaactccatacacagaagctgagattaag

SEQ ID NO: 178092 - DNA, 353 bp, Arabidopsis thaliana landsberg
cgttgggcagctcttccgggtgaaccaccaccaatagacgatacagaagtagacgactggcttcctcggtttgtcgtccttcaaggcccttgtcttttcttctatttattgtcaacaggtgagttaaggttcagcttttacaatcctgtttcaaatttgtattcttcttgtaatgtctcttgaaattctctattgcagacttgagccctcaagattcgacattgctagcagatattgttgaaattggttcggtaccaagctacacgagagaattcgatgaaacccattattgcttttacatattaacccgtcaaggtctaagatttgagtgctcaagcacctctaaaacacag

SEQ ID NO: 178093 - DNA, 413 bp, Arabidopsis thaliana landsberg
atggacaaaaccggtcctgttcttgatcaactatcgagtgatatgggtaacgaggctatccattctattgcacagtttctcctggatcatactctatatgatatctgtctatcttggattcaacaggtaaaacaagattcttcttttgttttcaagatttcatgtttcagatactccaacaataatgcttatatctttgtttataaattatccagctgctagaagtaagtgtagaaaacggagcagactttatgggaataccgttggagttgaagaaggagcttttgttgaatctacatgaagctttgtcgacaacagatcctccagaggactgggaaggtctagctcccgatcatcttttggtcgagttagcatctaattggaacatcgagatccaacattttgacacgtag

SEQ ID NO: 178094 - DNA, 239 bp, Arabidopsis thaliana landsberg
tctcaacaattgtcacaaagcgatgcacaaaaactctttcaatggtgagaggagaactcgcggtaatagcggcgggtaatggtgaagtcttactctacatttgggcagctgttgtggctttctccgtcatagcagccgtgattttctcatgcagtgaccgagcttctaaacctcacactaacgacgatgtcaatggatccagttgcgccgctggctgcggtggtggttgtggaggttaa

SEQ ID NO: 178095 - DNA, 91 bp, Arabidopsis thaliana landsberg
gtataacaagttatcggacttaacaggtgataagctccaaagtatcaaaataaacttgtccggagaggatgttggcgtttcagaagatctg

SEQ ID NO: 178096 - DNA, 550 bp, Arabidopsis thaliana landsberg
gacacgcaacagatacctttggagataaggtagctttagaatcatcttggggagttgcttttgattttgcatgtggagggaagttcacagataagaagttcagaacctgcaaagtttgtgaaaagacccaaatccgatacacggagctggtcaacatgttgacttgtgggtccggcccaaaacatatttaatttcaaaaccgcaaactaacaatgcaaaacaaactcttggcttgacaaacctgcaaaagagagagagggatgagcaatctaagattactcagtgaaggtaagccttagggctcacgaattctccatacacaaacatatctagaatcacaaatgggactacttcccataaccgcattaatggcgggtccgatacaacgtggcaacacacgcttatcttcgtgctacggatcacatgtacatgttcctgacactattcactcgtgctacggatcacatcatgcctcttgcacttgttcctagcacttcacactcgtcggctcgtcagccatcctgatctatctgcaaacccgcatcaatag

SEQ ID NO: 178097 - DNA, 1321 bp, Arabidopsis thaliana landsberg
atgtctgcgcttggtgaaaaagtttcgtttcccaaggtaagatactcttagcaatactacatgtttgtctcatagagagtattatataatgtctgatatatgttattgtttttgtttgagaagaaagaaggctctttgaaggagcagatttccagtgtaaagcctgtactggaagatctactgatgaaaaaggatcgaagaaggaaagagctctctgagacactgaatcaaatagcagagatcacgtctaacatagcagggaatgattatactgttagttctggttcagaagttgatgaaagtgacttgacacaaagaaagttggatgaacttagagcagatctgcaggatcttcgaaatgaaaaggtgttcttacacacacacacacgtcgaagtgattgttttaaaatgtttgtagttatttgcttatcatctttatttcaatttcaggctgttcgactgcagaaagtaaactcttatatcagtgctgtccatgagctgtcagagattctgtcttttgatttctccaaggccctgaatagtgtccatagcagcttgactgagttttcaaagactcattcgaaaagcattagtaatgatactcttgctaggttcacagaacttgtaaagtctctgaaggcggagaaacatgagaggctgcttaaggtgataaaaaaataacacttctgaagtgtatatatacatatattatgtggtttctcatgtcttaccagttaccactgcacttgagcaatgagcacagtagcattcaattagaaaatgcagtttttattggtagcctactatttaacctggcactatttctcacggaaatgaattcatcaactccaagaaagcaaaccttagcttgacggattgatcccttgattcttttatttcagctacaaggtttgggaagaagcatgcaagagctgtggaacctaatggaaacacctatggatgagaggagaagatttgaccattgcagcagcttactttctagtctacctgatgatgccttgaaaaaaggatgcctcagcctagacattatccgagaggtatttcatcatgtttttattttggatacctagcattatcacctaccataatatgtctcagtcatcatctgttgtgttcttaagtctaatcttttggccgtaggccgaagatgaagtgagaagactgacttccctgaagtccagcataatgaaggaattggtgtttaagagtcagtgtgaactagaagagatctgcatagggaatcatatggatatcaatagtgatgctgcaagaaagagtcgtgtcgaactcattgaatctg

SEQ ID NO: 178098 - DNA, 450 bp, Arabidopsis thaliana landsberg
atgttgttcaagaaactatgcctgaagttggatgctctctcccacttccacttcacacctaaaccagtatgtttcttgcttagatcctaaatgatgatcacctcaagtgtctagacatagctgttctggactgaaactttttattttctccaaactttcaggtgattgaagaaatgtctataccaaacgtttcagccatagcaatggaagaggtaattctaagtcctttccttttttttgattgtttgtttggtaattgggattggagaccattatacttatcaacttgttccatgtgtactgtgtaggtggcgcccgtggcagtctcagatgcagcaatgcttgccccagaggaaatcttttccgggaaaggtgacattaaggatgagtctgagctcacacaggaagatagaaagaggaggagagcgaataagaagagaaagtttaagg

SEQ ID NO: 178099 - DNA, 143 bp, Arabidopsis thaliana landsberg
agaaggcgttcatgttagagggttatcaaatgtacatgtcagtgaattctgattggttgagagagtttaatcgagatttcgaagatttccttggtcctaatagaagattggtagtggctgtggtggtgccatctggcagttga

SEQ ID NO: 178100 - DNA, 539 bp, Arabidopsis thaliana landsberg
atgcaagcataatacgcgacaacaagttccaactaattaggtacgtttatatattctagtcatctatcatcgaaggacggtgcaagagtttacaagaatttttctctttttcttttctgcagtgtgactgctgagaaatgggttccaatcatggaagtccccgtaaacagtttgaaactgttcttggagaagaagaaacgggaagggttctcaatcttgggactggaacagacagcgaatagcgtttcacttgacaaataccaattcccaaagaagacggtaagttgatgcgcaaaaacataagaacagagcctttcatttactctcgcttgtggctttcccatagtaactaagtggatctctctgttgttccaaaggttttggtgctgggtcgtgaaaaggaaggcatcccagtggatataatccatatattggatgcttgtatcgagatcccacaacttggagttgttaggtccctcaatgttcatgtcagtggtgccattgccctttgggaatacactcggcagcaacgcatttga

SEQ ID NO: 178101 - DNA, 4372 bp, Arabidopsis thaliana landsberg
atggaagtcaagcgggatttgttacatattgtcgaacgaaaccaggcaaaatttgatgcacttgaagcatacgaatccatattggctggaaaacggtaagacatgtaattttgttcttttaaatcacttaagagttttgttgattttcaatttttacctcttaacctatgttgtttcttagttatttttcaagtttatttttaagggtttcagatgtcctgatcatttttatctttattcttggaacgcagagaacaacgtcctcaagattgcttagactctatcgtggacctccgcgagtacgatgtaccttatcatgttcgatttgcaattgataatggtatcttgtttagtcaaaccagaatttctgtttagtcctcaaaattgtcaaaatcatgatgttttcttggtgtccagatgtgcggagtgggcaatggtacaatgtcagtatttccagcaccgatgtcatattggagaagaggacagatcttcttcaacgcgcagaagtccgtgtttgtgccttcgatatagagacaacaaagcttccgttgaagtttcctgatgctgaatatgatcaaattatgatgatatcctacatggtcgatgggcaaggttttctaattattaacagagaggtaactgctgtatacatttgtctgtattggatctgatattgtaatgatgattttttacatggtggatggggattgttaattcattaatttagagaacctactatatggccttgctttgccatttttgtagaaatgatccatataagattatcccgcttgtttaattgatttcgtatgatgtaactttaagactgtttttggactagcataacattttgctataatttaaaacataaattctgatatgttaaccgttttttgttgcatatatcatctctgtttgatatctcagctctatgctttccttatatattttgtactactgcaatcttgtttgattattaatgtagcatctttgcacttaattcagtgtgttggcgaagatgtagaagatctggaatatacacccaaaccagaatttgaagggtatttcaaagttactaatgttaaaaatgaggtaaaatacttaagctcctgatttgaatataaaatcagaaacattgatgtgcaggtgagttatttcttggttttttcttgtaggttgaactcctccaaagatggttttaccatatgcaagagttgaaacccggtatttatgttacatacaacggtgacttttttgactggccatttatagaacggagagcatctcatcatgggataaaaatgaatgaggtatgctaaagttttattcgttgtggttttgaattaattttatttgtctgcatgactaaacggatataatatatctacttggaaagtgtatataaaagtttgtgacattattcgctgacattctatagtggccttgtgagtgtgcctctgcataaagtagaatagtgacgctgctcaagtacttcctagactgtgtactgaattatcttgcacgacgatgcttacttttacatattattgtttccttgtggaagataaattttcatccttcaaaatattcagtgacttgtgttttgcatttcaatactgaagtcttctgagagttggcaaggtgctgccactcattctcccggaacttggttctcttctcagttctgtttaaacctatctttcttgctttttcatttaaaacctagttcgttgcatcttactcgtcacttcctatcctatttctactatcttccactggagcataatggtcaactgttattccataattggctggtgtgttttgtttctttcccttgtggttcaggaattgggattccgttgtgatcagaatcagggtgaatgtcgagctaaattcgcttgtcatttggattgttttgcttgggttaaacgtgatagctatcttcctcagggaagccatggtctgaaggttcattctacttctatatctgagcgattatttatcttttgtggtcatataatattttgttaagaaagtcatattatgattttgatgcttgtttcttaattaaatgccaggctgttacaaaggcaaaactaggttatgatccactggaagtgaacccagaggacatggttcggtttgcgatggaaaagccccaggtattgacgagaagttaatcctgctatttctgtaaaacatgtttttttaaccattagagctggttgttagatactagaatgggctagagttacaaactgtcgatgataagtgatcaagtgattcaactatggctcttcatgggttgcataaatgttcttctgttcatctttaattcattgtcttatcatcagtacacaaaatttagaagcggacatagaattcaggcaattaatggtgtcaactgtagatttttctagtctctctgtagtgcttgaaatatttgtatgggtgcttatatcttatttctattcaatgctgggaatcatctcgcagacaatggcctcctactctgtctctgatgctgttgcaacttattacctatacatgacatatgtcaatccattcattttttctctcgcaactatcatcccaatggtccctgatgaggttttacgtaaagggagtggcaccctttgtgaaatgcttctgatggttgaggtatcaacctatttaccacaaggtttttagcaatctttactgtgtgacacattctattaattggaagttttccattcagcacaggcttacaaggcaaatgttgtatgtcccaacaaaaatcaagctgaccctgagaaattctaccaaaatcaacttcttgaaagtgagacatatattggtggtcatgtagagtgccttgaaagtggtgttttcagatctgacattccaaccagttttaaactcgattcatcggcataccaggcaatttatctgctttatatttattcactataatgtttgttgatttgtttaattgattgctgagcattactttttctgatagagtttcaattcaattgtcactgatttgtctgtagtttcctctgaagtgctgcagtttatagtaaaatctatgtagtctgtaatgaatgtgtgaagcaaaatgcttcccattcttgtgtgcatgattgtatcatagctaattaatgcacctatctgatatttgacgctttgattgccagcaactgatcgataaccttggtcgggatctggaatatgctatcactgtagaaggaaaaatgagaatggattcaatttccaattatgatgaagtgaaggacgaaatcaaggagaaggtaatgaatttctcttctgaataaaaatattgatttaatgtttgttcccttgtttcttgtcagcatgttgttactcttgtcgctttgtatggctgacactgcatacacattcatactgaaagatttttcttatacactcatacatgcttagctcgtatctatgagccttatctcatgtagagtaatcccattagggcttgtggaagaacattagttagtccttagactactgtttgagcctccggaggaaatctgtctgtcaagtatcctctatcatagttgttatcaactatcatctgcatgcttggatattttaaagcagaatttataacctgatcgtcttgtgaattatctccctttatctttgattcgggttgaagtcttagttctgtcgtggtttggcggttttattgattttgtagcttgagaagttacgagatgaccctatacgggaagaggggcctcttatttatcaccttgatgtcgcagccatgtatccaaatatcatcttaacaaacaggcttcaggtacatctaatctctgtttgcatgtttctaactgatttagggattatatgttgtagcatgcgattgtaaataaatatctaccaaacatcagctaattggtgatgttccatatacaaaataatcacaaccgtgacttttacgattgtgaaccccctagatatattatgttaagcgaaagtttcctctaaattctcagccaccatcaatagttacggatgagatttgcacagcatgtgatttcaaccgcccgggaaagacctgtcttagaaaacttgaatgggtttggcgtggtgtgacattcatgggaaagaaaaggttcttaacatatatatcattcctaactttggatttaaaccttgttggtatagtcttaagttctcaactttgtttcaaatggtttgcagtgattattaccatttgaagaagcagattgagtctgaatttgttgatgctggtgcaaatataatgtcttcaaaatcgttccttgatctgccaaaggtggatcaacaatctaagctaaaagaacgactaaaaaaatattgtcaaaag

SEQ ID NO: 178102 - DNA, 2621 bp, Arabidopsis thaliana landsberg
  unsure (1)..(2621): unsure at all n locations
gaggagaagcatagagcagaagctaaatatatgcttgataaatgtatcaaagaaaagttgattgatttctgtgatgtgcttgatataccagtaaacaaaagtactgtgaaaaaggtaagtgatatgaatctttggtctatctatatatctatttgtgtctttctcgattatttattcatacatctgtatccttcaagaagaactggctgtaagagtgcttgaatttttggtatgtcccaaagcaacaagggatattctacttgctgatagtgaaaaggtactctaacttagcagctgaatcttgtgactgttcttcattgttttttattcagtatggggtattaaattgctatctcctttctttgaatacatgatgtaggaaactaaaaagcgcaagaagagcacatcgaagaacgtgacctctggagaatcatcacatgtcccagctaaggtttgtaattgttaacctttctcttctttatagtttgtagtcattgacctgatttgtttattctagactcgggggtggtaaaattagctccgtttctagttttgtaatcaagtttgttgttatgaaccattaggtctctatggtatgaatatctttgtctgcgctcccttatcagttactgcaactcacattatgaatgaatttcgagattgcatcaatgnnntataaactggtgttttcttatttcataattttttagttgtacttacagctgccatttggtatgcagtaattattaagcaatgtataataccataatgagaaaatttgggaatagtaggaaatctaagataagttccatggcttggtcacttttaattggctggtttttagtcaacaagggtattattaggccgctcagtgaaagtattttggatagtcttagcactagcttagtacgttatttactcaatggcattcccatgtcttgttatttggtgatcccccatttagctccttgtgtgatatggctttgaaccttctctaaaccgtaagattctgcgagaaaacaaaacatgtggagattctagcaaaagtctctgtctctgcgtggcttgattttatgtgaagaaagttgcataaacaattactgactgtgtctgttattctgtttgatatatacagaggagaaggcaggcgaagaaacaagaacagccaactgagactgaaggaaatggtgagtctgatgttggttccgaaggaacaaatgactctaatggagaagatgatgtagctccagaggaagaaaacaacaaaagtgaagatactgaaactgaagatgagaaagataaagccaaggagaagactaagtcaaccgataagaaacgcttgtcaaaaaggactaagaaggagaaaccagcagctgaagaggagaaatctattaaaggttctgcaaaatctagtcgaaagtccttcagacaagtcgataaatcaactacatcatcaagcaagaagcaaaaggttgataaagacgattcctctaaagagaaaggcaagacacagacaagtaaaccacaggcaaaaggatccaaagatcaaggtttgtttcgaaagcttaaatatcacacattttcatagtgtattgaatctctctatttctttgattgtggccggcacaggacaatcccgaaagaaaggtaaaaaagaacccacaagaaaagaactgcatgtagtggtgaccaaaattctgaaggaagtagacttcaatacggtgagacttcaaaagtttgagaatttacagattataaagcgtataaaaaacctttgaactcaaagacattttgaattttgtttccaaacaggcaactctatctgatattctacggaagcttggtatgtttctgtaaagcttttctcttattctcaatccataatagttatcgtcttccaaatcttcaggaaacgtttatcattgaaacattcttttcctgcttgtgataatactagggagccattttggaattgatcttatgcatagaaaagcagaggtgaaggatatcattacagatgccattaacgaaatgagtgatgatgatgatgagaaagaggaagacacagaggatgaaggtgagaaagagggaaaggactagttttgtctttcttctctttcctacaataagaaaaagaaaacataaccgaagagacggtttaacttaaccttccatgtgtgaatcataggattgtttgtatgtttggtgtaatgtgtaatctgttaggctcatgtagtatcaggtaatgtggttggatactttctggattagaattaatttgagatgtatttgtaaggacttgcaatctttcttcactttagcagcacaccagtgacatggataaatattgttgtgtttcaaaagaggaaaagaagggtcgtccaagagatcagctccaagtcgatcagagagccaataattcctctcaagacacgcccacgaatgaattcacaagtaatctctcgtgttatgggatctattgcacttatttttgattttaagagtcatgttaacttttgtgtcatgtttattttaccaccctataattagcatgttcgtttcgtcaccactggcggttgcggcagcacaccattgacggttcagcaaaacgtttatcataa

SEQ ID NO: 178103 - DNA, 780 bp, Arabidopsis thaliana landsberg
agtcagaatatgtgaagcctgttgatgatgccaatgcggagaaagatcttaaggaaggagagaatgtgaaggtagatgtagccagtattgccgatgatgatgttgtgggagtttcccaagatagtcgaaccctgaaaaaatctgagctacacagtacacatgatggaccagaggaagtcgttgagatcccaaagtcggaagttgagagttctcttgaaaaaagtgtcgaccagcagcatcctgggaatgggcatctagaaagtgggcttgagggtaaagtggaatctaaagaggaagtggagcaacttcatgattctgaagttggatccaaggatctgacaaagaataacgtagaggagcctgaagttgaaatcgaatctgatagtgaaacagatgtcgagggacatcaaggggacaagattgaagcccaagaaaaatctgatcgggatttggatgtttctcaagatctaaaacttaacgagaatgtagaaaagcaccctgttgactcagatgaagtaagggagtctgagttggtgagcgctaaggtttctccaactgagcctagtgatggaggcatggatttgggacaacctacggtaacagatccagctgaaaccatcaatggatctgattctatgaatgatcacgtcggatcagaacctgtaacagttttggaacctgtttctgttgaaaacggtcaccctccagtagaatcagagttggagagaagtagtgatgttccattcacttcagtggcggaaaaagtcaatgcttccgatg

SEQ ID NO: 178104 - DNA, 3682 bp, Arabidopsis thaliana landsberg
atgcaccggcagggctcgtctccgattacgccttcaaactataacgccgccgtttcaattgcttctgatgtacctactggtttaaccaagtctcctttatctcacgcgattccagtttcgccgatttctgctgcttacccttccggtgatcctattttgatgatgtctgggactcctctcgctagggttcgattatctgaaattttgccttatgaaggagctccttctccggtgtatgcaaaagctgtggaggctttgtctgtgtctttgatgaggtataatgcgtctgtgatcgagatagggagtgaagacactgcactgatgcgatgtggccttgaagctgctcgtttgtattttagaactagaagccttactgtttctggtaaaggcaatcgtggcctctctatgtatagagccggaaggttagctcttttgcgacatttttgttctctggttttggtttttgtagaaagaattggttttgcgtttttgaatttgagaaattggtttgattttagttactatagcagttcttgatctatacgatgtgtagtgagtgatttttgtcttgtgaacaggtctgttgaagatttagattcttcacctccatgcatggctgagattttcaggtgtttgggtaaagtagcacgagctgctttatctgcaatagcaaggcatctacgtttaagaagcgagtaggatggttatgatgcttattctctgtttttactaatacttgttgtgtctctttacttttattaacttatacaatgagcgtatctcctttttttgcagtgtttttaaccatatgcttgatgactttccactagctccgaacgaggtttcctcctcggtgctactgggttcctatgctcatgcatcgatacaaaatggaaaacatgcttctggaggtgggaacctatctgctaagattgaagttgagaagggtttgttgacactgttctgctcagatggcactggcattcaggtaacctctattgaactttttgtgtgtagaaggttacatatatgcttttattttagctaagaaacttgatgggaaaacgtgtcatattttatcctttcgagggacgaaatagttgtgtaagaatactatctatgagttagacatgatcagccataatcctgagtttccattttgcttgattcattacactattccatttagtacatttggcttttatttttttgttccttctgaaagttcttctttccttaggtatgtgacccaaatggtcgttggtacacagcagataatggatgtggggtgggtgatctcttactgattaccggcaaagcgcttagtcatgctactgcaggtctccgtccagctgcctcttacagaactactaccgatcatttgtctgccactgacactcgaggaaggtatgtttttaagacgaaataagcttttcctcaacaacttaatgacagctttttcttaacaaaccttatgacatgaatgtatgcatacatatttgattaaaactttaactctttccacttgcagggcatcattagcttttaggcttatgccgaaaagtgatgctatattagattgttccccaatagaaacagccgcccatgtaattcctcaaagctatgtgccagtatctgttagtcagtttatggataacctattagccgagaatgacactctagttaatccgcctgtgaaaaccaatgtaagctcaccctttattacagtagtaaaactagctgtctagattgtagaattacatttaaacgtataaaacattgatatctgtagtacccaaatctgcctttttacttgacatttgcagcagaaattgtattgaggaacgagttttaaaagtcatatgtctttcctattctttcagatcatgcatttttttcttttagatactctcaatcgagattttaataagtggacgtgctacttatattactctttttgaggatctcactattttggatctgttttatgattggcactacctcaatactataatgatataagtttctctgtttgatgttaactgctcagagcacgaggtcttatgaattgttgatgtcaggttccacgggatgatgtttgcaaagagccttccttaagaagtgttctctcggatccaatttcgtgagtaccatttttttccttagtgtataatattatctatgacgaataaatctcctctcttagtatggttagttggatgaattgctaaatctgatcacgtaaaaagtaccctacctaggttttcttgagtgctggcaagccctttttctaaacttctcctcaagtagttttctattctgatttagcaaggggtccaaagctaatcatccgtgccagatagtagacatacactgaagacattatttagtcatattttgttactagctccatgagctgtataatatgttcaattgttttccacctttttattctgttgctgtaattttgcgaaggcagtgcagtgaaaaaaacgttctaatttgtctgttgcaaacttttgatgttagtggtgcttttcttgaagatgcaatggttgtctcttgtggacattcatttggtggccttatgcttagaagagtccttgaaatggttggtactagtttacttcgattctattaatatgctagtctcatgtgatggttcttcctatatacccaagaatatttagtaaccacaatgatcttatgcacagtctagatgtacgctctgcaatacagagatcgagtctgggtctctggttcctaaccatggtaattccgataaagttcattatcttcttatctgtgctcctcaataaataatttgatccacgatagtcttttcgggtttcacattgacaaacagtcctaaccgagtaatcatatttctttgctaatgtcgaacacatagcacttagagctgccgcttcagctatcaagcaacaggatgataaacgacttttccacaacgcagccatgagaaggcgtagaaaagaaatgagtgatcaaatggatgtggtgagatgatctgactctgctctacatattgcttttgtgggtggtttccgattacatagttaccatctccaaacttatcagcctgcatcatcatctgttttctggttagcttaagcttatgttgttgatgaagatctgatacaagttacaacttgatcccaaattctctacaggaaaatggagatccagctacggatgatggtatgcatcgagtggtgcattatccatttgctgtaaatgagaaagttcttatcaaggtaggccattacatttcattttggttctgatgcattttttccagcagataaaatttggttctagcttgttatggaacacatttccaattgcagggaaaccggcgaactccagaaaagtttgttggaaaagaagcaatcgtgacatctcagtgtctcaatggctggtaagtattactctatgatatataagagctgaaaacaaaactatacgtgataggtgaagcgagttgttgagttcaattctcaaactaatccattctcatatatttttcaataaaaggtatctattaaagattgtcgaaagcggagacaatgtacggctgcaataccgatccctaaaaaagatggtgaacgatgacagaggaggaggcctacaggctcaaccggttgagagcaatagcttgtag

SEQ ID NO: 178105 - DNA, 345 bp, Arabidopsis thaliana landsberg
atggccaagattaatggaaaatccatggacaataacataaggttcactcttgcaaatactagttccaatcgttggctcactataagattggagactcttgggggtgtcatgatttggttaactgcaacgtttgcggttctgcaaaatggtaatacaaataaccaagctggttttgcatctacgatgggtctccttcttagttacactctgaatatcactagtctgttaagtggtgttctaaggcaagctagcagagcggagaacagcttgaattctgttgagcgtgttggtaactatattgatcttccttctgaggctacagatataattgagaacaatcgtcct

SEQ ID NO: 178106 - DNA, 56 bp, Arabidopsis thaliana landsberg
atggtggtcgttattgatcggaacgtgaaaatgggtcgtcgtcggatttttgatac

SEQ ID NO: 178107 - DNA, 247 bp, Arabidopsis thaliana landsberg
atgtcaaccaaatgtatatttaatgctgttaggtgggctttggacctgtttcacgatggcaaccttcgagcactccgcatcctctcctgtaaggatttgcttgtttcttcttgcaggtgttagggtgggctttgtcacaatgtacagcatgatctccacgatcgatagcaggataagttatgtatcttacggaggcctcaaccttggttcctgcaagtgccaagaacactacaagagcaagagatag

SEQ ID NO: 178108 - DNA, 338 bp, Arabidopsis thaliana landsberg
taccaaactgcaagagaggcaaagatacctgattgcgagaaggaattctgttgaagagtctcttcctagcggcaatgtggatcaggtaactgaagtagctaatcaggacgaagaaagccctacatcaatggacttggacgatagcaaagctagccagcaatgtgatgcacagaaaagaaaagccagttcttcagatcctaaaccagatcttctaagccaacatcatcatggcgcagaatgtctgccatctttacccccaaacaacctgccagtccttggactgtgtgctcctaattttactcagtcagaatcctcccggagaaattattctcgtccag

SEQ ID NO: 178109 - DNA, 187 bp, Arabidopsis thaliana landsberg
atgggcttgggcttaaagcgtacaacgcaagtgacccagttacaaaaagagaaatcggaaaaaagttcaccggaaaagaaaagcggctcgactcttgttgatcaccgttcgcagagtgaccaaatcttagatctggcaaaatcaagactcacaactttgcgaccccatcagaagattgaaacaaccg

SEQ ID NO: 178110 - DNA, 148 bp, Arabidopsis thaliana landsberg
atgcataaggtattgctcgatatctaccaacttcttctgcgcataacgctcagttatccactcgtggagccagtgaaatcatatcaaatatcagcaaaaagggggtattctaatccgcacgcaatcccttataagaagagtcaaagag

SEQ ID NO: 178111 - DNA, 695 bp, Arabidopsis thaliana landsberg
atggaagttttcagtgatcagaaggcggttcaagtccttgaaaacaagcttgttggtctaaccagttgctggcaaaatgcttatagttacctcttggctggctgcaaagaaacgattgctacagaagaaaagagaaagagatttgcttggtatttgagcgattgcttcatcaaagactcgggaagaccggcgtttccaacctgtaaagatgaatcagtaatgatgagttgcctcaagaagcttgatgatcatgagcataagatctatctcgatttcttgcttgaaaccaacaccatctgccaacaattacagtaagaaaaacaatttaccatgaatatttttctagctgttattacttttgtttgccaaaatggattctcaatttgcttctttttggtatggcaggagtaatgcgttcaaaaatgagatagagaggctcgtgaatgagctcaagaatacagctcagtatacagaagataaattggatatcttggagagtaaatctgatgctttaatacagacctcaagcatgattcatgattctttagggtctcctagatgttcgggttcaaaacgtggttagtgtgacaaacgccttagaaactagtgtgagtggattatctcaacaagcagtagatgtctctcaagaacagaagaacattgcagaatcccagctagctctcacgatcggttaa

SEQ ID NO: 178112 - DNA, 415 bp, Arabidopsis thaliana landsberg
atgactgattcgcgcaacgggctgcccgaattccgcccgtacgtctaccggggcgaggaccgcgacaccctcaccgacggcaagaacaagcgccgcctgcaactggaggcgatgctcgccgagggcggcgagtggaagccgccgctccgctacgaggccgttgaacggcagccgcacggaacccgcggcgcgtacaggcggcacatccgcgcagggtcgaagccgtgcgaggcgtgcctgcaggccgagcgcgtcggctgccgcattgaccgcgccaccgcaaggagcgacgcatgaccatcttcctggacatcctcgccggactcggggccctcgttggcctcgccatggtcctcgccctggtcctcgtcggggtgctgctgctcaccgaccggcgggacgaggacatcgagcc

SEQ ID NO: 178113 - DNA, 214 bp, Arabidopsis thaliana landsberg
atggagttgccggtcttttgtttcccggttgccggatctttttccggtgagctgttgacggcataaagttaccatcatcacccaggaaagtcaaccgtgaaaacactgaaatcgctgcgtatttctacggtattttgtcggtttagggttcggatatcctttccggcagctgttttccaatccgccccaagatattaagcagggtgttctgacg

SEQ ID NO: 178114 - DNA, 162 bp, Arabidopsis thaliana landsberg
atggtgaacggtagacgatgtatgaatagatgtcgacagttaaatcagggtatggaggacaacgatgtccagtcacgttgcattggcatacaaacgccaatctacatacgatgttttaaaatattagttactcttttcaatcatcttccattgttaataata

SEQ ID NO: 178115 - DNA, 1479 bp, Arabidopsis thaliana landsberg
gagttagacaagaagctgctggtgctctatggaatttgtcgtttgatgataagaatcgagaatctatctctgtagctggtggtgttgaagctttggtatgcttccagtttgtttagtatgattacactgttcctctgcatatataaggggaattgatcacttttgttgattattttaggtggcgctcgcacagtcttgttcaaatgcatcgacaggtcttcaagaaagagctgctggtgcactttggggattatcggtgtcagaagcaaacaggtgctaaatacatctgaatctaagtttaatgcgttctgtttatagattgtcacgtgatatgtttaagatcaatgcagaagcaacataaggacagaccatcttgctttaacatatcacacatgctgatactttttattttgcttgcaccaagatgaggcttttgttacagagaagttttaaaggagtttcttaccaatttattgttactgtcactttccttgataataatcctaccattgctctttttgatctccatcagcgttgcgattggacgtgaaggtggggttccacctctaattgcacttgcacggtctgaagccgaggtaagaactttgagcttagccaagccatcttggataatctgatataaaatttcctcaatgtgttggtttttttcccaggatgtacatgaaactgcagcaggagctctatggaatcttgctttcaatcctggtaatgcactccgcattgttgaggaaggaggagttccagctcttgttcacttgtgttcgtcttctgtctcaaaaatggctcgattcatggctgcattggctttggcatacatgtttgatggaaggtatattaatatataactcagttaataaacatcccaaattcaatccgactctcacggttttcgatctgaattatcgatctgcaacaggatggatgaatatgctctgatgataggaacttcttcatcagagagcacatcgaaaaacattagcttagatggggcaagaaacatggctcttaaacacattgaagcttttgtcctaagttttatagatcctcacatatttgaatctcctgttgtttcatctacccctactatgctagcacaagtcacagagagagctcgcatacaagaagctggccatttgagatgcaggttaaatcttttcgcctctatctatctctatcagcggtgtcttgtgtttgattgaaaactgatttgaaatttttaaatgtattgttttctttgcagtggtgctgaaattggaagatttgtaacaatgttgcgcaatcctgattcaacactcaaagcatgtgctgcgtttgcgcttcttcaggtatgtaaaaatgttaaaataaacaatatgtcgtgttctctgttggttacaacaactgatgcatatatcttatctttttgtgcttgctctaattcagtttacaataccgggtggtcgacatgcaatgcatcac

SEQ ID NO: 178116 - DNA, 276 bp, Arabidopsis thaliana landsberg
gtggggcctcgagttcaggaagaagaattcaacacgttgcttcattcgaagatgtcgaggtatcttattctctgtactctgtttcattctatctgtacagggaataaaatttgtagaatatgtactgctgaccagttcttacgccttcgtcatcatgtttaggtatcttctgatgacgataagatagagaacactaagcttaacaaaaagaaaaagaagaaaaacgcaaagaagaaaaaagaagagaaaaagaagaagaaaaacaaaaagcataag

SEQ ID NO: 178117 - DNA, 462 bp, Arabidopsis thaliana landsberg
atgatcctccacgactcggtgttcatactattgtttttcattcaaaccggaagtactctaaacttcagcaagaaagaagatattcttttcaaccagagtcgtctcataaacgctaccgccattttagaagatctaatcttgctcgagaaccaactcccttatgcccttttagagaaactctttgaacctttttcctcaaatgtcaatactaaggaaacgtttcgtgatattacccttcgagcttttaggtttgagggaaagatcaaagaagaagtgagattccaacattttacagatttgtttcggtgtgtccgtgtcagcacactttctttgacagaagaacaaattaacatagcaaaaaacgagccaccgaagagcagaaagattatgtacaacgcagacaaactagacagtgcaggagtgaattttgtgaatgtggatgaagaaaatgatttatcgttg

SEQ ID NO: 178118 - DNA, 1030 bp, Arabidopsis thaliana landsberg
atggcgattgcttcaacagccaccgttcttttctgctgcgccaaacccaatttccggcgaattcattctgagagccgtccagcttcttctctcaccacctctaacgaacctgtaattcggatccgaagccgcagtttaattcatgacccggttgcgctgtcgggtcttatcggaaccagtttggttgcggctgctttcatcacggcgggaccagatgctactgctttggcggcggtggtggattctcttcagctaagcgaaccgtccaatgcgttgtctttacccacttgggccgttcatgtttccagcgttgtcgaatggttctcttcttcttcctttgctttattgattgaaattctcacttagaaaacatttgacatttgatctatagtgacacaagagagtatttgatgttgtgggtttttcgagtttttgatatcattatgagagaagcttcatctacatataaagtctcgatctttcactcacaatgtagattaagcttctctcattatggtttgaaatgcagttggagctaacaaacaagaaaaatgtaatgtctttctaattctggtgttgtttttactaaaggattacggcgatggcattggtatggaagtatggagaaagaaagggttatgagtcttggaaaggtctctcatggggaatggtgagaaagctctaagccgttttcctagattacatgatttcatttttctgagctttttggttgttcttaatcaggtacctttgcttggtggagctctctgtgcatgcacatggcatttcttctacaacgatgaatctcttgaggtcaagaaactcttgactccaacttttagctataagtctgtgatatgtttcgtttgcttcttcactcctacttaatggtgtaattgttggactgcattatcaggtgttggtcgctcttcaggcagcactaacggtgtttggtaatatcactctctgcattgctgcctttcggatcaacaagttgtcatccaaaattgaagtctctgaaaagccatga

SEQ ID NO: 178119 - DNA, 173 bp, Arabidopsis thaliana landsberg
atgataggagacgacaagtatagagaagagtcaaaaacgaatgaagaagacggagaatttcggaggagttgcaacaaagacgcagcagcaactaagggcttttcagacgagttcacggtggtcttcgaatgggcttttttcattgggctttctttgctacaaaatccaacaag

SEQ ID NO: 178120 - DNA, 512 bp, Arabidopsis thaliana landsberg
atgaacaatcagctccaggccagagaagatcctgctgtaataaaggagagtggacttgctacatcacagaaatatcaaatcacagagattgaagaaaaggaaagtgcattagcttcggagtgcgaggacaaagagaatgctaatattgccgcggctatcgataaagaagatattgctgtaattaaggtgagtggactagataaagcaaagcaatgtgagactgtggagattgaagacaaggaaaatgcattgccattggagtgtgagaagaaagaaaatgctactaatgcaacggatgttgatagggaagatgataaggaaaattcttcagccttggacaataacaggtgaggaaaatgttgtttatttgctttactttggtttccttttttgtacatcatctcacagatatacttgttctgtgtggatcttgcagaaatctcgaccaagcaacctatcctctgttgaaaaagaaagtcttggcaagaaagaaatttgtaaactaccaaaag

SEQ ID NO: 178121 - DNA, 313 bp, Arabidopsis thaliana landsberg
atggttggttttgcagagcctcgcgtatactggcctttccaagaggttgggcaataatcgtttgggaatataggattatcactaaaataatcgttcttcaagagggtgtgtccttcttctcgttttctctcaataaaggcttgtttccgtgttttcttggtgccttcatcgtcactagccaaatcaacgaacatattatcgaattgttaatcaagtaattggtcaaagctttgttccatggcatcatcgaaaggagtacgggatgaagaagccatattgtttgaagttaaagaaatttaaagattgtaaataa

SEQ ID NO: 178122 - DNA, 293 bp, Arabidopsis thaliana landsberg
atggtcgcactcacatcgtcaggtaattgcctcatgtggactatatgttataaatctcttctctcatatggtcattttcattcacagaacatgagtatccacagatattaagcattttcgaacaagccacaccttgtaatgacttcttgagtctctctaaatgtggaagagaaaacacatacacttctccgacaaatgggggaactagaatacagattgcgacgctgacagttatcagagagtgtcttctttgctttgccaaaaactcacataaaatctgcagagagtattaa

SEQ ID NO: 178123 - DNA, 242 bp, Arabidopsis thaliana landsberg
ctacggccctggattcatcttccaatccaacatttaacacaccaacaacagccttccagaatccagattcttcaagtgacaacaactctcagattctcgatttcgacacccaaaaaaaagggaatagctttcaaagatccatcataacacgaactaaacaaggcaaattatggaaatccaggggaggcgttaatatcaacgacaaaccctcatggggaaatcggaaatcgaatcggccatga

SEQ ID NO: 178124 - DNA, 102 bp, Arabidopsis thaliana landsberg
gttccggatagagaagccggccaatatccgatggcttatgtagcccgaaagcccgagagcaatctctccgaaaaagaagttattgacttcatctctaatcag

SEQ ID NO: 178125 - DNA, 50 bp, Arabidopsis thaliana landsberg
ggcctgatcctaagcaacgcgttaagagcgcaaaagagcgccgaagatga

SEQ ID NO: 178126 - DNA, 900 bp, Arabidopsis thaliana landsberg
atggcggaatttagtgacccaccaccatctaatctctcttcttctcataaattaactaaacccaaccaaaccctagatgagtcttcaccaaccgcgccaattcgagaccttgttactaactcgctctctctttcctcaccgattcgtcagattcaagccctttctccggcaaaaccagacgggtcttcctcttctccgccggacaaaaccctaaatttcaatccagaggaaaacagagatgtgaacccagatgagtcttcctcttctccgtcagataaaaccctaattgcgccaccagctcagatttcgcctgttagcaacaacaatcatctccagatcacgaacacgtcagattcgtatctttatcgtccaccaaggagatacatcgagtatgaaagcgatgacgacgagcttaataagatggaaccaacaaaacctctacagttatcatggtggtatccgaggattgaacccaccggtgttgtaagtttctcttctttcctttttatctgattttgttttggtatccgaaattgaatcattttggatgttttatacaatttcttcagggggctgggctatataattcaggcaacacttgtttcatagcttctgtgttacagtgcttcactcatactgtgcctcttatcgatagtcttcgttcattcatgtatggaaacccttgcaactgtaagatttgcttatttggtttgatttgagtttggtgacttgtttcgttcatggttttaatcttatagtttctttgggttttcaggtggaaatgagaagttctgtgtaatgcaagctcttcgagatcatattgagcttgctctgaggtcttcaggatatggaataaacattgatagatttcgtgataacttgacttgtatccttttttaa

SEQ ID NO: 178127 - DNA, 117 bp, Arabidopsis thaliana landsberg
atggttaagttcacagctttcttctgcatcatcgctcttcttctttgctccacgctaacacacgcatcagctcggctaaatccaacatccgtttatccagaagaaaactccttcaag

SEQ ID NO: 178128 - DNA, 2752 bp, Arabidopsis thaliana landsberg
atggctaatagattggggatacagtctcttcgttgtatctccttagtggataatgatattacccaggatcttccttgtatggatttcacaaagttgaaggagcttctatcactatatgccagcaaagatttcttgttgttcgatcttcttgagttagctgattgctgcaaggttaaaaagctgcatatcatctttgacaagagggagcaccctcgcaagaccttgctgcagcataatttaggtagtcaatgttttgagcttattactagcctttcaattgactctattatattctttaaatattgtgttatttttggtttttacctaagctttctctttaaaattttggagaatggcggagatatctaaggtggattaaattttcactaccagaaaagatattttgagcttctactggatactggcttctttgttgcttagttttgaatatgtgctgagtgttttgatttgtagatttgtagggatgtataccttgatcctcttattaacgtactcttctttttcaggtgaatttcaaggaccagctatagttgccattttagaaggggttacattgaccagagaggagatttgtagtcttcagcttctttcacagtggagaattaagggtgaaactctcaactatgggttgggccttcttagctgttacttcatgtgtgatcttctgtctattgtttctggtggctacttttacatgttcgatccccaaggagcgaccctttctgcatccacgactcaggctcctgctggaaagatgttctccttgataggtatgaacttctggtattgctttcctacctgtcttccccatgctaaaactgtatgatattcagttgactcatatttattcagtaactggtcctgatgggaataaacaacctcgtaaactgattttttttggttcattggtcatatcagggagaatcatattttagctttatttacatttttcttaccgttatgtaactcaacaaatattactattcagttgacgtgtttcttctataagtttaccttctaatatttcctactgttcctttaggtacaaatttggttgagcgattcagtgatcaattcaatcccatgctaattggtcaagataaggcatggtcattgacagattccaccattatccggatgcctttatcaactgaaatcttgaaagatggatttgaggcggggttagatagagtgaagcaaatatctgaccaatttctggagaatgcctcgagaatccttattttcttgaagtcagtttcacaggtattataatctatatctacactactgtggacgtcattgaattcttttttatggcagtaaaactcgtttaaattcagaactgtaatacataatacaacttagaaactgaaaaaatctgggcttgaacacagtgtatcatactgttggtaaactgttaagtatagatttatttaactaattagattgttctgaggccgttttcattgattggatattttgctaggtattttgttttaatttgcagaagcactaaaatgtgtttggcatttttccatctgttggcacagaagcatatagattttgatattttggattattgtaagttgaagttcaaatttgatgaatgagtgaggtttgacttttgtcattgattgtatggaactctatacatatgtcatagtaaatcacctctgtatgttctaaaatgattcatgttttatcatgttgtgttttgttttaataacttgatgtctattctatgaatcaaacccaaaaacgtggaaaatattatttgtcaatttcaggtttcattttccacatgggagcaaggaaatgcacaaccacatcaagattacacgctgcatattgattcagcatcagctatcatgagaaatccctttgcggagaaaaacttgaaaacgtctaaactttcgaggatttttggtagctcaaactctggtgttaaatcacgaataatagaggttaacctacatataggggaaaacaaacttctagatcgatggcttgtagttctcagcaagggctctggacaatcacaaaacatggctcgtggcaggtacaaagttacttactatttacttaacataaaagatcctggcagtaacctatatgctttgatgttcatatcacctcgaaagccatgtcagagaataaagcgataccaatagtttctttcagatttttaatctatcttttaaatttaagatgttaccaattctgatcaaaaccaggggcagaaaatacattcagttttgtgcaagtatgtcacttttcatacttgataactaaagaattggcatgtcactgttcatacgagtaaacagaaactaaattattttgttttattgatgaagataaaagaatttcatttactcaaacctagtagatgtgatgagtgtcctagaggtcctcatgtctctattttgttgttgaaatattactttgcaggaagtatctagcgtacaatttgacacctgttgctggagttgctgcacatgtatctcgaaatggacgtcctgttgatgttcatgcagccagccccataatgtctcctttacctttgtctggtagtgtgaatctacctgtcaccatccttggatgcttcctcattcggaataattgtggtcgttttcttttcaaaaataaaaatgagagagctatgtcagagccacagtttgatgctggagatatattgattgatgcatggaacaaaaagttaatgtcatgt

SEQ ID NO: 178129 - DNA, 319 bp, Arabidopsis thaliana landsberg
atgaagaaggtgctgagagtatacggcggcgttatgaggctggtgagacttttgccggcggattcaaggccgtattacgccaagtacgccagggagaatttcgttaattaccgtgaagtcgatcaaagcgaaacatccctcgacgaactcttccagcgagcctataatcactcactttgggtactcaagaaggtaacaaagattctgggtttcttttaaatctaggtaccctttgtgttaactgtctgttctcaatcatttgcagtactcaattgacgaatcagcagcgacgaagttgaaagagatttgttttgaataa

SEQ ID NO: 178130 - DNA, 336 bp, Arabidopsis thaliana landsberg
aatcactcgagttactcggtttatctaccggttaaggatgtgaaggagtggaatataaaaatcaaggagaggttgattgagattccagaggaaagagtggtgaggttgagagaagaggttataaggttgataccgaaggtagtctacgctgatccgaagtacggatcggatgggagtgaagatgcatttgagttggctgtgaagggaatgttggagaggattgaagaagtgagagagatgatgagacaagggaaagatggtagtgatgggtttgatgatagagatgattataagtatactttttctccatatgaagaacctcaagttttggcttaa

SEQ ID NO: 178131 - DNA, 78 bp, Arabidopsis thaliana landsberg
atgcagggaggaattgaccaagcctctagatctacaaacgagggcatcaacttggcctctcagaagaatcagaaccag

SEQ ID NO: 178132 - DNA, 147 bp, Arabidopsis thaliana landsberg
atggtcgtgaaatttgacttagactcaaacctcgtccgtacttggtctaccggagctagaagattcgttggtgagcccatgtttgtcccaaaaaactctgttgaagaaggagaagaagaggacgatggttacattgtcgtggtcgag

SEQ ID NO: 178133 - DNA, 277 bp, Arabidopsis thaliana landsberg
atggctcaagaccagcgcctcgacaaggtgaagactgtcctcaacacgctcgtcgataacctcaccgaaggtgaccgcatcgcactcgtgcagttcgacgatcgcgtcgaggtgttgagcgagctcagcagtgacaaggccaagctccacacgatcattgacggcctctcgcccgcgggttcgacgaacatttatgacggcctcgacaagggctttcagctcgcatcgaacgcgttcgacgccgagcaccagaatcgcgtcatcttcctctccgacg

SEQ ID NO: 178134 - DNA, 479 bp, Arabidopsis thaliana landsberg
acccaagaatttttggttctaggacgtcaaatgttgactgagttgaaggacaatattcactgtgctacagaccaggtgatgcaaaaggctggaaagtatgatccctctggatacttcctcatagaagtaagaattcatctcgtttctgtatcttttgatgtttaagtaagtttaacttctgcgtcgctggtttaatcagatgctttttgctcgtctaggatgtctttcacaatgatttaaggaatccctcggctaaagattacagctatcctattttagattggctttggaactcgaaagatgaagctcttaaaaaatgggaatgtgttttaaccggcgaattacagaaaaagcagaaagtggttctaggtgaagcgaaatctgtggatttacctcgttacagaactgcagacatgcagagtacacacttctgtgatataagattcagagtcggagctagttatgtctattgtcatcag

SEQ ID NO: 178135 - DNA, 58 bp, Arabidopsis thaliana landsberg
atgctcatcgtaaagaccttccaagtaaagaacagagaagttaccgaaattttcccct

SEQ ID NO: 178136 - DNA, 216 bp, Arabidopsis thaliana landsberg
atgatccaaaaatctagcagcgaagacagtgtccagaagttttccgaacacgatccaatctccacatacgaagatgcgtaagaaaaaccctaattcataaggctaccaacggagcacaatcgtagatcagtaccacatcgatttttcaggattggaaatgagatcggtgaagctgaagagatcgacgaggacgaaggagagcgcggagagaagtag

SEQ ID NO: 178137 - DNA, 118 bp, Arabidopsis thaliana landsberg
agttcaaggaggcaaagagcagataagctgcctcatggatcaagttcatcgcaaacgggaaaacccaaatgtcccagtgttgaaaaaaggaagctgtattgcacgaacgaccaagtag

SEQ ID NO: 178138 - DNA, 132 bp, Arabidopsis thaliana landsberg
tctgttaccaaaaattccatcgcactcaagagactatactacacgcgaccaaatgacttgacattgaacgtacgggcagattttaacctcaataagacacgtgaacgaccgaaccaatcaaacggagcctag

SEQ ID NO: 178139 - DNA, 334 bp, Arabidopsis thaliana landsberg
atggcggctaaaaccctagcccaagaccacgatttagctttcaatctccaaatgcaagaagccctagcggtttctaaagcagcccacacttcctctgtaccaaactctcccaccggagatgccggaatcgtcgatttcaccggcgaggaggaagaattcgacttcacgtctctgattctacaagacattgctcgagtcgatcaggagaggagagatcgtgagtttggtgaacaggaaatgaagagactcaaagttgatctggaccgtcggattcatgatcagaagaatgctaaagagcttatgaatgtccctgaaggagattggagcaaacacg

SEQ ID NO: 178140 - DNA, 31 bp, Arabidopsis thaliana landsberg
atggggagtaaaagaaggaaaagaaaagaag

SEQ ID NO: 178141 - DNA, 218 bp, Arabidopsis thaliana landsberg
agagaaggttgcgggtttttcgttgcatgtgaagtttgagaaaggtaccttaatgatgccgggtttcgctgctaatgaagcgtctgatatgtttctaagaaatgtaattgcatttgagcagtgccatgcagccgtaacaccctttacttctaactacatacatttcctaaatttcctaatttcttccgatagagacgtcgaggtgcttatcgatgaag

SEQ ID NO: 178142 - DNA, 76 bp, Arabidopsis thaliana landsberg
atgtctaagaaacaaaaccttccccggttcggcataaaccgccatccatccagattattctccgccgctattccac

SEQ ID NO: 178143 - DNA, 348 bp, Arabidopsis thaliana landsberg
  unsure (1)..(348): unsure at all n locations
ttaactcagccaccggcagtgattcggctgcaagtggggcgggtnnnnnnnnnnnnnnnnnnnnnnncgcagcctcaacctcctcggacggcctcacggtgacgctcgacgggtcgccggacctctcgggcgtcgcgaccgacggctcccacgtcatctttctgaacgactccaccgccggcaatcgcaacttcggcaagatcaccgcgaaggacaacactgcgaagaccgtgacggtcagcgacgcgttcgcgctgtcggcctccggcctctcgcgggcgattggtgggacgcgcgccaaagttggaaaaagcaccagccaaaaactcctgtgcaataacaacacag

SEQ ID NO: 178144 - DNA, 344 bp, Arabidopsis thaliana landsberg
atgcgagacaaactacgaaaacagggcttggacgagtggacctgggttcgtcatccagcccagattacgcccatgcccgaaaacgtacttaagaggtcacaacattggggactacaaaacgcaaatggaaaacgttccattgttctgcttaacataaaggagggctgctttcgggctttcccaaaaggtgtcacctgccccgtttggcctcgcggaccacatgcactggagccatgaggttataacctttaactaacaggttcatcagaactgtgggctgccactctacgactaatgtgaatgtcatcggctactgcaaggacacttttgattcccggagcagg

SEQ ID NO: 178145 - DNA, 356 bp, Arabidopsis thaliana landsberg
ggacggtctacacaaggctagtcgaaccagcttacgtggcggtgagaaacgagttcaggagacgtgttaagaacgcaaacgcaacttcactaggaggtttcgacacatgctactccggctccgtcgtgttcccgtcggtgacgtttatgttcgccggaatgaacgtgactctgcctccagacaaccttctcatccacagctccgcaggtaacctcagctgcctcgccatggctgcagctccggtcaacgttaactctgtccttaacgtcatcgctagtatgcagcaacagaaccaccgagttctcatcgacgttccaaattccaggctcggaatttcccgtgaaacttgcacctaa

SEQ ID NO: 178146 - DNA, 103 bp, Arabidopsis thaliana landsberg
aacgacgccgttcgtgaatctccggcaaaaactgacggagcttactaacgaggtcgatcatctggtcatcggagatcctcgaagcattcgaagtttgtcttga

SEQ ID NO: 178147 - DNA, 717 bp, Arabidopsis thaliana landsberg
atctggagaaaagccccctttaaggattccttcaatccgagtatttttcagtcagtcactgaaggtttaattacagctattaagttgatctgcttacctcctatcggcattggccttggtcctctcgctccctggatcttctggactatatggacgtctcgaaatcaattgattttcaacaagaaaagtatccctgttgtggatgctcttggtctggccatcatccgagcgaaagaatgacagcaggctcagtcgcttcttgtttcagggagagctctcaggaaattgccttttaaacctctcctcctgacaaacccttttatttgcctcaccgatgcctcctggaaaactgatgcacatgcgggtttgggttggatcttcatggataacaatgaacgcacctttagcaaaggctccttagctgtagctcatgttggctcaccgttaatggccgaagctttggcaactcttatcgccataagagttgcaattggattggcccttactcacatctctttcgcttcagactcgttaaccctagtcaaagccctcaattcgaagctccaatcaaagggacttcacgggattctacacgacatccttgctctatcctctactttcacttgttgttctttcaatttcattcctagagaaaataatcggcaagctgatgctcttgcaaaagctgccctcttttcctcttgtacggagacctag

SEQ ID NO: 178148 - DNA, 54 bp, Arabidopsis thaliana landsberg
ggtttcgagatattcaaagaagccttcaaattaggattagagattcgaatttag

SEQ ID NO: 178149 - DNA, 390 bp, Arabidopsis thaliana landsberg
gcttgggcatatgattcaatcaacaccattggagagcgatttgggaacgtagtcaaagaggatgagattccgttgcttaaatggggttgcaaccgcacccatgctacaatagaatcagccattgctgaagatatcacaacgcatgatggtgagataaggttttggctctgttatgatagtgatttgactgagttatgttttgtgatggcagagttatgttctgtgatggctaagttatgttctatgacggatgagttatgttctgtgatggctgggttattgtttactgatggtttttatatttgatgcgtgttttattttgcctcaggcttttacctgaaagaccacacgaatactgaaagtgcacaatatataggagtagtactttag

SEQ ID NO: 178150 - DNA, 106 bp, Arabidopsis thaliana landsberg
ccgccgtatcttcaagctcaagcaacgcttgctgctctctaggagctccttcaaacgtacttccgacgaagaacgaaaacggcgtcggaaactgattcctccttag

SEQ ID NO: 178151 - DNA, 239 bp, Arabidopsis thaliana landsberg
atggtatcatatttgttggagaaagaagaaatttccttatatgattcttaccagaaccaaagtgaagagtatgaacgagacttatacgtcaatgagaccgaccatggagcaccattgtggtaggaagaggattgttccgaatcagattttgatgattaaccaggggctggcgacttccaccctgagccaccagtacgctgtaccacaatgcaaagcttctccgagccaattgagagttg

SEQ ID NO: 178152 - DNA, 1642 bp, Arabidopsis thaliana landsberg
atgggactagctatctcggagcttaaccgatctctgactctggatatcggctgcgaggattctggggtcagggttgtggacgcagcgttatctataatgtgcttcaaggcacctcaggttagtatcatatctatcctggacttgcattgtttctacgtagctgagttcttacttgtgagtgattttcttattaaaattcaggtttttgattcggcaattgagtttatggtacgaacaattgtttgcgccttatcatcttcaagcaattgtaaggtaattaggtatcgaaacgaggaaacattacagtttgggagctccaatttacctggctgctctgaagaattgatcgaaatctctaaggatattattgagaaactgtggggaaatggtgcgtttgatttagcttatcctagagttatctgaagattttaacttttgtttgttctctcatatttttctgacttggaaatgttcataggaagattggctacattgttattcgaagctgttgtaaggtcagcagcctcaacatgtaagatcagcagtttcaacgcgcatggaaagcttatggatggaagaaatagggctgtctcgaagcttcttgcttacttaccgggagaatcatctatagagaaccacaagatacctctgaggtttgacctcttgtactgtttctgttccaagctatgttagtctgcattttccatattactcaagaagccacagcttctgagatgtttgctctcttgtttcagaaaaaggtagaccggtctgacactttttgatgatcaggattcttttctggtatcgagatccattgtctttgaaggtagatgtttccagaatcttgaaagaggtggtggaaaggcctttcctttgtgtaaaaagggagcttttcgagaggggggagtggcgcgatattgtcatctgcctagcgatatctcctactatgtttatcaacactagatcactcttacataaatggcttttgcttacgtgagttcctatccaattggtgtcatgtaaatctacaataatagacatgtgtaatcttatgcgttgtgatctctagttttccatctttcttgctttctgatgcaatttctttctttacgccaggggacttgcttctgtttttgaagtacttgctggtttggtctctgcaataatggatacaatttcaaggccatcgttgtggggtataccaatggaactagcttccatgttgccattttctgatacatactttcctttccagtgtcaatttctgagaatcttggcgggtcctctcagttccaagtccctcctaatgttagctcatactgtcagtaaagcgtctgctgtccctgggcaacaacaacgggatactaattgtaagcctactccaataaaagttcaagcattagatgacaaaaccgaatggtaactttacataaaatgcaaattgataccctcagatttgatctatttatatatacgtgcgtgtgagtggtttttgaatgatgttgtatcttctggcagggctttggctattaacttcccagattggttctattttgcatctgctatgctcttctcagaaggaaagtcgtttgaaaatatccaccatatatgcgcttcaaaagtggctgactgtagacaa

SEQ ID NO: 178153 - DNA, 67 bp, Arabidopsis thaliana landsberg
atgccggccagcaagagcttcgcctacgccagagtttatgagcaagagaaaggtcctcgattatcgg

SEQ ID NO: 178154 - DNA, 132 bp, Arabidopsis thaliana landsberg
tcgattacgtgctcttcgtgaccgagtttctcgctctcctctatggtgcggcggagcgtggtctccgcgccattgccctggggttcccatgcgtcggttgccagccgtatacgcaattcgtcagtcctcagc

SEQ ID NO: 178155 - DNA, 491 bp, Arabidopsis thaliana landsberg
atggaaattgtgaacaactttaacaagatctggtccagtcaaatcccaaaaacgttggtagaacagagctgtcataccatccggacccggagctttgtccggattaagcgagaaaagagcgcgcttaacttcttctggggaaatctctttagtgagtctctgattcatatcttcagatatcatcactagcagatcctgaagagcggaatggaagttttgtggctccgaggtggtaaacaaatctttaaagtaatcaaccgcaagtctttccaaatccacctccttgtctacccaaagaccgtcttggttcaataaaccaataatcttattccttgctctcttttatttggtagtagcatgaaaatattttgtgtttttatcaccctctttaaaccacaactcccgactttttagacgccagaatatctcctcttctctataagcatcgcaaagcttccactttagtgctaatagatcttcagcggagatag

SEQ ID NO: 178156 - DNA, 516 bp, Arabidopsis thaliana landsberg
atgcgcgaatttgttgatcggttcatctccctggggctgccctatggcgtgatcggcggcccgcgcttctacgagcgccaggaaatccgcgatgccatggcctatttgcgcctgatcgcccagggcgacgacgacctggccttcgagcgtatcgtcaacaagcccaagcgcggcatcggcgatgcctctgtcgccactctgcatgcctatgcccgcgcaagatcgctccctctgctggctgcgtcacgcgaaatcaccgaaaccgacgagctgccgcccaaggcgcgcaaggcgctgggcgaattggcggccaatttcgcgcgctggaccgacaccgccaaggtgctgccccatacggagctggccgaaatggtgctggaggaatccgggtataccgacatgctgaaggccgacaagtcggcggaggcgccgggccggctggataacttgaaggaattcgtccgctcgatggaggcctttgaatccctgtacggcttcctggagcatgtcagcctg

SEQ ID NO: 178157 - DNA, 503 bp, Arabidopsis thaliana landsberg
atgcacggcttctgtcagaacggcgggcttgagatgaggcttcaacccggccctgttgaccacatcgaccggccgctcgaagaggccggcgaggtagtctttcacgccgacatagtcgaacacgctcaatcgcgccgagggatcgaggtcgatgaggatgtcgatatcgctatcggcccgcgcctcgcccctcgcaaccgagccgaagagggccgcatgggcgacgccctggcggtgcaattccagctcgtgccgccgcagcgtggcgatgatgctgtcgctatccatgccgggaaagatagcggacagcgccgcccacatcaatttcaaggcttagccgtggttgaacacgaccgtcttggtcgcgctcatgtcgtagagcgcttcgaagcctttctcgcggccgtggccggatttcttgaagccgccgaagggcagctcgatgccgccgccggcgccatagccattgtcggagcctgcccggccaacgcgctggccacccg

SEQ ID NO: 178158 - DNA, 910 bp, Arabidopsis thaliana landsberg
ccgacgacacagagaagaagaagacgaagacgttggagagtcacatcaaagcttaaacctttcgtgatttattctcctttttcccgggttcggattaatttttcaaattccgacgaaattcgctatcttctggtgcttgagctgcttagctaagtgaagcagagagagtacaattgtttatgttttgtgagttatttaacctttgtttatgatggtttctggttttgatttcaatagtaggcgtcgttacttggtttagaagcaaattgttagggtggtttcttaaagggggctttatacataatctactgtttactttcgtgctccttgcattttgatggtttgttttgttctttagtaggttaaattaaggagattcttggcaaaattctgaagtagcagcagtagctgtgttttgtgttcatagagaatgggagcagaagaatttccgagtgttccgttcaactcaaatgcaatggacaacgctgaatataccgacacagatttggtgtttgccgttagaaaggcccttgcatctgtccaaaatgtgagtgttgctacagatgttacttcttccaagtacactatgtatatatatgtgtgtgtcagtgtgtgtgtgttgtaatggtcgtgttcgttaaaagtgttttctttaatcaaatccagggagataccgacgattatagtcagcttaaaacagtgatgtgccttacagaagacgctgatttcgatgcagtggcacagcttgaggtgtttccttttcctccctcatatgacaatcaattcttgttttgaatttgttgttactaaaatatctccattttcattcgttttgcagacagtcttgaaaagtctatcagtttccgttgcttggatagatttagttcatcataaagatcttcttgaagct

SEQ ID NO: 178159 - DNA, 744 bp, Arabidopsis thaliana landsberg
atgccttgtggtttttgtacggagtatggcattgaaccttatcttaagacggagtcatgggggaataacaacagcgactgttgtaattgggagggagtcacgtgcaatgccaagtccggggaagtgatcgagctagacctaagctgcagctacctccatggccggtttcattccaacagcagtattcgaaaccttcatttcctaaccactctagacctttcatttaatgattttaaaggtcaaatcatgtcttcaattgaaaacctttctcatctcacctatctcgacctttcttttaatcatttttcgggtcaggttccatctttcattggaaacctttctcaacttacccttctcgacctctctagtaacaatttctttggtgaaatcccagtttcttttggcaatctaaaccagctgacccgcttatatgttagttacaataagctcagcggaaactttcccaatgtcctactgaacttgacagggttgtcaagtttaacactcttccacaataagttcacaggcacgcttcctccttatatcacttcactatccaacttgatgaaattttatgcaagtgacaacgccttcactggaacttttccttcttttctcttcaccattccttctttgactgacatttatttgaatggtaaccaactcaaaggcactcttgatgagtttgggaatatatcttcaccatctaacctaaaagagttagatattagcggcaacaacttc

SEQ ID NO: 178160 - DNA, 10 bp, Arabidopsis thaliana landsberg
atgatcgaag

SEQ ID NO: 178161 - DNA, 42 bp, Arabidopsis thaliana landsberg
atgaccagcctgcacgactggaaaaccaagtggctgaccttg

SEQ ID NO: 178162 - DNA, 1056 bp, Arabidopsis thaliana landsberg
ataaaagttgcagatgtggactggataaagattgcatctggggatgagataagtataatggtatgtctagcaggcttatccctttctttagtattgtatagttccctccccgtgtgtttttggttccacatttccttctgtggtctctagtgtggtattctcatgcctaatttgaatgtggcaggaaggaagtacacactccattgatctcttgactggcattgacgatggaatgacctttgattcttcccaggtttaagacggatttcttgtagatacatgttcttgtttttcttggtctaacatgttttgaaattattcgttgtctatcaagttacagcctacaccaatgtaatatatcggattttttaatataaaaatgatcaatagaatgtaccacaaagtatcttaattactaattttcttattagctgatcatacaagttcttgatttctgaactttcgatcaatgcagtactcacttatggacattatggtgcatattgaggatgatctcgtgaagcatgtcactgttgatgaggattcactttctgttggtgaacacgtggcaacttcctcttttaaaattgctgctagacgactgggaatcacaaccctatatgtgagtttacttcttgactttttcgttgctgttattattttgctctagagctaggacatttaggtagatctgaagcaaatttgattttaataggtcagcgcaagacaacaatcaggaggtaaagtgctaagccaaactattaaagtcgaagtttattccccaccaagacttcacccacaaggaatatttcttgttcctggtgcttcctatgtggtatgatagaaataaatatctttctcttttaatctcgcatcactctctagttcacataacgattgttcttctctgatcagcatatttttgttttcttcttatagctcactattgaaggaggcccgaccatgaatgtttctgttgactacaccactgtggataacgaagttgcaaagatcgaaaaatcaggacgcctatatgcaacatctcccggcaacacg

SEQ ID NO: 178163 - DNA, 1152 bp, Arabidopsis thaliana landsberg
atggcgggagtggcttgccagatatctatcagctcatcttcgaccttgagggtgagtctctatggcgattagcttttccttcgctgaatcgttatgttttagttctggatttttgatcttgcagagggttaatcaatggccacggtgcttctctggttcgccggagaagaaaacaccagctgttttgaagtgggcggttagtggagttactgaatttctccggttgatgtccggtgctccgtcttcaacctccatcgctacaaataaggatcggtaatctcgaaaagctttgaattaaggtttcttattctcctctgttcgtcgttagtctggtggtggagatcgatttgaatactggctgcagatcaaagaatgaggttactgctggagatgtcgatgatgtgatggggattttgagatcagattatcgaaatttctacttcgtcactggtatatgactctcgctgttcgtctgcattgattcagttcaacatagctaaactcatgaatcttttccatttcacatacactaactgaaaccaggagtcttgacttctgcaatttactcggatgattgcatcttcgaggatccgactatcagcttccagggtaaggagttacagaatcctctttctcagtttcttattctataggtctatctgaatctaggacaatgtaatcttcatgctcgctggtttttgtttgtcaagcttgtagattgatcagatcatcagctataagatcctgaatgttgatgtgagtagaagtagtctcctttgtgtcttcaattctgcaggtacagagctgtatgaacgcaacttgaagttactggttccgttcctcgaagatgcatccattgaactgcaaaatatggagaaggtatataacctttgtgagatcctagtcccagatgatttatggtctcaatgttcttgtaatccattttgaaacgcaattgcagagtgagtcgtcccaaagaaactatatactagcgacgtggaagctaaggtattctgatgaaacttataaacttcttgagaaagtgtagcgacttttgcatcttcttaatgtttgtttcttgatcaatgtcagaacttacctgaagctgccatggagaccattgatatcgatcaatgggaatacggtttatga

SEQ ID NO: 178164 - DNA, 109 bp, Arabidopsis thaliana landsberg
atggagttcgcctcccgcagtcgacccaccaccacagcagccgacgacgaagaaaacgactgtcttcgccgcttccccgaccatccgccgtcgcagccgcagggacacg

SEQ ID NO: 178165 - DNA, 165 bp, Arabidopsis thaliana landsberg
gattcgatagctaacctggagaatgtgagtctacgaagtgagggacgagttgaagaagatgatccattcccgaaagcaattccggctgattttccgatcttcgaagcagaagttgccgctgatgaacgaccaaagagtatcttcccggaggatgacgatgcctga

SEQ ID NO: 178166 - DNA, 321 bp, Arabidopsis thaliana landsberg
gactcatcttgctgctggagactatttggaacacgtggttgaatcttctggtccgaagctagggtttcacggtggatctaccggagctttgtcacttggggttaacgtcaataacaatactaatcaccggaatgataatgataatcattaccgaggcaataacaatggtgagagaatcaacaacaacaacatcaatgacaacgagaagacagattctgagaaggagaaggctgttgtggctgtggaaacatcagattgttctaataagaagattgctgatacgtttggtcaaaggacttcgatttacagaggtgttactcg

SEQ ID NO: 178167 - DNA, 702 bp, Arabidopsis thaliana landsberg
atggctggtccaagtcggagaagaagaagattacatctaagcaagatctattcctacacttgtggtaaatcaagtttccaagaagatcactctaatataggaggacccggtttctctcgtgtcgtttattgtaacgaaccgggttctccggcagctgaacgtcggaactacgccggaaattacgtccggtcaacaaaatacaccgttgcttctttcttccctaaatctctcttcgagcagttccgtcgtgtcgctaacttttactttcttgtcaccggaatcttatcgttgactgatctctctccttatggagccgttagtgctctcttgcctcttgctctcgtcatctccgccacaatggttaaagaaggtatcgaagattggcgccggaaacaacaggtccgatcttaaatactcaatctttaaatattctccgatcttgaaaaataaaaataaaatctttagttcaaaaaagatttatgtaaagtattaaaccctagaatcaaaatttgttttttaaaactattttgggaaactttttttcaggatattgaggtgaataacagaaaagtgaaagtacacgacggaaatggaatattccggcaagaagaatggaggaatctaagagtaggagacatactaagagttgaaaaagacgagttttttccggcggatcttttgctattgtcatcaagctactaa

SEQ ID NO: 178168 - DNA, 495 bp, Arabidopsis thaliana landsberg
atgcaaccgttacccggtgcaccacaagccaatcaaggtacaatgctggcgtcaacattaccctcctacggcgtatgctgtctaatcattctgttaattccatgtgcgattcattaattattacaaacggacattgtcgttctttacttgtcttatgttgtgctgcatgtggtttacatattgatgcttactatagttcgtatcattaaagtttaatttacaatcattattatttctttgtcaacgtacgtatatatccgacaatctcaaccttttcaagaatataatgctaaatatcgtttaatgttatgattttgacatttcgtagaatgatggatgattgaatcatgaaggttcaaggaccctttaacttgatcttcagattatcattatcttcaatcatccatgtttggatttcggaaaacatgtgtcaatgaagcccctaaagccttttcattggaacttgcgtccacaaaactgatcaaagatagatga

SEQ ID NO: 178169 - DNA, 538 bp, Arabidopsis thaliana landsberg
atggatccatattggcggtctagaagttatgttatcgagccacttagagaacgccgaaaagtgagcaacaaagttttctcgcgactcagccatgcatctggttgttgcggctactgcagaagtcgagggaagaaagatgggttatgttgttcaattggttgttagttgtagatcatgtggatcttagatagtggtcgtggaggacgggtttagaggaattgattgaaccatcaacttcaggattcgccacaatttatctccattagtccggattgaagggttcttgctcgctggggttagaaatgctcatgtctagaagagaggggatagatctggtttgtcaggttgtgctgatgtatttgagggttaagcattttgggagatttatagcggtcaggtggctcgctgaaaagggtagatggtggaaaccgatttcttccctcgatattttcaacttatctttattaatttaaagccatggatcttgaatccgccagaactggtgcttccgactctcttccaccgggaaacaacatga

SEQ ID NO: 178170 - DNA, 77 bp, Arabidopsis thaliana landsberg
aaaattctaacggaaagttaactctgttaacggaaatttcacggcgtgtccgaaatgacctagtcaacaaaacttga

SEQ ID NO: 178171 - DNA, 100 bp, Arabidopsis thaliana landsberg
cgacgacgggaccagttgcttgaattgaagaaaacgccgttcaccgacttccgtttattagccgaatcttactatctcgccgttacctacttcgtttcag

SEQ ID NO: 178172 - DNA, 1626 bp, Arabidopsis thaliana landsberg
atggggaagttgcgggctgcgaaagggctattcgataaagtgaagccacctcaaaatagtctctcgaagttgtttgtaaactcggatccatataaagaggttaagcatcctctgagatttgagactttgagtaacagtaattccagtatgtctactggagaatcctgtagtgatgcaggtgatcaacacagcctatttggtaagatgctgtctgatcctgtccaggaaattaaaagtatccccaacgaaaatgatgagcacaggttgtcggatgctcctcaaaatcccagctctttgacatccgttctattaagggattggattgatgaacagaagagtgaagacctggctgctattagagaaaggaaaagtatattttcgcttgaaagttctagaaaaactgttgcacctatggcagtgggtactatgaagaagttgatggactcccttaactttccaactgacaatggcacagatgcagaagccaactcgttgaattctaatagtagagaagagaaatggatatccgaaggcaattctgcaatgcaaaacagtgatcgtttttgtgcgatagaggaagaagatccccaaggggaaaattttgtaatggaaacccaatcattgtgcagtcaggacactttggacgctaccaccgtgaatcctaaggtaacaaaaaagagtttcttggcattatatgctggagaacactctcctaacaaagtactgctaaggtttttgccagaatcatctatgaagaaacacattgttaaagcgttttcttctcagtttggagccgttttgcatgtacaagaaattccctctattgaagggtgcatttacaaagatgctctcttaacttttgaggttagtattttgaattttgaattctccatctcgagaaacaagtcacactgccttcttgttaaactttcttcttaaaaagtgttttcctgctcacctgctatttgcttccatatttgtagactaacactgcagtcaagaaagctctcaagaaaggccatgtgacggtgatgaattacaatacagttgtcgaggcaacttctcaggaagacatggtagaaaggatttgcattccggatctcattggcgatccagatgtgcctgttgcattggtgaaggaaccagtccgaacagttaagattcatccactgacgcacgattttagttcaaatcagatcaaagaagcgctaaagttctgtaggagcaacatatctaagtttatcttgggttcatcgagaacagatgctttcgtggagtttgaggtgtggttttattgtagcttttcttgttttatcctcaaaatccaatgccagatacagtaaagataaatcttgtacttgtgttgcagacggaagacggcaaagagagagcacttgcggagcattcaatcagcatatgcaacacacaattgtttatctcgaggattgatataccgaggacaatcgtggcaaggatttcaaacttgtcgaaatcagcaatgagagatgtacgagcattgtgtgtaccttatggacagatcagacgggtgtatatcaggggaactggtgttgcggatgtgtttttcgatatctctgagtggccaaacatgctcgccattctcaacag

SEQ ID NO: 178173 - DNA, 673 bp, Arabidopsis thaliana landsberg
atgtttgttgcgttagatgctaagaataagatcgcttttgttgatggaactttaccaagacctcctgagtttgatccgagctttagagtttggtcacgatgcaatagtatggtcaagtcttggatcttgaattctgttacaaagcaaatttacaagagtattcttcgattcaatgatgctacggaaatttggaaagacttggatactcgatttcatatcacaaacttaccaagatcttatcagttgacacagcagatttggagtttacaacaaggcaatatgagtttatctgattactatactactttgaagactctttgggatgatttggatggagctagttgtgttaacacttgtcgaaactgcaaatgttgttctgctactgcttctgtaaatgagcattccaagattgttaagtttcttgcaggtttgaatgatttttactcaaccattcggagtcagataatcatgaaaaagacaataccagaccttgctgagatttacaatcttctggatcaagatcacagtcagcgcaacattgttactaatccaacgaatgcttctgcctttaatgtctccattttgtcgaatgatcagattgctgtcaatgctactcgttcttttcaaccaaattcaaaaccaaaagttcagtgttcacattgtggatacactg

SEQ ID NO: 178174 - DNA, 154 bp, Arabidopsis thaliana landsberg
atgaatgccatgcgccgcgtcgggcgccggctggcaccgccgaccgcgaaggacagcgacgggcgcgacgtgtggccgtcgcgcgccggcttcgtgctggcgagcatgtcgggctgcgcaggcatgggcaatctcttgcgctatccgtccgtcg

SEQ ID NO: 178175 - DNA, 1612 bp, Arabidopsis thaliana landsberg
atggctaacccagacgttaaagagattctctgcgattgtgtgataaacttggtaagaatttttcattttgttttttcttttccgttaaaattcaatccattgctggagatgatttgattgaatttcagagagagaatccgaagaggcgaagggagacggtttacgtcggatgtggtgctggattcggcggcgataggccactggcggctctcaaactgcttcagagagttgaagagcttaactatcttgtccttgagtgcttagccgaacgaactttggctgatcgatggctttctatggcatctggcggtctcggctacgaccctcgtggtatgtttttggactttggaggttgctaaaattacttttagggatgctttgtaacttcaaaatctgtttttcttcagtttcagagtggatgcagttgttgctacctttggctgtggagagaggcacttgtataatcactaacatgggtgcaagtaagtgcttacaatatataatggaggaggccttttttctctctgtttttcttttcatctgaattatcgtgtttttttccttgtagttgatccctctggggctcagaagaaagttctcgaggtagccggtgaattaggtctcaccatttccgtggctgtggctcatgaggtgcattttgaaacaggtaatggaacctactttcatccctgggagatattgtcagtgttatgggtatttaacactgtctgaagccataataagtgtgattaacccttgtctttcaatctttttaaggctcgggatcatcttttggcggtcaatattgctctgcaggggtatgattctggttttctaactcctgatcatatgtgtcaaatgtgatattatcagctagtgacaattattttgatagagtagaagatatgtagaacatagttatgtgtactgtgaaggactctgggttatatgttatatataaagagttttccatggattatttagctcctccatgtgatttgtgtggtttccctgaacttttatcctcctttgttgaagggtactagcacttatcttggagcagctcctattgttgaatgcctggagaagtaccaaccaaacgtgataattacttcaagagtggctgatgccgccttatttttagcaccaatggtgaggcgttcttgtcgtttcctgtttcgtgattaaatctgatcattcttgttgtgtcatcaggtctatgaactaggttggaattggaatgacttggagctgctagctcagggaactctcgctggccaccttctggagtgcggttgccagctcactggtggatacttcatgcatccaggtgcgttttacgcttattggctcagggaagatatgatgaactactgttttccattatcagtatggtcatttcgttcctcaatgttctttaggtgatcagtatagagacatggctttccctcttctccaggatttgtcacttccttatgcagagattggctatgatggtaaagtatgtgtatcaaaggttgaaggtagtggtggaattttaaataccagtacttgcgccgagcaacttctgtatgaaattgctgaccctagtgcctacattacacctgatgtg

SEQ ID NO: 178176 - DNA, 387 bp, Arabidopsis thaliana landsberg
cccgaaggtgtcccggcgcccgttcgtcggcggcgcggcggcggtggccggcgcggccggactggccggcgtcctgccggagcgcctggcggaggccgccacggagagcccgaaggccttccacctttcccaggtcaagcacatcgtgatcctgatgcaggagaaccgaagcttcgaccactactttggcaccttgcccggggcccgcgggttcaaggacccgacggtggccattcagtcgaacgggcggactgtgttacagcaggatgacccggcgaaccccgacgggtacctggagccgtgggacatgttcaccgtcaccagtggcgccgcggcggaccccgcagttgtccacgactggcgcgaccagcacgcccgctggaactg

SEQ ID NO: 178177 - DNA, 138 bp, Arabidopsis thaliana landsberg
caacttgggcttggtaatgggccaatacagcttctagcgggttacaaaaaaagggaagcagaagccccggcaagacttagtcggagagaagatcggaaactgaacgggacgagtaattactctttacacttcaagtaa

SEQ ID NO: 178178 - DNA, 416 bp, Arabidopsis thaliana landsberg
tgactgctgattcgactatcctggcaactggtagctatgatacgactgtgatggtgtgggacattctccgcatgagaacacctgaaaagagggttagaaatacccacgcagaagttctgcggaaagatatcgtcatagccgatgctccttctcatattctttgtggccatgatgatataataacctgtctatatgtcagcactgatcttgatatagtcatcagtgggtcaaaagatggaacctgtgtattccacacattgcgggaagggatatacataagatctttaaaacatccttcgggcactgcaatctcaaagcttgctgcatcgcaccatggacggattgttctatacggtgatgatgatcttagtctgcacctctacttcataaacggaaaacatttggccagctcatag

SEQ ID NO: 178179 - DNA, 220 bp, Arabidopsis thaliana landsberg
gacccgctcggccgcacgccggggtcgcgacaccaatgtcttcggctcgcaatatgcgatgcggatctggctcgatcccaacaagctcaacgcctatcagctcatcccctcggacgtggtccaggcgatccagacccagaataccgaggtcgcggggtgctacttgggcaggcacctccggggcggcaacaagattctgaacgctgtcgtcaccgcccag

SEQ ID NO: 178180 - DNA, 225 bp, Arabidopsis thaliana landsberg
gggcttttgaatctccgtacatcggagaagcccgaacttctgctcgataacgtggatccattcaccgcttccagaggatcttccgccttgacaaacaacggagggcgtgtctcagagaaatccaaatacgatgtttcacgggtccttgctgatacgctcgcccgccttgttgctgtaattgttgacccgccatctcccgcagaaagcgagtgttgtcggccgtag

SEQ ID NO: 178181 - DNA, 241 bp, Arabidopsis thaliana landsberg
atgatttctatcgagtacttgcttgacatcaacaacatctctgtcaatgaggtgatcggtaggttgcgcatcgtcgagtagcgacgcatggtgacacacgtccatgataactaggatctattgcttctatgttattaagacggtctcaccaagctcaagcttcacaagtctgagaggggcgacatgagtagatccactagcaccatcagcaagaaacaaatgaacgtgggcaaggccacag

SEQ ID NO: 178182 - DNA, 154 bp, Arabidopsis thaliana landsberg
cgtaattgtgaaggaatcggccgatcgcgtttatgagttgaggaagaaaaggagaggaatcagcataaggtgctctctggaggaagaagaagaagaagaagaagaagaagaagagagagagagagaaataaagagacgattaaagagtgattaa

SEQ ID NO: 178183 - DNA, 1042 bp, Arabidopsis thaliana landsberg
atattgtgcaggaagacagagtagcagttctaagactcgagaagccagccaaacagaaaccttgcaaaaggtggttgacgccaaagaaattaagggggatgcaaggtttgtttaactgcctttttccactttcaaatttgggaatagcattcaaagtggatgaagaatagtggaactgacttgtgagtatacactttctctgtttcaaacaggttttctttgacaaagcattctgactggttaaaatctcaagaacctgagccatctgaaagcctatacgagtcaaggttggttaactgtcctttttccagtttcaaattttggactaacatctaaagcctgtgaagactattggaaatgactagtgattttgcactctttgtttcaagcaggttccctttgagaaggcgttctgcccggttaaaatctcaagaacctgagccatctgaaagcttccatgactcaatagagacaaccaagaggaggaggtcggcaataaggttaggctctgtttataactactgtacccttctgaaggttgatatagtgcgatatgatcttttgcaggtctgctatgtttaatatccaagagctgggcgttattcaaaacttgaacggtttacctgatgatcaagagattgctgcaaaggccaggtttgtagaagcacatgttatttccttttccactaacatatccctgaaccaagtacacttatgccatttgcggtgttttctttttctttctttgtggatgtcatttcagatgctctgcacgtgaacagtctaccgggtctaaacccgaagcagtagaaccacatgacacaaaagagataatcgggaaaagcaggttttgtagtgatagataattgtctgtattctgcagtattacagactaaagtgttaagactgttatctaatgcgattttattttccgcaggatatctttgagaagacagtctgcgaggtttaatttccaagagctgggcgtgactgaaaacttgaatggtccacatgatgatcaaacgattgctgcaaatgccag

SEQ ID NO: 178184 - DNA, 327 bp, Arabidopsis thaliana landsberg
atgcagcgcctgaaccacatcctgaaaaatctgctttccaatgcctttaagttcactgaaaaaggtggcgtgcagctgaagatctacgaagccaacatgaactggatgctttacaatcccagtcttgacgctgccaagaatgtcgtggcatttgagattaaagattcgggcattggtatctcccgcgacaaacaaaacatcatcttcgaagcctttcaacaggctgaaggttctacctcccgcatatatggtggcaccggccttggcctttccatcagccgtggccttgccgacctgctgggcggttccattgagcttgaaagtgaa

SEQ ID NO: 178185 - DNA, 378 bp, Arabidopsis thaliana landsberg
atggggatcgaaggaccagaagagactgggccagctacccaagggccgggtcttttacacgacggtgtagccaaggtgatgttccggttatatgcctttgtggttataactcgggtgttcacggtgtgtggaggaaggcagtgcatcaggcgctagtaaaactttaagaaaacattatatgtcttgattgttttatgtgttgtttactaccttctctgcgtagtctgattgtttatgttatgtttgtggggattatgggtggggttagactaacatttccttgggaacccaaactcattgagtaaagctagattactcatgattctacttgttttgcaggtaaccttagaggcgattagagggagcggtgaacgctag

SEQ ID NO: 178186 - DNA, 226 bp, Arabidopsis thaliana landsberg
atggcggtccgggccgtgctcggtcagcaggtgtcgacctcggcggcgcggaccctggccgcccggctcgtccgggcccacggtgacccgatcaccgacccgcacggggagctcacccacctgttccccaccccggcggcgttgtcgcgtctggatcctgagcagctggccatgcccaggacccggcgaaccaccctgctcgccctggtcgcggccctcgcctccg

SEQ ID NO: 178187 - DNA, 175 bp, Arabidopsis thaliana landsberg
atcttgccctccacatgcctccaaactcatccacgccaaaaacctcctcacaccccaatcgagacgtaataacatcacggtatcaagcagcaacaaaaaagatgacaagagatcaaatctaagcgactccggtgctgtggaagctaccagagccaaaagcggcggccaaacctag

SEQ ID NO: 178188 - DNA, 142 bp, Arabidopsis thaliana landsberg
atggtgcattcgatacgggtagtagctgcggctgtcctttctggtactggtcaaaatagcggtataacggcagcctctggggatatggatttaagctttatgtcgggcagcataggtcctctagtagccgaaggaacagcag

SEQ ID NO: 178189 - DNA, 110 bp, Arabidopsis thaliana landsberg
gatcttcaagaatcaacttcgggatcttccttaatctacaagcttatcccttttccatatttgacgagaaggaaattcaccatatcttctcgaccgacattcgtctttga

SEQ ID NO: 178190 - DNA, 1581 bp, Arabidopsis thaliana landsberg
atgcccatcattactcctgcttatccttgtatgaactctagttacaatgtctctgaaagtacattgcggattatgaaaggagagtttcagagaggaaacgaaatatgtgaggtaagatttcgataagtccaaatagttggcttctatgcagattcatggacttattacaacggcttgatgtcttgcaggctatggaatcaaacaaagctgactgggataccctttttgagccatttgcattctttgaagcgtataaaaactatctacagatagacatttctgctgcaaatgtcgatgatctaagaaaatggaaaggctgggttgagtcacgcctccgccagctcacactgaaggtgaaaagccatgtttactttaacttgaatagtttctcttgattttgctttgctaatgatttgtcttggatgtttgcattgtaatcttagatcgagagacattttaaaatgcttcattggcaccctcatccccatgattttcaagacacatcccggccactccattgctcttacttcatgggtctgcaacgtaaacaaggagtttcatgcagcagaaggcgagcaatttgatatcataagaaccgttgaggagtttaaacacactgtcaacgcttacacattgtggattccaaggatggagattattgttggccatataaaacggagaagcttacctaattttgtgttctctggcggagttaaaccttcacatacctctaaaggaacatgggacagcaatcgccgttcagagcacagaaattcttctacatcaagtgcaccagctgctactaccactactaccgaaatgagttctgaaagtaaagctggttctaacagtccagttgatgggaagaagagaaaatggggagatagtgaaacactcaccgatcagccaaggaactctaaacacattgctgtttcagtgcctgtagagaattgtgaaggcgggagtccaaatccatctgttggatcaatttgttcaagtcctatgaaagattattgtacaaacggtaaatctgagcctattagtaaggatccaccagaaaatgttgttgctttcagtaaggatccaccagagagtcttccgatagaaaagatagccactcctcaagctcatgaaactgaggagcttgaagaaagttttgattttggaaaccaagtgattgagcagatatctcataaagttgcagtcctgtctgctactgcaactatacctccattcgaagctacttcaaatggctctcctttcccttatgaagcagtggaagaacttgaggtttcttatttttcttatcaattttcgatacataaattgttctcttgatcttattcctcctgtctgatttctcttttgttgaaaggttcttcccacgcgacagcccgatgcggcacatagaccttcagtacaacagcgaaaaccgataatcaagtaagtgattttgtgtctatgtttactcttaacgtttgaatatacatttttggattttgacaaagattgtttgtttttgtttgtctgattattcgcagattgagcttcacgtctctaggcaaaaccaatggcaagtaa

SEQ ID NO: 178191 - DNA, 716 bp, Arabidopsis thaliana landsberg
gcctcaccaaatccctccaatcgatatccaattagcaaagaactgccctccaacttctacatctcccctaagtaatctccaagatgtcaaaatcgaaaacagagatgcagaagacagtgcaggttcatcaacatcgcgtgcttcttgcaaaggtaaagtaaagccttttatcatcatcatcatttctgcatattgccaaatctcaatatccatcaccattgatctcatctgtctcgtgtttcacagtgaatcctatttgcgagacgcgttttcggcttcctacacacaaccaagaaccatccagacaagtggccttggacgattcggatagtagctctaaaaacatgacaaatttttgggcacacttaacctgccaagatacagcttctccaacaattctccaacataagctcgtgagtataaaggcaacgtacagagaagacatcatcaggttcaagatctcaccagagtcggtaagcattacggaacttaagcagcaagtggccaaaaggctgaagctcgaaacggcagcctttgagctcaagtatctagacgacgatagagaatgggtctccgtctcatgcgatgctgacctcagcgaatgcctcgacacgtctgcagcaaaagcgaacacactgaggctctcagtacatgacgtgacttttaactttgggagctcatgcgaaagctcagaggaaactatgatgtgcttgtga

SEQ ID NO: 178192 - DNA, 903 bp, Arabidopsis thaliana landsberg
atggcttttgcttggtgcgtacgcaggtcagcatctaagttggcttccgcatgtggtcaagcccggtctatctccgccgttgtgaaccgtccgtctcttgctctcaacccgtctccgctgagtcctttcgtctctcgtggctttctttacacgatggctgttgataagctgagctctgagcaaacccttcaccttgtgattgactccgagctcaattctgctttgcaaaccgatgatcccaatttggtaaaactttcacatctttgctcaaaatttcattcctaacaaaacataaattagtatcgtttagctttactttgcgaataagtttctgataatattcttacgagactgtttttttttttttgttctgacattctattggggtttgtttgggggcagaatgaagagatggctccaggaagcttccctttgaaaattagagacaagcctggagatcagagtgtaacattgacagcatattacaatgacgaacgtattcatgttgatgtaggaatgccttatcttggtgatgatgtcattgatgtgtttggtcctaataatgatgaactaagttttccactagttgtgactgttatcaagaagaacggagtcagcatagagtttacctgccaggcttatgctgattatattgacttaacagatttaactgtgcatgattatcagtatcaaatgggagaaactgactggcctcgtttcaagtaagctctttgaattcaataattaatattttttagagatgggcatgagcatagacgtttattggtgtgtgtttccatcgcattttgtagaaacttggacgataatctgaagaaggcgttccacaggtatctggcgaccagacttgacgcaaacataacgaaactcttgcataagtacatg

SEQ ID NO: 178193 - DNA, 362 bp, Arabidopsis thaliana landsberg
atgaagcgaattagggatgatatttacgcaaccgggtctcaatttaaacgtcctttgggctcttctcgtggcgaatcgtgagtttcccttttcgtcagacttcgaaaatttaaaatttctggcgatgagacattatagcttgtttgcatgaaagttactaagtgattagagtttgtttggtgcagatatgagcaatctccaatcactggaggagggagcattggtgaagggggaatcaacactcagaaattgactaccgatgatgctttgacctacttaaaggaagtaaaggagatgtttcatgatcagcgagacaaatatgatatgtttctcgagattatgagcgacttcaaggcacaaag

SEQ ID NO: 178194 - DNA, 174 bp, Arabidopsis thaliana landsberg
atgcggacttgccgttttgagaatccgccattcaagatggtaagaaaagaagcagaaaggtctcccttttattttcctgaagtcaatcagtaaccgccatttatgcagatctacaggagatggagaaattcggatctggaaggaagacgatttatccggtcagaatctatctga

SEQ ID NO: 178195 - DNA, 140 bp, Arabidopsis thaliana landsberg
aaagccagcggttttggggaaccgaactaataaagcaacgaagcaccctaagcgacgatcatggctcccatatatgtatggatatacataaagacattaaaggagacttcacgaaagagcttacggtggaggatgactaa

SEQ ID NO: 178196 - DNA, 208 bp, Arabidopsis thaliana landsberg
atggaagtcttctccaacacccaacttatcttcctcactatcctcatgttcctcggtggcgaaatcttaacctcatttcacaccctctacgtatcctatttcaccaagttcgtcttccctcataacaaaattagacatattttgggatcttataattcgaacagttccatcaaggatcgctgtcacgttgagactgtttctaataatc

SEQ ID NO: 178197 - DNA, 410 bp, Arabidopsis thaliana landsberg
atgggtggatattttggagtttctacaatttttattatctgtttgttgggaatttcagccaatgctgaggtattcaccattggttcttcatcaggttctgatattactcaggttagttctctttcttgctttccaagaaatctacaaaaccattttttggccttaactcgttaattagggtttcacactgcactgatgatatgcaggcacttctgaaagcattcacatcggcatgccaatcttcgtcaccaagcaaagtggtgatcccaaaaggagagttcaagcttggtgagatcgagatgaggggtccatgcaaagctcccattgaggtcacccttcaaggtactgtcaaagctgacggtaacgctatccaagggaaggaaaaatgggtcgtcttcggcaaacattga

SEQ ID NO: 178198 - DNA, 544 bp, Arabidopsis thaliana landsberg
atgaacaaggacgaagtatttcttcggcaatggtttgagatactatactcgctcactaatccagaggcgaatagtgacttgcgtaggatcaacaacgaaaaaggtgtagagaaagtagggcaaaagaggtcagctgagtcgaggagagaaggaaagaagaagcgagttaagacacagtgcgtgattaaatcttcagacaaatctgatcatgataccttgttgaagaaggtaaccaataatagttgtattgttatgatacgtcttccccaagaaactcttgatttactcttttctcttctttggataccttagaagaaacggcgggaacgtataagaaggcaactagaaacacttaaggaaattacacccaactgcccacaggttcacaactgcttcctttgttaactgatttttttttcttgggaaatgttagttttgttaatgtttttttttttccgtataatcttacagtctgatatcaacgccatccttgattgcgttatcgagtacacgaacaacttgcgccttgcagttcttttcggag

SEQ ID NO: 178199 - DNA, 111 bp, Arabidopsis thaliana landsberg
atagtgctgctgagaaagctggactccagattgaagacgtggtgctgtctgtcaatggcactgaggtcaccagtgttgagcatgcagaagctgtgcaccttgcaaagaaag

SEQ ID NO: 178200 - DNA, 1172 bp, Arabidopsis thaliana landsberg
atggcgatcgggtttctctacgacccatcgaaacaattcatatgctaccaaaagagaaatttagcgagtatgaagaacatgggagagctaaagactcttgtgtgcatccatagaccagaccacatatcttccatgatcaaccttcttgaagcttcttatcaatccgaagacagtcctctcacttgctacgtccttcacctcgtcgagttacgaggtcaagacgttcccactttgatctcacacaaagttcagaaactcggagtcggggctggaaataaatattccgaaaatgtcatcctctcttttgaacatttccaccgttctgtctgcagttccatttccatagacacattcacttgcatcgcaaacgcaaaccatatgcaggatgacatttgttggctagctcttgataaagctgtcacgcttatcattcttccttttcaccggacttggtcacttgaccgaacatccatcgtatccgacgttgaggcgatccgatttctgaatgtcaacgtcttgaaacaagcaccttgctctgtcggcattcttatcgaacgccatctcgttaacaagaagcaagaaccacatgaaagccttaaggtatacttacaattacatctactatgcttccatgttggtcgttgtagatgctttagctatatatatagaaaaaataagcacactaagctatttgatgataggtgtgtgtaatattcgtgggaggaaaagacgatagggaagctttggcctttgcgaagcgaatggcccgtcaagagaacgtaacattaacagttctacgcctcctagcatcaggaaagagcaaagacgcgacaggatgggatcaaatgcttgacacggtggaactaagagagttgattaaaagcaacaatgccggaatggtaaaagaagaaacatcaacaatttatttggaacaagagatattggatggagcggatacgtcaatgcttctacgttccatggctttcgattacgatcttttcgtcgtgggaagaacatgcggcgagaaccacgaggcaaccaaaggtatagagaattggtgtgagtttgaggagcttggagtcattggtgatttcttggcctcgccggattttccgagcaaaacatcggtgttagtagtgcaacaacaacgaacggtagccaataataattag

SEQ ID NO: 178201 - DNA, 640 bp, Arabidopsis thaliana landsberg
atgccagtagacgatctgaccgagttcccagaacacatccggtaccaaggtcagctcatctacgaacatcgttcctcacaaacacggcctaaggcttttcaacctgtatcattttcgtaagttgtgttagtccggacaagactaatatcagaagtacacaaggattttaaaaaaattctcctttatttactaaaacattaaaacacttacaatggaatgggatcccgagcctaatgctcaaatcgagtcaatttacaaatctcattttacaaagacaacaaactctacaccggttccccaacgttcgtgctccccttaaggcctccccaactaaggttacctgtaagacaaaaagtagaatcttgagtaatctaatattactcagtgagttcgggtttctaacaaataacaaaaaaatctcaatcccaatccccaatcaaacaatcaatacgagtatactcgattgagtatactcgacaagaaatcacacaacacaaacaaacaagcaatgaatactctttacagagtatatgcagcggaaactactaaagctaaaactagcacgctaacgactcttcatcctacaggccctatactatacgatgctgatttcccacaaggcaatgtctccgaccgctag

SEQ ID NO: 178202 - DNA, 523 bp, Arabidopsis thaliana landsberg
atgaagattgcactcaaggtacacaaggcatgggagatcattgagacagttgaaactgatagcgagaagaatgaaatagctatgcacttgcttttccaatcaatacccgaggcgctggtcgtaaaaattggagagctatatatgagttatgacaaagaaggtttgtgaagcaataaaagcaaagcatgtaggagcaaacaaagtaaaagaagcgagactacaaagcttaatcattaagaattcgatcgcctcaagatgaaaaactccgagactattgatgccttctcagaaaaactctctgagataacgtcgaagtcagctgcattggggggaaatatcaaaacttatcaagacgtttctgaaaagcctcccgcgtaaaagatatatccacatcgtggcatctctcgagcaaattttagatcttaaaaccacaagttttgaagacatcgtcggacgtcttaaagtttatgaagaacgtgtatgcgataaagaagaaactcaagacaaccaaaaacaaactaag

SEQ ID NO: 178203 - DNA, 402 bp, Arabidopsis thaliana landsberg
ctttagttggccatacattatcgctgatgagtggggccgccaggtcggactcatcccgttcatggagtcgttgcagagcacggggaaacctgacgacaaccgcgcgatttccgctatcctcaaccactacaaccgtggcgatttcctctattctcgagcatataagatggccctcgtgcccctatttattccctggttatccaggtccatacccacaccgagaagcacccaccacaggccgccgcggagaaaatctggacgccgtcgtggtcgcgtgcctacgccgtcaatagggattcatcgacggggtcgggagcttcaccgcacttacaggattgtgctcggggactatgcgagcgtggagccgcactggtgctcgatgtcagagtaagcaccccaacg

SEQ ID NO: 178204 - DNA, 406 bp, Arabidopsis thaliana landsberg
atgcacaaagtgcttcgtggtgttttgttttcaaacaagcgcagctctattctgccggcagatcaaagctttagtaggtgagtggttaaattaatcttcctctttccggggttttcagttgtgtgcatcgttttgtgaacaagtgtatttgttgtatagaaagaggccagctatgtcgaacggggatcaggacaatagatcaaagatatcaagaactttgatcaaggatcaagctaatgctgtagaatccaaagattctcaattaaacggtatggaggctggtattgataccatcagcaaccctctgggtgttaacataaccacagtggcagtggcaccacacgaaacagaaacctctgttgttacttctgatgccaagaaccaagatgcaagtcaactcgatatg

SEQ ID NO: 178205 - DNA, 255 bp, Arabidopsis thaliana landsberg
actgactatattgaccgccgagcaaatcaacggcgtgaacgaaactccggtgaagctccggcgtccatctcagacgaggcaccggagatcgtacgtatggtcttactccaccaattactccgtcgttgcttcttccacacctacccattcgaaaaccctaattcttttgatcttgatttcttgaaagaaaaagaaaacgttttttttttttgccttctgtagaggaagaaagatgttgaagaagaagaacactaa

SEQ ID NO: 178206 - DNA, 330 bp, Arabidopsis thaliana landsberg
atgtggcagtcgctcggcgcccgggcgacagtgaaggaggcgtgggaggcggtgaagttaatgaggctcggcgccgatcgggtgaaggaggtgaacgcccagaagatgctccaagagttcgagaacatcaagttcaaggacggagaatcggtcaaagatttcgggatgcgaatcaccaacctcgtcggtaaccttcgagcacttggcgaggtcgtggaagaagtccgcgtcgtcaagaagttcctgcgggtggttccggcgcgcttcacccaggtagttgtcacgattgaaatgttctgtgatctcaagcagctctcggtggacgaactg

SEQ ID NO: 178207 - DNA, 206 bp, Arabidopsis thaliana landsberg
atggcgatcttcccgtgggccaaagagagcggtcgcacgatccgcatcgcatcgaaccagatgctccaagagggcggctatccgatcgcgatcgtccactcgatcgatcgccagcgttactacgaagcgctgcccggtgatcacatggcgctgaaaacgctgaacctcgaggccgtgcaaacgaccgccgagaccgagcttcgcgt

SEQ ID NO: 178208 - DNA, 158 bp, Arabidopsis thaliana landsberg
tgggttgtacaagaacgaaccgtggaagttattatcaagcagcggcaagtactcaagcactgatggtagaccaggcacaaaggaagacaggttcccattcacctggttgttcgatagatcaagaaaaagaagaaacgttaagttaccccaacaataag

SEQ ID NO: 178209 - DNA, 1612 bp, Arabidopsis thaliana landsberg
atggcggcttcttcttcttctggcagacggagatacgacgtttttccaagcttcagtggggttgatgttcgcaagacgttcctcagccatcttctcaaggctctcgacggcaaatcaatcaatacattcatcgatcatggaatcgagagaagccgcacaatcgcccctgagcttatatcggcgattagagaagctaggatctcaatcgtcatcttctctaagaactatgcttcttcaacgtggtgcttaaatgaattggttgagatccacaagtgctttaatgatttaggtcaaatggtgattccagttttctacgacgttgatccttcggaagttagaaaacagaccggcgaatttggaaagggtctttgaaaagacatgcgaggtcagcaaggacaaacaaccaggggatcagaaacaaagatgggtgcaagctctcacagatatagcaaatatagccggagaggatcttctgaacgggtacgttgttatgattccaatatatctgcttgcgttttcaattgtctcagaactatatttttgcatagacttcggttcttcttttaggggtgcttcttaattgacaaaattgacttttgttattaggcctaatgaagcgcatatggttgaaaagatatccaatgatgtttcgaataaacttatcactcggtcaaagtgttttgatgacttcgtcggaattgaagctcatattgaggcaataaaatcagtattgtgcttggaatccaaggaagctagaatggtcgggatttggggacagtcagggattggtaagagtaccatcggaagagctcttttcagtcaactctctagccagttccaccatcgcgctttcctaacttataaaagcaccagtggtagtgacgtctctggcatgaagttgagttggcaaaaagagcttctctcggaaatcttaggtcaaaaggacataaagatagagcattttggtgtggtggagcaaaggttaaatcacaagaaagttcttatccttcttgatgatgtggataatctagagtttcttaagaccttggtgggaaaagctgaatggtttggatctggaagcagaataattgtgatcactcaagataggcaacttctcaaggctcatgagattgaccttgtatatgaggtgaagctgccatctcaaggtcttgctcttaagatgatatcccaatatgcttttgggaaagactctccacctgatgattttaaggaactagcatttgaagttgccgagcttgtcggtagtcttcctttgggtctcagtgtcttgggttcatctctaaaaggaagggacaaagatgagtgggtgaagatgatgcctaggcttcgaaatgactcagatgataaaattgaggaaacactaagagtctgctacgataggttaaataaaaaaaatagagagttatttaagtgcattgcatgttttttcaatggttttaaagtcagttacgtcaaagaactacttgaagatgatgttgggcttaccatgttggctgagaagtccctcatacgtattacaccggatggatatatagagatgcacaatttgctagagaaattgggtagagaaattgatcgtgcaaagtattga

SEQ ID NO: 178210 - DNA, 474 bp, Arabidopsis thaliana landsberg
  unsure (1)..(474): unsure at all n locations
atgaagtcaatggcgctttccgggcgggattccctgatctctgtcggtaagtcgccgaccaccggtaaagggcttatttattattccgacccggcagacccctggatgaatattgccgaagcggagcaatggctcaatgatgtagcggtacgtaatgacagcattgcctatatcgtaggcgacagcggcctgatcctcagcaacgatcgtacagaacttgcgcttgccgaaaaattcnnnnnnnnnnnnnnnnnnnnnnnnnnnnnnnnnccttcggacggccattttactacagcactgcccgttgcgcaccgggtattggtgtacagcccggacggaaaggtcgtgtaccgtgaccaggacctggataccaggcatcaggccgacctttcggcattgcccaaagggaactatatcctggaggccatttcggcggaaggagacaaggtgtccgccacgctgcaactgaaataa

SEQ ID NO: 178211 - DNA, 192 bp, Arabidopsis thaliana landsberg
agttgtctcgcatgctctgcctgcgctgtgccttacaccgcggcaccgcactcgactgctggctcgggctcggactatgctgcgtctgatgtggagcacttgtgggaccagctactgaccatggacgcgcagatcctggtgctgtacaagcggatggcgtactttcggacctgggtgctcaccattcattaa

SEQ ID NO: 178212 - DNA, 59 bp, Arabidopsis thaliana landsberg
gagaagaacaggtggtcgaagaggagccacctaacactgaggcattcgacttgatctag

SEQ ID NO: 178213 - DNA, 360 bp, Arabidopsis thaliana landsberg
atgacggtaccaagcctgcggcgaaccctatttcccgagcacgaaacagataatactcagaggctactcgacgaacttgatctgatagatgaacgaagagattcagtgttggtgcgaatagagaattatcagaatgagacggctcggtattacaactcaaacgtctaacagcaaagatttcacgaaggggaccgagttctccgaaaagtctttcaaaacactgccgaaccgaatgctgggaagctcggggcgaattgggaaggaccatacctgatctcgaaggtagtccgacctggggtatatgaacttgccgacttaagcggcaaaccgttccaagatcttggaatgcaatgcacctaa

SEQ ID NO: 178214 - DNA, 717 bp, Arabidopsis thaliana landsberg
atggtatttggatatgcgtatcctgcttatgaatgttacaaagcggttgaaaagaataagcctgagatgcaacagcttcgattctggtgccaatactggtttgtgatgtttggctttttcatctgttcttatcttgagtttatgccttgagttttctcttgtaaagtttagctttcttcttgaaacttgttgcaggattttggtggctgctttgacaattttcgaaagagttggcgatgctcttgcttcatggttggtattattgatacaggaatgtacctttcaaatgaattgagatatattatgtagacttactttgtttgtgtcctgttgtcatgaagggttccactatactgtgaggcaaaactggcatttttcatatatctttggttccccaagaccagagtaagtaaactctagtagcagctaaaagagagttagttagtatctgtatatatgtgatccattggagttcgttctatctcactgcactttcctttctttccacagggaactacatacgtgtacgattcattctttcagccatatgttgcaaagcatgaaaatgaaatcgaccgcagcttgattgagctaaccaccaaacctggggatctggcagtgatatactgcagaaaagcagtgagctatggacaaacaagaatcgtagagatcctgcggtttgtagctctccagtctacaccaaaacctaagcctaag

SEQ ID NO: 178215 - DNA, 3276 bp, Arabidopsis thaliana landsberg
atgaacggatcggcacagtcagcatgtcacgtgggttatgggacatcttattgggcccattcttttgtttttcggtttaatgggcccacttttaatattggttcgtgagcttatcaatactcaaacatttttttttaggcatttcaagtgatacatctaacaaccaatcttaacgagtttcggatatttgagatgaactttctattctccaaagattttgtatttacgttagctcagctactactcttactctatagtctatgggctaacatgccatccgagccattaactttcaatcaaccgcttacaccttaatttaacaccgttacagtcgaacagtattttagattctagcataaaattcattagatactgtatgaattgaccaattatagtagcacatacatgaatttgtacggtagtataattcatgtctgaattgtaagagcagaacataatattgtatgaatgaaccgttttctctcaaatccaattgtaacataggacaatccctacatgttatggacctatatagtactaaatgaagatatgatgctgtatctaggaaataatagaacaagggggatgagattgcaaaaaacatgtctccgtgatttagattccaccatgggattcaaaacgaagaagctttgacagctcatctgatgtgtgatgtgaaggacacaacgttagccagcagcaacattccccaaatcgaaaaagtcttttactcctcccagcaatagtggcgcagctccggcgagatttgtgattcatgtcttctacttatagccccggtcaaagccccggaagctcccggttgctgcagctaggcgctgccggctctgcctcgcgtcttagatcttcttcctccaagaagccgcctgagccacttcgtcgagccgttgcggactgcctttcatcctctcctcctccggttaattcgcaccatggcgcgatcccttccatggctccctctgaagctctcaggaatctccgggtgtgtaacacttacgctatgcttgctttattttccttattgtgaaatgggattatctctcgtccatgtgtttccatttttgcgtttaattagaggtaaattgatcatcttctatgattgtgtaaagagaggaattgagtatctagggcttttgatttccattggtatatgaagagagcagtgtctacatttgcgctttctttgagtagtgttggcgtcgtgattgatttttagagctgaaaattttctattctatcagtactattagtttccatgttttagttttgtgaagacctttgtgctaatatcccacacattactccttttgttctagtagccattgcatttgaagcctcatgtggatagagagatatgtgatggagaagcccgttttcattatctattgtattaggaccttggtagttgacgggacatatttgatctccgtctttagggcattgcatgaactcacacaatcgcttgatgatcacaggattatctatcagcctctgccacgactgacctggcctacaacatgctgttagagcatactatagcagagagagatcgcaggtaattgatccgtacttcatatgtttttcatcatactgtgaagctttgactcttttttgaatcatagtttggactggctacatgtatttttggttctttggtaacacttgcaagtctgatagtgaaacctgtattaactatgaagaataataatcaaaggtatttgtagaatatatgataatctgaacagatgtcttaggtagaagtgtgtgcctgtgtggggaaggactcctagcagaaagcaaacaaagtcggaaaagtccctttatagatatatcatcagcccaggttgactattaaagtacttgagggcttattgctaggtggacatattgttgaatataacctgatttagctaggatgcagattgctataatctaaatatttctcaagtagcacggattaaatattagttgttgctaatgttcaatcaattttctgcagcccagctgtggttacgaggtgtgtggctctactgaaacggtatatcttaaggtaaaatttctaattgaaggatgtaacttaattgttttcatttacttctttgaactagcatctcttcacttgtcaatgtcctaagtacgtctgtctcacgataagcataattttgtgctctgtttgtggggaacgctaacataatggttgttcaaacctagagataaaatgtgcattttttctatattttgaggtttgtctgtaatatgtatacatgtcttccgatgttttccatggattacatcttacataataatgatcccaaggtgttcttacactacagatataagcctggcgaggagacacttctgcaggtcgataaattttgcgtgaacctgattgctgagtgcgatgctagcttgaagcaaaaatcattgcctgttttatcagcaccagcgggtgcttctcctttaccagtgtccagttttgcttctgcagctctggtgaaatcattgcattatgtgcgttcccttgtggctttacatatcccaaggcgatcctttcaacctgcagcatttgcaggagctactcttgcgtcaagacagttattgccatctctatcttctttgttgagcaaatcattcaattctcaattaagtccagcaaatgccgcagaatctccacagaaaaaggatgctgcaaatctgtctgtttcaaacttgtcaaatatacaagaaattaatgctatggaagacactgaatacatatcgtcagacttgctgaattggcgttgggttggggagctacagttatcatcagcttcttctgaaaggtacattgtacatgatttcggttcctacaaatgttcaaacgcatctttgcttcctttcttgactgtacactcctgtactttcgtaaacaaacactcattcaatacatatcttaagcaattccttcattgcatggctatagtacttgactatcggtgaacattttctctgcatgcttagcgaacgccctgttaatctccaagacatgaacaattgtaatcttctggaagttggtgctgctggcctgcttgtaggagatatggaagccaaaatgaagggtcagcactggaaatattttggtaccgcagagatgccttatttagaacaactgctgcagccagcttcagtcacgatgataacaaactcagcctcagctcgctcccacttgagagcaattacagcttccaaacgcaccagggctggccctcagcagatctg

SEQ ID NO: 178216 - DNA, 581 bp, Arabidopsis thaliana landsberg
atggctccaaaatcatgcgacggcgaggtaaatgatggatcttcgagcgacgtaaatgtgatggaaccaatggaaacatccaccggcgttggcctatcttttctggggaagcgcagggccgaaacccccaaccctggtgaaagcgagcaaatagctgacgaggacggagaagaatacgaatcagtcgaggacgttgttgtggaagacgatcgaatcagaggaggaaggtgacgaagagagtcacagggatgaggaggatagtgagccggaatggggttatgatagcttcgatggccgagagtatcattcctctgatcagatggggtattcggacaaggagtttgatgagaaatgtcgttattatagacgccaagtcatcctaacaaggtattctcgagtagaaaatgattcattcggattttcgtgtatgttgttgttaatcacgtatctttggtttgtttagggtttctttgagccgtcagaccgttttcctcccctctggggtggaattagttcgctctacgatcttgaagcgaacgctgggaaaggccttaccgtccgtgaattctgcgctaacttga

SEQ ID NO: 178217 - DNA, 375 bp, Arabidopsis thaliana landsberg
gtcgccgccgccatcgtccccaccgccttcgaggtcgccggcctgctcgggcccatcctcatcggcctggcctcggaccggctgttcggcgcccggcgcatgcccgcctgcgtgctcagcctgctggcgctggcggcgtgcctggcgctgttcaccccggtgctgctcagcggcaacctgtacctggtggtggggctgctattcctcatgggcgtcaccctctacggccccgactcgatgatcagcggcgccgccgccatcgacttcggcacccgccaggccgccggcaccgccaccggcttcgtcaacggctgcggttcggtgggggcgatcctcggcgggctgctgcccggcttcttcgacaccttctcgggg

SEQ ID NO: 178218 - DNA, 597 bp, Arabidopsis thaliana landsberg
atggagagttacctcaactcgaatttcgacgttcaggcgaagcattcgtcggaggaagtgctagaaaaatggcgggatctttgcagtgtcgtcaagaacccgaaacgtcggtttcgattcactgccaatctctccaaacgttacgaagctgctgccatgcgccgcaccaaccaggtcctccttctttttatgtctcttgatcagcacctaccttgtatagcaatctaacttctaaagccgtttacctaatattttccctcccaaattatttgaaaattttcaatgtatatataggagaaattaaggattgcagttctcgtgtcaaaagccgcatttcaatttatctctggtgagttattaatctgagaaaaaggaaacttcaaatcttaagttttgcatttctgtaagaaagtgttctgttcttgatttcaaaaaatgtgggttttttttttttaggtgtttctccaagtgactacaaggtgcctgaggaagttaaagcagcatgctttgacatttgtgcagacgagttaggatcaatagtggaaggtcatgatgtgaagaagctcaagttccatggtggtgttgatggtctttcaa

SEQ ID NO: 178219 - DNA, 494 bp, Arabidopsis thaliana landsberg
atggtcaaggcatatgaaaagatcaattatgtatcgggtaattttccatatcccgtaaccggttttggaggcagtatccaggcagtggatgatatggacggcaacggtgtgcgcgatgtgctgattgcccagggcgggtataccacctttgggatatcacgtggcgggatatggatcgcctatctcgactcgctggccaatgtcatcgatgcgaatatcattactgactccacaggtgtttatgccaatatgaatgccacttatgtttttggaggggtcatacggtttatgggatatgatacgctggggaatatgaagctattgacaagcggccgtgaagatgaaaggggaacggataggggggcggcttttattttaacaagcctgcatgtccttactcatgcattcacatcaactgagaaatattatgtcaacacccggaaagaaattgatggcggatattacctcacttataacgggaaattaacagtgcg

SEQ ID NO: 178220 - DNA, 1214 bp, Arabidopsis thaliana landsberg
atgaatggcataaagctgagcagccaagttgttgatagcctttatgcacttgttaagactccatctctgtcaaaacttttggttggcagcagtggaataggaacggtaatgatatgtttagcattcaaaattgaattcttatattgtgataaatacatctttttttatctgacgatactatacaaattattctaggacggggctataaaagttactgaatctctatgttatcagaaggaagaaactgtgaagctcgacctttcatgttgtggactagcgtcctctttctttattaagctcaaccaagatgttactctaacttctagcattcttgagtttaatgttggaggaaatccaatcaccgaagaggtatgttttctatgactcaacatcctaaagctcttttatctctgttgaggctgcaatggtgatagaataagctaaagaatttgcaatcattcaacatgtgattttaagttcatgtcttctcaaagcataactgactctctgaaacactaaacaaacagggaatcagtgcacttggggagctgcttaggaatccttgttcaaacataaaagttcttattctaaacaagtgtcatctgaagctcgctgggcttctatgcataattcaagcactttcaggtctgaagtattcttgtagctgctattaaacaaaagatcttctcctttttaaactatcaactaaatgctctgcagataataagaatcttgaagagcttaatctttctgacaatgctaagatggaagatgagactgtgtttggccaacctgtgaaggaaagatcagtaatggtagagcaagaacatggaacatgtaaatctgtcacctcaatggacaaagaacaagagctatgtgaaaccaatatggagtgtgatgatctcgaagttgcagacagcgaagatgaacaaatagaggaaggaactgcaacctcgagtagtcttagtttgccacgcaagaaccatatcgtgaaagagctttctaccgctctttcaatggctaaccagttgaagattctggacttaagcaacaatgggttctcagttgaagccttggaaacattatacatgtcatggtcatcatcaagctcccgaactggcatcgtccaaaggcatgtaaaagaagagactgtccatttttatgtcgaaggaaagatgtgttgcggagtcaaatcatgctgcagaaaggactga

SEQ ID NO: 178221 - DNA, 136 bp, Arabidopsis thaliana landsberg
gtactgaggacttcgtggaagatttcagaaatcaaatctctgtctgcgcattgcatgaatatgttgaactcgtctcggatctcaaatattttgccaaacttcacaagatatctcatgcagctagccttcagttcag

SEQ ID NO: 178222 - DNA, 103 bp, Arabidopsis thaliana landsberg
atggggaaagtttctaagcgatcatggtttgtgggtttgatgcttgtggggctcactattggagttgcggaatgtagaaaacttgagaaggagactttgggag

SEQ ID NO: 178223 - DNA, 1371 bp, Arabidopsis thaliana landsberg
atgcaagctagtgaaattcttgttgaacgaaaggcacaaagaaagtcaacaacattggatttagtaatccataagcagactcaaaccgtgaatgagataaactacaaagccaagtctcagcagaaggatagagagacggatgattcaaagagtagaaaaagaagcaaggtttcatacaaaaaagatggagaaacaactacgacgaatccagctccaacagaaaataaacataaggtggtcgcgaggagtaaacaaaagcctttacataaacttagcaataagaaagagaaattgcagcgagaaagacatcgagaaaatggtgtaacgacaaatcattcacaaaaacctttgagttcagaggatttacaaatgaaggtaggagtcatagacaaagctaaagctatgaagaaaagcttttctcacgttgaggtagcacaaaagggaaaagaaggagaggtgcataaagccaagatccgtgagaagaaaaaccaagacatctatattccaaatgaagcattgtgcaaagtaatgaagcgaccagagattaagaaagaagatgggaaacatgatctgttactcaaaagttacaatgacagtaatgagaagaaagcagaagtagatacatgcatcaaaagttctcaagtttcaggtgttgagcataagaaagagatcaaagatgactcaattcttcttattgccgcagagagagtcccatgtcaagctccatcagaaaatgtaagcttactatttgttaacttcacatatataccatctgtatatgttagttctaatcggtgttggatgttcataagcagcatcatgggcgtatgttcacaaatgggatggaccaacaagctccaataccaaagtctgatggaaatttagatatattatccaagacagtatataaaggtaagaagcaaagaataaagttttgggttgtcttgttattaatctcattgcacatttttaaaaaatcactaataatcatttcgagcattatgtcaagattttgttttgataaaaatggaactaaaataagttacaattatttcagaaacaaaaggggagatagaagctggtttacccttgttggagaagcgacaagaacgccgaaaacgagaaccaacagagacattacccgaaaatgaaataaacctaaagaagatatttgtgaaaagccaattatttctagacacagcaaaggcacatttcaaactcaacattcctcaaaatgtctttcatgacgccaccgatgggagcaattactatcaagaagacaataatctaatcctcgagtgtgccttcgagctaatgaaacgaaaaagaagatttcaagagttaagtgtccatcctttcgtgaaggtaccc

SEQ ID NO: 178224 - DNA, 569 bp, Arabidopsis thaliana landsberg
atggatcggatcgtcgtcgttcatgccccaccgagatcaccaccagttcctgatttcgatttcactcccttcgactacattttggataaatctgcttacaaaaacgttttagtcggtgaggaggaataactctgacgcttcatttattacatttttgaaaatgtttgtttattatctttgtttctccatcatctagatgtcattggagcgttggttgatgttggcgcattgactacagactattacggtctcaaactgagtttcaagttaaaagatagatagtaagtgttcttttcatttgttttatttacaatgtcactctaaacgctaacagtccttatttctaacgtagcaatgaagtcttggagtgcgaagcccgcaatcaacaggcggagtacttggatggttactttcagagtttgggtaagagaaatcttgttgtcgcactcagcttttggcgtctaaccgaactgtctaacccgaagcttgagagccatggtgctatttcaaaggtggttgccaatccggacagagcagaagttgcggatatctcgatggtggttttttag

SEQ ID NO: 178225 - DNA, 129 bp, Arabidopsis thaliana landsberg
atggctggcctgcatgaccataagggaaccgccatattcgcatttctcctaaacaactacgatagcgacatcgtattacggcccccacagtgcttatatgaaaccaagctggctaaaaccttgacctag

SEQ ID NO: 178226 - DNA, 846 bp, Arabidopsis thaliana landsberg
atgtacggcaaaacaatatgtacaatcgtcttcttcatcttcctcgttgcttcattctcaatctacatgggaaccgtcgatccaagaccatacttaaacctcctccaatcccaacccaatggagcttcttctccttgtagctcctctggaaaacctctccgtgtcttcatgtacgatctcccacgaaagtttaatatcgcgatgatggatcctcatagctcagatattgagcctatcacagggaagaatttaccttcttggcctcagacttctgggattaaaagacaacatagcgttgagtattggcttatggcttctcttcttaacggtggtgaggatgagaatgaagcaattagggtttttgatccggatttggcggatgtgttttatgttccttttttctcttcgttgagttttaatactcatgggaagaacatgactgatccagatactgaatttgatcggctattacaggtataattttgatcggaaatttttgaaattccggtgattttgggtgatgggtaatggcaaattcgttgactattttttgcaaagtttgaatctttatgaatcgccaccattattgtttcatgttgtgtgatcaggttgagttaatggagtttcttgagaattcgaagtattggaatcgttcaggaggtaaagatcatgtgattccgatgacacatcctaatgctttcagatttctaaggcaacaagtgaatgcgtcgattctcattgttgtggattttgggcgttattctaaagacatggcacgtttaagtaaagacgtagtttctccttatgtacatgttgttgagtctttgaatgaggagggcgatgatg

SEQ ID NO: 178227 - DNA, 1004 bp, Arabidopsis thaliana landsberg
gagatactggaacagataattgattcacgaagtttaaattccttcactcaagctggtggcttggaaaactctgttctgcggaaatctggagttgcatctgaaggttgttctcccaagataaacgaatggcggaataaaggtttagagggaatgtttgaggatctgcacgagatggacactgccttcatagacgagtcttacacatatcctattcaccttaagagccatgtaggggccaaattttgccatcatgccacttcatcatcaacaggtagcatcacgtcagtatcttcaacaaatacccccagaacaagtcactttgactcctattggctagaacggcattgtccagagcaagaggatcttcaactggttagttttctgtttccattatattctctttttaggtagattaagtattggttcagcgttatatgttgctttactagtttactactgtgccttgcagtatccattcttatacattgaattaggtcatatcatgctgagtttttgatatatagattggttgttgctggaatcttagaatccttaatgtcttaatcaataaaactttggatgctcaaacttttgcgagtattactgatgccattgatgggttgagaatttctcctcttgttataacctctctaggttatagcgagttcctagcttcaacttcttcttattcattactttgttacttgtccatggcgggtctctattctccagatcatatagatatcattttcttacctgtttcactgatctttgaataaataaacatttcgaagcataatatcttccagtgttttttcttcgttttcttcatcttgcagatgatggacctttctgatattgcccgctgtggagcaagcacagatttctcgaaagaggggtcctgtgactatataatggcatgcatgcaagacatacaagctgtcttgaagcagggcaagctcaaagcacttgtaatagatacttccgggggacggatcgattaa

SEQ ID NO: 178228 - DNA, 164 bp, Arabidopsis thaliana landsberg
accaaaaactagcatataaaacaaatttacataacgaaattctattgtacccggcaaaggcagccactaaaagtgaagcaaacatcccaactgatccgtcacccaaacctttcttcttccgtgcaagagctgtggcttcagctcgattccgaaacacttggtag

SEQ ID NO: 178229 - DNA, 2200 bp, Arabidopsis thaliana landsberg
aatcttcatcaatcgatggagattctgaaatttgtgatcgaacggtggagattgaatctaggtcacatggtttggtttctgattccggagaaagtaaatggggacgagtcgctgacctaattcggaggcttagcaacgaagacaagaaacgaaccgccggagataatggcagcggcggtggttgtggcggtggactcgagattatcagaacgccgaggccttgttgcacttcgtcgtcatcggagaaaagtaattttccggtggttagtttctctccgaagatacgaggacggcaagcgtttaccgattttcttatgcaaatggaacgtgatcgccaccgtgaattggattcgcttcttgaacgcaacgcagtttctaggtttactcaacgtggtcgtctccaggtaaattatattttcactattttgataagtaacaaacatatttgtgactttattcataatccactaaatagtttttctgattacattatttaaccagtcaatgctaaggttaaggaatctcaatcgatgtcttgtgattcaagatagaaaccggtctaacgcaaaaacaaccggattaaaccgaattgaatcaggctctgctgttctgcatttaaggttttttcagattttctgttttatgttttgagtttagttcttagggtttactttcttctgattttcaatctttgattggcaacgcagggagaaatttcatgcgaacgtagtaaactctgcggctgcaacagataagaggaagaatcatcaacgatccactgagatgaacaacaaatccgtagaagaaacagaaggaactactaccacaagcacgaggttaaaggatggtggtgttactctcgaagcttttttcgcagagcggttgagaccccgtaaccgcaagatagaggaagcaacgttatgtaaggaagaagaatctgtaagtggaacagttgattcacaaaagatttgccttcagctgcaagaaacaagagaagtagaagaaacttgcaacgatggcaagtctgaaaagaaagaagaagaaaatactagcccgagtgaatgtttaactcgagaatcgtggttgagacagaatcaagacgagaacaatgtgggaaagtatatgcaagaaactcgagaaacagaaggtctagttcatgagagtaatgagatggaccagtgccttgatcaacaagaaacatcctatttgaatagatggggagaacaagaagagtatgcagatgagcagtcttattatggagaatataacgacgactggcttagtgaaatagctaggcctcggagttactgggaggaattgaggaagtcacggtacctggaagtaatgaacactaggtctgagaaagatgacatacgcagactccttgagcggtaagtaaccatcaaaattgacaagctcatgtttcttaatggttaataactgactaagaaaatgaatttccctgcttaatacagaagaacggtgacagatttcctcgacagcgggttgcgagagaagatcgataatctcatgatgtcccgtgtacagacacactcggataagcactccaaaaaaagggaatttcaacaagaagaagaggaggaagaaaattttgaaattgaagaagaaatcaaagaagagccattaagaggaggtgaagagcaagatgatagagatgacttgagccaatcgtcgtcttcacatatatctgcatcgtctcctgcaggatcatggagttctcaagacactgatgttacttccactcctgccttgtctgttcagaatcctcagtcacctgtgagtcattatcgatttcttgttatactatagaaactcgcaaccgcactagtggtaaactcattgaaccgcatataaacgttttcaggaaatggagctgataagcggtatgagatcacagatccaacagcttcagcaagaaatgtcaatactacgagattctgtcaaaacgtgtttagatgctaacgggatcctgcaacacaaggctcatcaagaaaacccaatgaaacgaaaatgttgcgtctgcgacgaaacacaggtcgaggcggttttgtacaggtgtggacatatgtgcatgtgcctaaaatgtgccaacgaactacattggagtggagggaagtgtccgatttgcagagctcagattgttgacgttgttcgtgtcttctacgatacaagaaactga

SEQ ID NO: 178230 - DNA, 707 bp, Arabidopsis thaliana landsberg
gcacttgaagagaatgtaaaagcaaagctatctcggttttgctatgttccggtatgatgcatcttgtgcttagttttcccttgtctttttttttctccctcaaatattggttaatcagcttccgcacttgatgttttcagattcagaacatcttctctctctgtgatgttcccaacatctggcacattcctctgttgctcaaggtacgagttttcaactaccgcgatgattttttttaataatttacaaaaatcatcagaggtaacacttgttttcgtttcttgaaacaggagcagaaggctcatgaagcaatttcaaaagtcctgaacctttctggtattgctaaagaaccttctttagagaaatgggcatcaatggtagaaattagtgacggtttaaatgtacccgtaagtctcaaatgcgaaagatttgtatactttgtagcctcgatgtctctttcttgacatccaagtaaatgttttacaggtgagaatcgctatcgtggggaaatatacagatctatcagatgcctatctctctgtcttgaaggtaaacttatacatcactttctcatgcacatcacaaggtctggtttaatgaccctgctaattgtttaggccctcctccatgcttctgtggcttttcacaaaaagcttgaagttgatatggttccatcgtgtgatctcgaaaagaccaagaagcaagag

SEQ ID NO: 178231 - DNA, 663 bp, Arabidopsis thaliana landsberg
attaatagtaatccagttgctgctgaggcaaccattttgtcgcttcaccaatccccacagccgtataaggcgtgtagatatattcttggtaagtctttctgatgaatccagaaccggccaagtggacttgggaagtttcatctgtttgactgaaagtgttttctacttccagaaaattctcaggtggcaaatgctaggtttcaagctgctgcagctattcgagaaccagctatcagggaatggagctttcttgccaccgatgataaaggcggcttgattaggtattttttcttcttttatgttatttgggtgatatatgcttaagcttccagttggtcaccctctgctctatcaggaagcaacccttggtgttaagtttgtaatttttgattggctttgcaaatcaactgagagcattcatgcttcacaatatagtagttttagaatactgctgctttcctggtcacatcattttccgagataatcatgactatataagaaatatataggtttttattatgaagttttggattatataaataaaaacaattaagtaatatggcgaaatctttctgcagcttctgccttggttatgtcatgcagcatgctaattcatccgagggatatgtgctttcaaaagtatcttctgtggctgcacagctg

SEQ ID NO: 178232 - DNA, 68 bp, Arabidopsis thaliana landsberg
aactggcatgtggccaatacgatgtgaagagtgaacgagaacctatgtcgatcgataaatcaaattag

SEQ ID NO: 178233 - DNA, 231 bp, Arabidopsis thaliana landsberg
atgaaggctgcattggcggtgtatcacgggatcaagccgccgaccattaacctgaaaacgccaaacacttactataatccggaaacgagtccgttcgcattccaaaccaagcctgcgctctggaccgacgaccgcagggttgcggggatcagcgcattcggtttcggagggactaatttccacgcagttatcgaaagcgcttctgctaaaaagccgcgcaaatcggcgaag

SEQ ID NO: 178234 - DNA, 82 bp, Arabidopsis thaliana landsberg
atgcccaggaactttgatataactgttcccgaaaatgtcgtgtcgaagatatgtttaccaccagaagctcgtcaacaaccag

SEQ ID NO: 178235 - DNA, 399 bp, Arabidopsis thaliana landsberg
atggggcatcctgttgtacagcagccctcacgtcctgctagtcgtaatacctttgatgagaatgttgactctaataataacctgtctccatctgcatcacaaggcattggagcgccatctccatacagctatgcagctgttctgggttcatctttgtctagaaatggaactccagatccacagggcattgctagggtgcctagtccttgccttactcccattggcagtggaagagtgagttcaaatgataagaggaacacaagtaatcaaagcccgttcaacggtgttacatctggtctcaacgagtcttctgatcttgtcaatgctttatccggcttgaacctgtcaggcactggcgggctagatgaacgtggtcaggctgagcaagatgtcgaaaag

SEQ ID NO: 178236 - DNA, 160 bp, Arabidopsis thaliana landsberg
atgcaggtcagttacaccattttaaagcagagtattgttttccctataaaacattcactaaacaaaaacctttctcacacaggtctactttaagatgttagacgcattgcttgcagaagagaagatgcctgatgaatactccaacaaaactcaggtttag

SEQ ID NO: 178237 - DNA, 101 bp, Arabidopsis thaliana landsberg
tatcaaccaaactcaaaacagtaatgatggacactaatgatagaaactactcgagaacaccggcgaagcaggaaacgggaatgaagcggttccgcgactaa

SEQ ID NO: 178238 - DNA, 801 bp, Arabidopsis thaliana landsberg
  unsure (1)..(801): unsure at all n locations
atggatgataatttaagcggcgaggaagaagattactattactcctccgatcaggaatctctcaacgggattgataatgatgaatccgtttcgatacctgtttcttcccgatcaaatactgtcaaggtttttgagctaaatttctctcgattctttttcggattttgttaattttgtaatgaattcgtgaaattgaatcacttagttgaaatgttgatttgaaaaatcagttctgtgatctctgttgttctctagttaaaattagggttttgtgttatactgtgaaatttcatctttgtaatgctgtgaagaggattagaagagtagtggcattggttcaattagaataaaagcgtttgatgtttgcatgaatgtgaatctgcattttgtaggttattacgaaggaatcacttttggctgcacaggttagtgaaagagcaatgactcttcttttgatccatatatactngtggagtttcaattttgaaggctaaactgtttttgaatcaatgtagagggaggatttgcggagagtgatggaattgttatcggttaaggagcaccatgctcggactcttcttatacattgccgatgggatgtggagaagttgtttgctgttcttgttgagaaagggaaagatagcttgttttctggtgctggtgttacacttcttgaaaaccaaagttgtgattcttccgtttctggttcttcttcgatgatgagttgtgatatctgcgtagaggatgtaccgggttatcagctgacaaggatggactgtggccatagcttttgcaataact

SEQ ID NO: 178239 - DNA, 358 bp, Arabidopsis thaliana landsberg
atggagtccccaacatatacccctgaggttgtacaccctacaacagatgcaattgaacctgatggatccgcagttaccccccgcgactgggttatccctgaaatcgccagtaacccgttcctgccagcttcaacacagactgaggatgccaattcactgcatatgtctactggaccactaagacgtaaacaacatgtgccacatggtgaaagacaatctatcttagcccgtcgaaaccggcaatttgaagcatccatttcaaggaacatggctactgcgactgatgataccatcaatgacgctggggaaggggatgattggacacaaccccatatgactgcaaagatcaacaacaatg

SEQ ID NO: 178240 - DNA, 384 bp, Arabidopsis thaliana landsberg
cggagattccacgaaggagatcgggttctccgaaaagtttttcagaacactttaaggtgatccgacccggaatatatgagctcgccgacttaaacggcaaaaccgttccaaggtcctggaacgcaatgcacctaaggaaatactacaactaaatccgaggtgactaaacttaaactcccatttttattatcttgtaggttttcgaaccgaaatatgaataaaaattcttcgcattttttaaacgcttcggctaatacggtgagcgacggctctgagtattctttacacatattcggctacatcgtgctatacaaatacgagatgaaatctatcagattacttctgataagaattttcgtcttcagaaaaccggttatactttaa

SEQ ID NO: 178241 - DNA, 63 bp, Arabidopsis thaliana landsberg
atgctgcaacggttcgatctcgggcaactggatgccgccgccgcgctgttgcgcagcggcggg

SEQ ID NO: 178242 - DNA, 178 bp, Arabidopsis thaliana landsberg
atgaacgctgagaataatcagactactactactcactcgaaagtgatctcacatgtattctgcactggtactgctaagctaggctctgttgggccacccattggtcttgttgatattggcgtcagcgaagttgcttacatcttccgagtctctcttcctggcattgagaaaaatcaag

SEQ ID NO: 178243 - DNA, 159 bp, Arabidopsis thaliana landsberg
gtcaagatcggcgacctcgggctggcggcgatcgtggacaagacgcacgtggcgcacaccatcctgggcacgccggagttcatggcgccggagctgtacacggagacgtacacggagtcggtggacatctactcgtacggcatgtgcgtgctggagatg

SEQ ID NO: 178244 - DNA, 252 bp, Arabidopsis thaliana landsberg
gaacaaatgaagaaggagaagattgaaggattaatggattctgagcttcaacaatatgtaattggggataaagaagcagaggctctgcaacattcaaagatctcttcaagtggtattatcagtgttaagtctaccaaatcagagaatgagaacgggtttgacaaatccaccaaaaagagaagcagtgataagcgttcctcttcttcctctaaatccaaatcgtccaagaagagaaagagcctgaaggagtga

SEQ ID NO: 178245 - DNA, 28 bp, Arabidopsis thaliana landsberg
atgcgaaccgggtcctactacacaatcc

SEQ ID NO: 178246 - DNA, 258 bp, Arabidopsis thaliana landsberg
agccagtctcatcaaaatcgtataaacatcaacattgacaaaaagaagagtctacctagtcatgttgtggtcagtggttacagtgaacgaataaagagggtccctaagtttttgcacctcttggaacaatctaacgtcgtattgtcgttgccaaacgtatcttcaaatttttataccccaacaaaaataataattcttgtgaagtatcgtctatattgctcttggaaacgactcatgtggaacgcacgacgagaataa

SEQ ID NO: 178247 - DNA, 615 bp, Arabidopsis thaliana landsberg
  unsure (1)..(615): unsure at all n locations
accctgaaggaaattaagaacaagaacaaagatgctcaactcaagtctttcgaagctgacatgtcttcatttgaatcaatcttcacgtttaaaaactctctagagcaatggctctcggactcagcgttacatccttctattcacgttttggtgaacaatgctgggatcttggcaacttctagtcgaccaaccattgatggttatgacaggtcagtctggcttgatcaaatcttttgttttcagctgtcaataacttaccttatgtattagcctatggatttgatatttaaactgccttttctttgtctccctcttgtcagaatgattgctcaaactatgtgggtccattctttttgaccaacttcttctaccacttctgaanaacagcaatgttccttcacgggtcgttaacgttacatctttcacacatcattcaggtaagatgtagtgatatataagatttaacaagaaccattaaagactagcttaagtgacttgatatctctttgttttctgtagcttttattcaaaagctagacaaggattctgttactggagtgtgtttttcaagatcaaaccaatatccatgcgctaggatctacgagtattctaaat

SEQ ID NO: 178248 - DNA, 658 bp, Arabidopsis thaliana landsberg
tccctctgtaacattaaggttcttaaagaggatttggtgaacaatcggaaaccattttctgacaaccaagttccttgtgcactacgagatttcttttctgcttttgtctcggagaagataaaagaagaggaactctatggtcacctactgagcaacttacttgcttccctagaagaacttcattccctggtttgtgtatagataagcttctgagtactattattattatcctgaataggcttgaatgttgtctttaatgtcattcgatttttttgttaaactcatttcagtcaagtaatgctgctgaggtacttgttgcgatcctcgagttttgtcattgctggaaaagtccagaaagtgaaagcttggtaactcgcctttttacattggaggaatatgaaagaatgagttgtagaaaatgcagaaggaagccaaattatccagagcaaagttcttatggaattgttatggctgcagattcaatcagagacctagaggtatgtttcatttattcccatattttacttttctacagaaactggtacttaaaatgcttgtttatatatgcagtgtgctttggggaatataatgtttgaggacatccttaaagtaatccgcatgaacaatgaaatgatatgtgatgttggaacaggaggct

SEQ ID NO: 178249 - DNA, 1836 bp, Arabidopsis thaliana landsberg
atgactagtacggagaacaacaacaacggctctgatgaaactcagacgacgaagttacacttcgaagatgctgatgaatcaatgttcgatggagatgacaacaatgccgatgttgctgatgacattaccagcgccgattactacttcgattcttactctcatttcggtataaatccttgaactttcattatatactgttgctttcttcatgttatcttattctgtgcaaagtgcttactctgtttccaattgattgatttttgcaggtattcatgaagtaagtaaagtctcctgcttttttatttatttgaatcctgtgttctgaaacctaggcaatgtgtataacagtttttctatggtgatgttattattattaggaaatgttaaaggatgtagtgaggacaaagagttatcaagatgttatttacaagaacaagtttcttatcaaggacaaaattgttcttgatgttggagctggaactggaatcttgtctctgttctgtgctaaagcaggagcagctcacgtttacgcagtatgtctctttatcttctccgttaatcaaagtttggcttttattgatctgatttgacaaatggttcttaggttgagtgttctcaaatggctgacacagcaaaggaaattgttaagtcgaatggattctcagatggtatgtatttgtttagagtgttattcaaatggtttatgatctgatggtagttggctgaaacaagtgtttgtgtttgttttgttggcagttataacggttttgaaagggaagattgaggagatcgaacttccaattcctaaagtggatgtgattatctctgaatggatgggttactttctgttgtatgaaaatatgcttgacaccgtcttgtatgctcgcaataaatggcttgtaagtgagagttttctgtgttcatatgttgattatggtttcatcatagctttgaacatttttgtgtgcttttggttctttttggttaggttgatggtggaattgttctaccagataaagcttctctttatgttactgccattgaggatgctcattataaagacgacaaagtagagtgtgagtaatatgaaagatcttgtctttctttttgctaacatttatcttcgaaacctgatttttttgcaatcggctttgcttcttgtcgtttcatgtacagtttgggacgacgtgtatgggtttgacatgtcgtgcatcaagagaagagcaattacagaaccgcttgttgacaccgttgatggtaaccaaatcgtgactgatagcaagctgctgaaggtaagtaagattgtgctgtagtagttaattacatctccctaattttctgtagctaatgcatattccttttgttgttggcctttggcttttttgactaaagacaatggatatctctaagatggctgctggagatgcttccttcacagctccgtttaagctcgtcgcacaacgaaatgaccatatccatgcccttgtagcctacttcgatgtgtcattcactatgtgtcacaagaagatgggtttctcaacaggttcgacttccctaaacatgagtgaaaaatatgttgatgtttgtcaatgtttggtactcacattacaagtcacaacatgcaatgcaggaccgaaatcgcgggctacgcattggaaacaaacagtgctgtacctggaagatgtgttaaccatatgcgagggtgaaacaattactggaagcatgaccattgcacaaaacaaaaagaatcccagagacgtcgacataaagctcagctattctctaaacggccaacattgcaatatctcaaggacccacttctataagatgcgctaa

SEQ ID NO: 178250 - DNA, 231 bp, Arabidopsis thaliana landsberg
gtcgacgagcgcgccttcgaagtgggcggcaacctggccgccaccgccggcgccgtggtgtttcgcaacgagctgctggagctgatccagtacaagccgatgagcgaaaagcagcacgcccggccactgctggtggtgccgccacagatcaacaagttctacatcttcgacctcagctcgaccaacagcttcgtccagtacatgctcaagaatggcctgcaggtgttcatg

SEQ ID NO: 178251 - DNA, 472 bp, Arabidopsis thaliana landsberg
tgaagactactcaacctcgtcggatagaccggaaacactcgaccacaatccgcctagaaataaaagcccgaagccacaatttcacacggccggtactcgacgggtatacttgaccggtttacttggctgggttagtgtttgggtttattggaactaacttattgatatttagctttgagttgcatctgttttcaggaagtatcatgagtaactacagtgacgaatcctctatggatgcggattacaacgttgatgaagctgagtcttggtcaactagacctgagaaagagcaacatgcttatgagagcttcagagttgacacccaacgctcagtagctcgacccaatgagaggagagctgagattgctaaaggaaagagagcaatgacaagtagatatgaattgattgatgaagatattgacgtcgagtatgagcctgagtcatggcacagagagacgaagctgttgaacag

SEQ ID NO: 178252 - DNA, 196 bp, Arabidopsis thaliana landsberg
atgctccaaggtatgtgtccattgcaatacaaattttcatgtcttcccgatgctgacggttttgtgtttgctgttcacagcgggcagtggccctcacagtctggaggacgtgggagcttcccaaatcaagggcaagggcaagggcagtcctctgatcaacagctacagctacaactacagcagcaacagactctga

SEQ ID NO: 178253 - DNA, 1659 bp, Arabidopsis thaliana landsberg
ctgtttgtgatgatcaatttctctacattggactgaagaagagagtagtgttgataaatggctggttctcagcgacaatgctcggagctccggtgagaaatcctgtttctacggcgatcaagcacactcgacggtggagatgtttaagtcatcgagatgacggagcgaggagagcaacagaattaaaatggttttctaggtgcagtttcatgcgactcaggtaatttgactctaggagatatatcgtgacttctggtcaaatttttctgggaaactgttgcttagattttgaattttgcagaaattgggggaaaaattactcaaatctgacatctgatgtgacctgtataaacagtgaattccattttccataattcggattttggaatttagatcttggatatgtgagatcatgttcatcattgtgtttttgattgatttttttttgtttttgtttgtttgtcaggtgacgcagttgaaggcggagggattaacaatctctgtagttcccggagatgttgggaaatcgacggggaaggcagagaaggctatggtgcttgacggtcattgtcggtgggaatctccggtgtacgagacggtgaagtttcttcaggatgtgaaaacagggaaggttaatcagagaatctatcatcttgttatgtcaacgacggtgaggaaaattaaacgttctcagagttatgaagagatttctgagattacttttctgattagttttgtttttgcagggatctacaaaatctggtgttgtgggagagacttcgattgattttgctgattatgttgatgcaattaagacttgcaatgtttctcttcctctccagaattcaaattcaaaagcaatgttgcacgttagctctctctctctctttctctttctttgcattaatgtttgtcatgagacattacagcgtttgtatccatagcaaagctcacatgattgttgcttctttgtctttttgaactgtgatactgagatttgaactgggttgtttcattatcaggtagcaatacaaaggcagttagaaaatgcagattcacaaaggtataggaaattgtttaaactcttgcaagtctttattcttttagtgttcttattgggagtctctgttttgtctgtgtgctctacagagtggtgaaagagagtgatagcttggtgaaaaagttacggggtcaagatttgaaatcccatttgagtattgaagctgatgaaagtcataaaagtgattcacaagaggtataatcgcttttgccatattcttaatttgtgaaaccattgttgtatctagaagtgagaaattctatttgtgtctgctcttataggagggtccatttggtaaagcttccaggattactgaattgaggcgtcgagcatcaatagaatctgatagtacattgtcaagctttgacagtgtctctgaactggatacactgggagaagttgaaatcagaggagatcacattcagcaaaaccactcaacaatgcatcaccattcggttagaaatgtctatgaagagcctcatatatcagaatccgagtggtcaggaagttctgatcaaggaatcagcactgatgactccatgaatagttcaaatgatacaatcccaagagatacaacgaggacttcctcggataacgag

SEQ ID NO: 178254 - DNA, 67 bp, Arabidopsis thaliana landsberg
atgagtggagatgttggaaagactcaacagtctgcagaagccaaagagatgataaagaaggtgaaaa

SEQ ID NO: 178255 - DNA, 139 bp, Arabidopsis thaliana landsberg
agttcttgaaaagcggaattcccgagttcaaaatgcgcagatgataacagacaatcgagcaaatccagaatcttattgtaacccaacaaaagatgctgtagatcgtccagatttcgctatagactcaacatttcgataa

SEQ ID NO: 178256 - DNA, 1775 bp, Arabidopsis thaliana landsberg
atgaatcatatcgttgtagatgttagttccgacgaagatgatgatcaacccagtgattactcttatttgttagaccgaattctgggagtttccgatgagaagaaccccatcaaaggtactgttttgttgaatccaacggtggagaatgaagacgacgatgacgattgtgtgattttggattttgatcctacggcgaaggagactgtgattgaaacttgtgaaactgatggagttcttgtagtaggacaaaagggtgaggtaaatttttgatcttttccacttgtttgaattttcgccccaatttgttactaatttactcaaattttgaaactgccttcgttaagtttgagtattgtctacgagaattttaacttggggactcttgtaggaatcaatgttcttctacttcagagagtaaattgagtttatatgtcaagttttagtatatgcagccacttagtataggatttgattcttcatcgtgtatagaatgaaatcttggaattgattttgctctgtttccatctttatacagtttgtagtaacatgtctaagtaagttctttttggttttgtaggtagcttgtagggattttccgcatccgcgacatgcttgtgctaagtacccgttcaaatccacattacaccagacgttttgtgagatggtaagaatgtgaagttatttgtttgttcttttgttttctaagaatcttttgagacagtttaagtgatgtttcttttcttgctaatgacgttttttgttttgctttttgttctttacagtgtcactgttatgtttgtgacacccgtgctccgtgtacttactggttcagtggcgggatctctaacactgatcactgtcatgccaatgataaagagaagacatggaatgatcaacgggaatgcatcagaactggaaatatgttacctcgacctgtttcgaaacctgcttcggccaaattacaatttaaacgtgctccacggcgtccatctgtatatgtacctgtaccgttgctccaaaactcgtctggaaccaacttaggaatccgggcttgctccaaatctactaaggttgcaattcacccaaaaacatacactagacccggtcatagaaccgagcaatcaagaaccgtccaacaaaatcctgggtcacaacctcacgctatgcagtcattaccaaatcacaaaagtggctctaataatggtaatccaagtcctcaagttgtcccttccaatccatatgtattgactcgacggccaagtaatggcgtttatcctccggaaaacagtgtacagaatatttctcaaggcttacaacctacctattatgctcctctcatggcttcacaaggctcacaacctacccgctttgctcctcccgtggcttcacaaggctcacagcctacctgctgtgctcctcccgttgcttcacaaggctcgcagcctacccgatatgctcctcccgtggcttcacaaggcaatgcacagcggattgttactggttctatctcaactgtgccggtatctcagagcaaagaggcaaaacagtttagccggaatatgtattctgctaatgttcagacgaatgcagtcccaactatgactcctaatcctccggcggtccagcagcaacaacaacaacaatcaggaagaagtaacgatagagtattgtccgagtttgaagactggctcttggacgactcaaccttgccttgtccctcgtctgttcaagacaatacattgaaaatcgatttcgaaaccttcttgaatgattga

SEQ ID NO: 178257 - DNA, 160 bp, Arabidopsis thaliana landsberg
aagatccagctcgaaagatggcagcaaagtctggatctatctccgcaaggtagtcgaagtacacatggaagctactaatcttctccgcttggtttgcaataagagcttcagcggcagccagcttttgagagagatcacccggatcttctcgaggaactga

SEQ ID NO: 178258 - DNA, 128 bp, Arabidopsis thaliana landsberg
tccatccccaaaaagattcgagtcttagacgatgatcggattaatccgattgacatgcctaccctaagttttgatcttgtttctttcctatcaatttataatttggagtacattagtgtagtttcatt

SEQ ID NO: 178259 - DNA, 110 bp, Arabidopsis thaliana landsberg
atttccgttacgtaacgcttaaaatgattcttcaaatcgacctggctctggtgggcttatctcggcccactccacatttgacaatgctggactcatcgttgaggctttga

SEQ ID NO: 178260 - DNA, 390 bp, Arabidopsis thaliana landsberg
atgcatatttctcttctctcatccaacactacttcagttgaggtaaatctttgatgttcttgctttcacaaacaatctaagtcttgaaaatatgagtctcttctctgaatcattgccttatttttttaggttcatgagaaaaatggagaagtcagatggaaatatgacttaggaaagaagaaaaacttcgagcaggtgagattttattgttttcatcattccatggattgttagttaattaaatatataactctttgttttcatcttgtgaaggtttttgggaagaagaaggcgttttggctcctcccattgtactctaaagacgatatcgataacataacttcccttgaaggccttgaatttccaacttgttctgacatcgacccttga

SEQ ID NO: 178261 - DNA, 171 bp, Arabidopsis thaliana landsberg
atatggggcatcctggataaactgaatgaaggacatgttctcgtgaaacgaaacattttgtatcagcttgatataaatttcgagaatatgaggatggagccttcacaaacaattgtgactatctgcgctgagttgaatagaattgctgacctagctccacctgtgggataa

SEQ ID NO: 178262 - DNA, 58 bp, Arabidopsis thaliana landsberg
atcccaaaaagattttgcagatttggatgatgatgatgtggtttttgcatctgtttag

SEQ ID NO: 178263 - DNA, 240 bp, Arabidopsis thaliana landsberg
ttgcaaggatctgttccttgccatggaatcgagtttgaaggatcaatggatgatttcaaactcagtagagattcaacatcgcttgatctcaccggagaaatcaaaaagaaagcaaacaccaagaagaacatacaagaagaagaagagatcataatggaattcaagagattttttaaccaagtcatgatagaatcagtagttgtaagtggcatcgatgaagaagctcgatcacggacatga

SEQ ID NO: 178264 - DNA, 1299 bp, Arabidopsis thaliana landsberg
gatccatccgtgtgtccacaaacgattaactctggagatgaacttcttgagaagatgtcaagcagatctttggaagaagtaatgacaccgtcggtagttgccatgaacctcaaactaaacctgtctcctgtgcctgacaagtgagtctatctttagatgtggttacatgcgaaaactgaattgactataactttgatttgctcgtctatctaatattggcaagcttctcaaaacgcagtctttacatgttcataagaatattatggacagatgttactttcagtatatgaatagcttgtgttctgtgatatgaccagaagagccaattgtttctgtaatgttaagttatactgtgtatactttgctttccatgcaataactaatccacatctgcagatcttccgaagaagcagagtacataaagggaaattctgatccggagatccatgattctcctggcgaccctgttagaaaatttattgatgaggatgctgaagaggaagatgacagtgacaatgatttactccgatttgaggatgaggatgatgacgaagatgaagacgatgatgatctcagggatatgattgtcagtcaatttaaggaagatccaactgataaagatagacgtaatgaactgcatcagaagtggctcgagcaacaagatgctgcagggacagagaaactcttacagaagcttaaacgtggtgtgcagcatgatgaaacattattgtctgaagatgaagatgacgatgttgatgatgatgatgaagagaggcctgaaggtgctgatggtgaagaagtgcaaaaacctgaagccaatgaagatgaagatgaagatgaagatgaagaagatccaagtcatgcaaattccatgcgaatgaccataaagaaaataaaggaaatgatccctttaatgttcacagatgaagatgatgtttatgtgtcatcagacgatgaggaaatggaaaagaagcttctgcaacagcgactgtacaagaaaatggtaagtgatcccggttcaatagccctgtctgctccatattttatcatttgatccaccatacctctctatatagtaaagattgaaaagcttgtttgatgtttcgcttgtgctgccccattaatatggatcattgttgtttggaacaggagctaaaggccaagtcttcatcatccactgcggatgaaaactctgaagaaattcttcgccacatcaagaagcctgagatcaagaagaaagcaaaaccttcttgtaagataccacccaagtttctccctgtatttgtaatcatcagctga

SEQ ID NO: 178265 - DNA, 288 bp, Arabidopsis thaliana landsberg
attacgctcacgcgaacaagcgagcattgtcagcatcaccgcgaaagctttaagctccacagccttgggtcacatccggcaccgccacctcaacagcagggagtaccatggctaaaagccctgctagttctggtcttcattcctgtcgtcatcactcgaagccctccatctttctctcccgtcttaccctttttaatatctcgcgacggtgaagacggagacgacgaaggctttttattcttccggctgaggattccacaaaacatacgaaccatcgagatcgtatag

SEQ ID NO: 178266 - DNA, 789 bp, Arabidopsis thaliana landsberg
atgaaaaggggtgtgagttgtctaggcagatttatgcctcgcatggttgtaagtatcatctctgtcctctctgatcatcttattttccactctaggacttatacgtgagaatgtctttatatcatgactcatgagtagccttgtcatgtgatcctaggttattcctccaggaatggaatttcatcacattgtaccacatgatgtggatgcagatggagatgatgaaaatccacaaactgctgatccaccaatttggtctgaggtaatcttatcttcaaatcatagcctatttcctttttctttagtcaaaggttttacattttctatatttgttttatcggtacctttaaacttactacgaactcttcacttgggcagattatgcgcttcttctctaacccgcgcaagcctatgattctcgctcttgctcggccagaccctaaaaagaacttggttactctagtcaaagcctttggagaatgccgtccattacgggagcttgcgaaccttgtaagtcttgcagttattctttttagaatcatgatctccaactaatttattggaagtgtgtttcacttttttcatttcttctttcactatcttcgattgcagacattgataatgggaaatcgaaatgatattgatgagttgtcctccacgaattcctctgtgctgctctcaattctgaagctaatagacaagtacgacttatacggtcaagtggcaatgcctaagcatcaccaacaatctgatgtgcctgaaatttaccgtttggcagccaaaacaaag

SEQ ID NO: 178267 - DNA, 87 bp, Arabidopsis thaliana landsberg
caatgcgaatgcgacattacgacagacaattccatcgaaaaggggaacttcaatgacgatcgagaaccaccaacccatatcacatag

SEQ ID NO: 178268 - DNA, 1052 bp, Arabidopsis thaliana landsberg
aattggattatcatgaaacgctcgatcagccccgaccctttttcctcaacgaagtcgccgaaactcgttcaccactctccggatgatggaggagcagagggcaatccttatcgtcttccttttaccttaagcgatgaaaacctctcatgccttcctatctcccaggcgagggagcctcctcctatctttaatttggatcccaattctgtcaaaggtacgttgggatgtttttttttttgtgttctcgttgattgatcttctaaatctcatgttttgatatcatccaaattagatacacaagacagaaacaaactatacttagcaaaagcttgggacttgctaaagccagcgatcaaaatcatcttagatgatgatgaatacaaaaagcctggcgacgttctctgtttcactacgatttttagagctgttaagcgtgcttgcttaggcgatcctcgacaatcagaactggttttcgatcttgtcaagcatgagtgtgagcctcacattgctgagcttatacagtctttagaaaaagcattgcagtggcagtgatgatccctctgtgttcttgccacacgtgtacaatcgctggctagactttaaaaggaagatgagtcttgtgtctgacgtagccatgtatcagactcttaatggcttgacattgtgggacgtgggccagaagcttttccataaacaactctccatggcccctcaacttcaagatcaagttattaccggcatattaagactcatcactgatgaaaggttagtatgtaagtaagaggagtctcttctttctttaaccgttccagtctcgatctactcactctttcccttgcattttgtgttaatgtttgtctaccagattaggcaaggctgcgaacaacacgagtgatctcctaaagaatcttatggacatgttccgcatgcagtggcagtgtacatatgtgtataaggacccttttcttgattccacttctaagttttacgccgaggaagcagagcaagtcctgcagcgatccgacatttcccactacttgaaatatgtcgag

SEQ ID NO: 178269 - DNA, 627 bp, Arabidopsis thaliana landsberg
atgaagtcggagatatcaaaccctgttgcgtctccggtggtggataacgcctctagttttcgcgatatcactagtaatccggctaaatcgagttctggtgaccgtgtcgggtcttgttctggttcctatgagactataactgatgagaaacacagtgaatactgttcatcgctagctaatagtgatgctgtaccgtcaagtttcgaaagggagattccaaagcatcttagcacaactgggataacgaaaatcacatttaagctcagtaaacgaaatgaggatttctgtgatttgcccatgattcaagagcatacttgggagggttatccttccaatgtagcttcttcaactttaggtgtgaaaatgttgaagaagattgactctaccaacttcctatctaatgtgaagaagctattggggacggggattctcgatggtgctcgggtgaagtacctttcaacctcagctgctgtaagtttctgttctttgtggtttctcctgctattagtttggatattctcatatatatgttcttatgttactttttgtggtcattagagagagcttcaagggataatccactcgggtgggtatttgtgtggctgtactgcgtgcgatttctcgaaa

SEQ ID NO: 178270 - DNA, 816 bp, Arabidopsis thaliana landsberg
ttgcgggagacatacagaaacattgatattgctgactacaaccgcctcaaagatgaagtgcggcaattagaggtatgcttataaagataatatgacgttgtctaaatttctgcaatagtgggtgttttccaagggtgtgcatggatatgatatccctaccctttcactatatttgttgtcgtgaaattagttacaatgttaatggagatgataccatgtctgctgaaggtggttagttcttgctccttgatccctactggttaaagaacataaggtgctttatctatttgatattgggatggtcaatgaaccatgtgtgggatgccctttgagagagcctctttgtctcctagtttgggactactccctatcttgtaacctactctttaaatttcctccatctcgctggaacaccccaactatatgttgatttccacagttgcattattgatcattaatcgcatatagaattctagtgtacggtaattctcaattttgctgatgagaatttttggtgaagtcttagtgatatttgttaatattgtgtcattttggtttcgataatttgttgaatttgaattctgggcgtcccactggtctttagccctgcttttcctctaagttcttatatcaattgtgacgccatgatatggtttttaggagaaactgaaagcaaaagatgctcatgctgaagattgtaagaaacttctgttggagaagcagaataagatatctcttttggagaaggagctaactaactgcaaaaaagatctgagtgagagggagaagaggttagatgatgctcagcaagcacag

SEQ ID NO: 178271 - DNA, 73 bp, Arabidopsis thaliana landsberg
atggaaagtaggagaccgaccccggtaggctcgacagtggcgaagtggctgggggcgccgtgcagcagcacgg

SEQ ID NO: 178272 - DNA, 320 bp, Arabidopsis thaliana landsberg
gtgctaaagtcaatttcatgtccaagatcacagcagatgagaaaagatttatgtacttaccgccttcaaaagcttccatagaatatgcagattcatcatctacaataggattcttgcctggcgtattacttcaaataggaaactgtttttttcctattgactttcacattgtcgagatgagaaaaaacaagcacaagccgttggtccttggttatgagttcctagccgttgttggagctttggtggattttcctaacaagcgaatctctttcaccaagatcgacaaaaatgtcttttatcctgcagttcgaaacaattga

SEQ ID NO: 178273 - DNA, 64 bp, Arabidopsis thaliana landsberg
atggttatgtatcatcaccatcgcgtccgcagaaccaaatacgacatcttttttgatgtagctg

SEQ ID NO: 178274 - DNA, 340 bp, Arabidopsis thaliana landsberg
gaccgtggagccgaacttgaagttgtgcagaggctggaagataaagtgcgtggcttatcagctcaattagcaaattttcagtttacatacagcgatcctgtgaggaactttgaccgatctaaggtgaaaggtgtggtcgcaaaactaataaaagtaaaagataggtcctcaatgacagcgttggaggtagactggatatcttatcatttcacaataaacactgttgggatttcaattgcctgaagtcactttgcttcttgtttccaggttactgctggtggcaagttgtatgatgttgttgtagactcagaagatactgaaaaacagctccttcaaaacg

SEQ ID NO: 178275 - DNA, 178 bp, Arabidopsis thaliana landsberg
atggcagaggctgttgatgaagattctggggttggacgatctctagaggagagttcaaatggacttcacagtcaagcaggagaagcactctcagaggggcgctcttctggtcaagtggagaacgggactccatccacatccccctcttactgggatatcgatgacgatgatgattatg

SEQ ID NO: 178276 - DNA, 689 bp, Arabidopsis thaliana landsberg
atgtgctttgaatttcagatgagtaataagagatcggtcgggagagtattgagtctagatgatgatgaagcagaagataagttttacaggctcaaggttcttttaccaaacagcacaagtgtgacactcgcacttaccaaccctgaacctagaatgtcaatgaataattttgttaacttggtgaaagaggaatatgagaaaagcctgaacaaatgtgtattgtccggtaagaagaggaagcgggttgattggaatttggctgtcaaatattatctcgagtttaacggcgaaaagattaaagaaatcgttcgatttgacaagtttaagcctgatttgtgcaatgtactccgtcttgatgtgagtcgttgttttttttgttttttcattgtgctacttgctctgttactacacaaacttatagctttgagacagcttttgcggatctgattttaagtttctcaataataatacttgtgatagttaacatatataattacaagtttatgtgtctttaaaatacaaggttattacttaggtccgagtatgaatttcttcgtttttgttggttttgtttatagatttgtaagacggcgcgtacagagaacccgagccagagtgaagagtacaatccttcggaagaacaagtgttgcttggagatgataatgaagaaactaagcaaatttcaatg

SEQ ID NO: 178277 - DNA, 613 bp, Arabidopsis thaliana landsberg
atggagcagaacgagaaaacaagtctggtcgatagagtattttcttggtctatcaaagatattctcaataaagatttctacaaacaaaaggttttgttctcttctaactcttttctttaatatctatcttattattttgatatttagagattagcgtttctatattttgtaacagttgaagacagtaccggacaagtttagatccgttgatgaatattatcaatgttttgttcctcacctactcattgaagcacataccgagttgttctcaagcctcaaatctgtatcgaaatctccttttgttcaaatacgttctatggagacaaagacgaagcaatcaagtggaagcttatcaaacaagttgttctacgatatgtcaataaatgatgcattgagtattagagaaaagtatcagccaaaatgtggagatcttattgctttgacaaaggaaaggcctagaggagtcgatgacttgaatcctttacttcttggttctatttctgttgatacttatccaaatatctctgttattttgtcaagattaatattccatgatgagaaaaagtcacttggtttcggtgttcttcttatgaattcaactacgaacatttga

SEQ ID NO: 178278 - DNA, 838 bp, Arabidopsis thaliana landsberg
atgttggcgagagctccaccggcttattttaatttcccggcgaggaataatactatctgtaatcggaatgagattgtgcggttgtttcgtaacggcggaggagtggtagctagaggagctggtttcactcggcgaccactggaaacttcgagctcttacgacgattccaccgatgacggattcgttatcatcagtgcggcagataaggagaatgagttcgctcctccgccttcttccgatttactctcttcgattccgtcaggtaattttggttagttgctagcttttgtctccctcctcgaattgtagtacctgtagtggattttgtaaaattaggtattaggaactgtgttcgttattattattggttttgatgatttatttggtgttgtagaatctgcgagaagaaatggttcgcgttcgagaggtctgactgcgagttttggaaggttaaaggcccagaaagtgaaagctcttgttgggaaggtaacgcagaagaagcagcatatgagtcacaatgaggaagaagacgaggatgacgcctctgatgagaattattctgcggatgaagggtttggttcatcatcaattctggatttgatgaggaagaagctggctatgaaggctattcctagatcaggaaaatctgcagagaggaacgaggtaaaaagagctagcaaagtgcgggaatctagagagtcaagaagagatttagatagattggaaggagatgatgaagatgttgatgaggtttcaaatcctgacaggttttctgataatcagagagcagggtcgcggagttcatattcgaaaggtggttatgctgctaactccaggc

SEQ ID NO: 178279 - DNA, 687 bp, Arabidopsis thaliana landsberg
atgcgttgcaagagatgcaatggaagcaactttgaacgcgacgaagacacggggaattcgtattgcggtggatgtgggacattacgagagtatgataattatgaggcacaacttggcggcataagaggacctcaaggtacatatatacgagtaggcaccattggtagaggctctgttcttgattataaagacaagaagatctatgaagccaacaatttaattgaggagacaacagaaagattgaatcttggtaataaaactgaagtgattaagagtatgattagtaagcttactgatggggaatttggacaaggtgagtggttccctattttgattggagcttgttgttatgctgtggtaagagaagaagggaaaggtgttttgtctatggaagaggttgcttatgaagttggatgtgatttgcatcagttagggcctatgattaagcgtgttgtggatcatctagatttggaattgcgagagtttgatcttgtgggtttgtttaccaagacggttactaattcaccgagattgactgatgttgatagggataagaaggagaagataataaagcaagggactttcctgatgaattgtgcgttgaaatggtttttgtcgacggggaggagaccaatgcctttggttgtgtctgttttggcgtttgtaattcaaatgaatggtgtgaag

SEQ ID NO: 178280 - DNA, 426 bp, Arabidopsis thaliana landsberg
atgcctgcgtcacatgaagcttcaaattacgatgaggtttctatgcagcaaagtatgctcttctctgatggtcttcaggtagattctgaatttgcaaaatattgcctagtttctgataaattgttcaaatctccatctgacttagaaggacaatgctataataccaagcacatactatctttctatatgtgaaaccgatgacaaaagtaaaatgataattaatggtctctgtgattgaagatccaagtgttgttacaatgctgaatcatatcttgttttctaaaatctttgtaggtttatttgacaattaattgaaaggttttctgctcttttatttcctcaggacttgaagaatctgcgagcgcagttgtattcagcagccgagtatttcgaactatcttacacaaccgatgataaaaagcagat

SEQ ID NO: 178281 - DNA, 4291 bp, Arabidopsis thaliana landsberg
atgttcaaaggatcgtcgaaacgtggcggtagaggaggaagtggtggtgggggcagtggaccttcccgtaaccgtaattcattccctcctcctacaaaccgacatccttctcccatcgggaggatgtcttctggtggtggtggtggtggctccgccgctccacgccagcggagtaattctactagcgttaaggcggctgcgtcgactacggtgtcgtcgcggacggttgaggaaacgtttaatcttgttccgagggagagttcttcggcttttggaatgattataaggttatctcctgatttggtggatgagatcaagcgtgtggaggcacaaggtggagctgccaagatcaagttcgatgcgtttcctaacaatagcactgagaatgtgagtttctactgaattctaaaatctagagatagaggatttctctagattgagttgaattgcttcaagctagttgctcttttttgttggctgaatcttgaatttgcttcctttggtagtttatacccctcgaacatattggcaattcactggaatcaaggtaccctagataagtgaaattggggacaattgttcctatagaaattagatggtaatgtgatattggacaagaacccaatagtgtttggcatctctatagctgttcctatcctgtggaaaaccttttacgccattctaaattatagccctggagaagattatttgttgcatagaattgttgatgaagattccgttgctacttgggtgactattgtatcataaattccttggccaattctttgtagacgttgacttgcttattggttgagcatgtattgtatggtatgttggtttactcattgaattgctgctttggtgtctctttactctactggtaactttgtttctttgtataactgtggttttgccggtagtactggttgtcaattgaatttatcaacgcccttctgcatttcttttggtcatttgtctcccactgcatctgggttttgttgttactatgcctttccttcaggtatcgttttgggtttttatttagttttttttgaattttgacaccgtgaagctgttttggatcttgatataaacagataattaatgttggtggaaaggagttcaaatttacttggtctggggagaaaggtgagttatgtgatatatatgaagaacatcaaagtggtgaagatggaaatggtttgctgattgaggctggatgtgcttggcgaaaattgaacgtcctacgaactctagatgagtcaaccacaagccatatgaagatgcgctcagttgaagctgaacagagaaccaaatcacgcaagtacaagttctaaccaaacatttttgttgcatctcaatgtctataactttttatctgcataccctgtcctttagctgcaaaggtgtctgctctcttagtttttctggttttgcagtcttctataggtagggtagtctttttatgggtcttggcacagtagcatataaggatataacctttggtggagttgtgaacaaactatcggtatacgcattgttcatcttattgcagctaagctgctgtggatgtcagtctctacttacatttggagttagttatggcttaaatgggtttctcttttagcttactcatattttttcaacttgaggtattttgagctgtttcgtgaaagccagactcacagaaaatttctcactgtgtgtaacaaattgcatacttttgtgtccataactttagtctaatcaaagtggttgtgcctgaaatacccttatacttttgcttttgtcagggccattgttttagatcctgggaatccatcagtaacgaagcagttagctcatgctgaaggtaacatttctccttttcttttcaatgcggcggtttaagaacatgagagtagatagccattcttgtttgaaactgaaacccatgcgcttaattttactatgtggcaggttttcttatcttttgggttcaaaactttttattatctagcatgtgattatatttgggtataccaataatattgtaacatctaccatgtactttcaggaagtccatggagaatgtcaaataaacagaagaaggaacctccacctaagaagcggaaagttgatccaccaccaggtatatataaacaaactttgcaacgagcctgtggtaacacattagggtttcaaatactgttggatgctatttatattcccttgctgtttttctaatgctacagtttttcacttgtggtactgtgacagttccagtcggaggtccaaagccttctttcagaccaggggcttctacccctactatgaaaaataggctatcagcttcacccggaccgtctcctagtaatcaatacaatacccctccatatgggattgggaatatggctaaaactcatgcagctaacgagaatgtcacaccagtccagacaaagggcagagtgaacatgatcgaaaaagaaccatcagcctggaaaaataatgtattaagggacacatctgggcgcgaagcaattaatgttaataaagaaattgacttgcagtcactgctcgttgatatcctaaaagaggctccaatgagcttgaaggtaatacattgatgaaacaccagatttatggctattttcgaatccaatatgtgtttcctccgcgattaacgccactctctccatttctctctaggctttagagaaagctgttggagataaagttcctaatcccgcaaagaagattgaaccaattttgaaaagggtaagtcttgaaaagattggtgtttttctttctttggtatgtattattgtgtccctaattgttgttgataaccagatcgcaaatttccaagctccaaggtatttcttaaaaccagaagcagagttggaaagctataaaaaacattcacctgatagcggaaggtacgtgtactgtagatgatagttttgaattttccctgcagaatatgacactctaaattctagaaagtagaatcggcatattcgcataaataaaacgtatttacaaaattaagtaggtgcatgaggataaaatctaaagaataatacgaagcaacattgcttcttttagtgtagcttgaactctaattgaataattttattatccaatttagtatggagtgaactcgagaagctataaactacaacatatgcatcttctatacttctactgtgtcgtcttcccctttttgctgtatctgttcttagtagaatttttatttttcagttcacctgaacaccaacaattgctgccagtcactgagtgcagtcgcgatcagttacctgttccaggaagaaataacacagagaaattttctttgtgcgagcagaacggagaaggttcactagactgtttacctgtgcatctagtagagcaactgagtacgcaggaaaatgttgacattgagcatcattcacctggtatttttcatgaggaaaaacgatctgagaatagagaagcccaggctcgtagctctagtgatagtgacagtgatagtgataacagtgacagtgggagtgacagtaaaagtgcagctggaagtgacagtgggagcagcagtgatagtgaggcttcttctaacagtaaggacggttctgatgaggacgtggatatcatgagtgatggtgacagagagcctctactgacaacacagtcccttgaacaggatgcaattgatctcccaggtcatggttctagtgcagttgaaatcgagggtcataattctgatgctgttgacattgacggtcatgattctgatgcagttgatattgatggtcatgggtctgatacagttgatgtcgaggggaacagttcagatgagggtcatggttctgacgctgacagaaaaaaaaattctgataataactggaaaatggaaacaacaactggtaccagtcccactgcaaatggagaagttggcatttcagggcaggaacattttacttctggtcacgacaacctacgagaacgccaaaattttattggacagttgtttgatgacacagagaatacaacaaagaataactttaaaaatgacaaacgtgacatctccgagaggctggggaaagaccagaaccaaaaagcccttgattttgagcactacagtcagaaatcagcacatgagaaaaatagaaaatcccagagctgcaatcagttatctgccgtaagtaaagattcacagcattcagagctcaagtatgatgccgaacttcgcaacgcttatgccagtcaaacgatcgaaaaacttcacaggacttctgaagtcatctattga

SEQ ID NO: 178282 - DNA, 105 bp, Arabidopsis thaliana landsberg
atggccttctccggctcgaggttccagtcgtggtacaggtccaggtccgggatctcgcgggccatcaacgctgcgtcggccaggccggaacattcgtcctcgaag

SEQ ID NO: 178283 - DNA, 533 bp, Arabidopsis thaliana landsberg
atggacttgcatgaagttaaggtacaagctgcttcctttattattggcttgatatacatgttttgagttaactttgcatcattgaggtattagtattgactagaatatctattaaacaatggaggacaaatattctgcatgtgtgaatagagaaaatatgaagacctgccaagaggcatttaatttaatatggacattaggtcttgttcttctggtttgacttgcagcactagaaatctaaaaaaaagaactaattatcactcatgtggtcaaccttccccaaacaaaatataattgtgaatattttctgaggtcattaatgtagataaggtctgatgattgcggaaaatatggttaaatttcttgagcctgcctttacattgtggctagtcagcttgtccagatatatctttttccatatatatagtaggctagcatgacaaggttatatttggatatggaaccctgagagatcatttttgccacaggaagctcggaagcgctttgacaaggctagccttacctacgatcag

SEQ ID NO: 178284 - DNA, 601 bp, Arabidopsis thaliana landsberg
atgcttgggaactttagctttgttgattacttcaagaaagaagcgataaaatgggcatgggagctttcaactattgagtttgggctaccagctaatagagtttgggttagtatatatgaagacgatgatgaagcttttgaaatctggaagaatgaagttggtgtttctgttgagcggataaagagaatgggtgaagctgacaacttttggactagtggaccaactggtccttgtggtccatgctctgagttgtactatgacttctatcctgagagaggttatgatgaagatgttgatcttggggatgataccagatttattgagttctataatttggttttcatgcagtataacaagacggaagatggattgcttgagcccttgaaacagaagaatatagatactggtcttggtttggaacgtatagctcaaatccttcagaaggttccaaacaactacgagacagatttgatatatccaatcattgcaaagatctcagagttggcgaatatctcatatgactctgcaaatgacaaggcaaagacaagtttaaaagtgattgcagatcacatgcgggcagttgtctatctcatatcagatg

SEQ ID NO: 178285 - DNA, 47 bp, Arabidopsis thaliana landsberg
ggtctgtggtggttcgcttgcttcgtccggatgcattctcgcagatt

SEQ ID NO: 178286 - DNA, 58 bp, Arabidopsis thaliana landsberg
atgcccctcggggtgttcacttatacggtgctgcggccgctctacgtgtttttaacgg

SEQ ID NO: 178287 - DNA, 112 bp, Arabidopsis thaliana landsberg
atgccgcacaaggtcattgacatgcacttccacgaaagagaagaagaagaagatactggtgagagtagatcatcctcaagaacaccgagagggcatttcgtcgtttacgtcg

SEQ ID NO: 178288 - DNA, 144 bp, Arabidopsis thaliana landsberg
tcattgctatcatcgttttgcgatgaagatgactttgaagactcgagcgaggagtggtttgttgtctttgccaagagagctgtgaccgctattgagtcttccgtacatacaacaacatttattgaatctttcattcataactag

SEQ ID NO: 178289 - DNA, 103 bp, Arabidopsis thaliana landsberg
atgctagcagttcagcacaacatcagattcactcaactgatcatctgtagggtttctcacaccctggcagaacgcacagcccaaatggaccctgtatttccta

SEQ ID NO: 178290 - DNA, 571 bp, Arabidopsis thaliana landsberg
ggttttcttgtttcttagtggacaagaaaccagtaataagggctataacaatttaaaacgattccgatggcagaagtaccgtcaaagttccaaaaagacctgcactcctcaggagcctcaagaagattttgtctggggtaatgctgggccagatgtcactcttgcagcctctaatacgctcctaagctcccatgctacaccatcgtatttgataaacaatcaagctgcgcctagaggatcatatttcatgaacaatatcccgtatccatcaaccagttgcctgccagtgaacaacaacaactgcttcatgaccaacccttccacttatattgaccaattccagcaccagctgcagcagcagcagcaacatcaacagtaccagtctactctaaatagtatatctgccatgctaaccaagcaagaatctagacacgtgccatcatcagccatggaaaattccgagccgctcatgatctataattcaaatctacctttcggtatcgacgagtgtttcccacctgcaggattcaacattttcgatcagattggtcacaattgttatccaatctaa

SEQ ID NO: 178291 - DNA, 210 bp, Arabidopsis thaliana landsberg
atggaggaggaatttgttatgattgatcttgatgaagtttcaaggcacattgagattccatcagatgctccttatactttatcagttagttcaaatccatattctttagttaaactctttgcattggttttgttttgacttttgtttattatttctcagggtttggatactttgaatccggtgttgaccattgatggcaaaatcaagctg

SEQ ID NO: 178292 - DNA, 51 bp, Arabidopsis thaliana landsberg
atgaccgggttaaagccggttatacagcgacgtaaagaatctgacaaacaa

SEQ ID NO: 178293 - DNA, 504 bp, Arabidopsis thaliana landsberg
atgacaatcctgagtcggtcactgaatctcaccatcagatattgtggtcacttcttggaaggtatgatttagtacttctacataggaacttttggaagatatacatacatatctcgaaatatctcagattactttgttgattttcaatgattcagcaaagaggctgttcttgattcaatagtgtatagttatcgacacggcttttcaggctttgcagcgaagctcactgagtcccaagcccagcaaatttctggtactttagagttgaactcttttctgtttcttgatttgacttaaaccaagaagttgtttttttttaaaacaaatcaatgccctttcttgaaacagaactgcctgaagtagtacaagtcataccaaatacattatacgaaatgacaacaacaagaacttgggattacttaggtgtatctccgggaaattcagatagtctcctacaaaaggccaatatggggtacaatgtaatcgttggagtcatcgacacag

SEQ ID NO: 178294 - DNA, 308 bp, Arabidopsis thaliana landsberg
atgcagattcatgttacaagtcttgatttctgtttactctctgcatatgctccgttttgggtttacaacgacatgaccacccgaaaatggtgagttctatgtacaactagtttgcggtgtttactcactcaaacctttttctgtttctctaaacgcactgcttctttatcaggtttgataaaggcagttggctgttaccggtatcggtgattccattcttgggaccttctttgtatctactcctacgaccagcagtgtcagagacgatagctcccaaagatactgcatcatctgacccaaatcaatag

SEQ ID NO: 178295 - DNA, 55 bp, Arabidopsis thaliana landsberg
aacccagagtgatcgggtatcaagactcaagaggatggagtatgaatatcggtga

SEQ ID NO: 178296 - DNA, 273 bp, Arabidopsis thaliana landsberg
atgcttgaaccaatggcatttccgttaattcaacgaacacgtaaggtcaattttatcgattggcacacgtgacgctcccgagacgactaggctcatacgtccacgtcagctaatcaccgagccatttcaaattccaatcgtataccaaccgttcgaatgttcgatggaactagagccgttcgatcggaggaattcgaaaattctcgcgatacgataaaaatcgtgcgttacggctctgtcggaacaaatctaaagctgactaaacgactctga

SEQ ID NO: 178297 - DNA, 649 bp, Arabidopsis thaliana landsberg
gatgagcagcaaccgacgcccaagaaggacaagaaggactcgagagtcggtgctgttgctactaagaacatcacgagcactcgactccgctcggagcgttcgacgcatgtggacgaagattccgagaagcggcgccgagaccaccagaaggagctggccgcaaggaagcaaaaagaaggcctcgccatgttcgctgagtcgacgagcgacaagaacggcgtcgagatcaagaagttcaagcgattcgagtcctacaaacgagacaaccaattcccgcccaaagtcagggaccaaggtatcgtcgtcgaccagaagaacgcgaccatcgttgttcctgtcatggggcgccccgtcccgtatcatatcaacaccatcaagaacgctagtaagagcgacgagggtgaatggtcattcctgcgtatcaacttcctgtccccgggccagggagttggccgcaaagatgatcagcctttcgaggatgcctccgcccatttcgttaggagcctgaccttccgatctctggatggtgatcgatatgccgagattgcaaatcagatctcgaacatgaagagggatgccgtcaagaaggagcaagagaagaaggacatggaggacgtggtggtgcaggataagctagtcgagattagga

SEQ ID NO: 178298 - DNA, 533 bp, Arabidopsis thaliana landsberg
gaagcagcttggcagcttggatcacaggccgaggcatgttggttaatggcaagaagcggagtccgataagcgcagatgtatttggttctgcttgttatacgttccaaaaaggacggtttagtaagttgtatggcgatcttacccgagtagatgctcgcgtggacctaccctcagcttttgcccttgctaaaaaactcttccatgcaagtagtaacaactcagacgacacattgtggtctcccagactcaacctgatattccagcaacaggtattaagcttttgtccaaagatcaaaagatgtaaaagagtctatgatgtttaagcaattcccactaatcacactgttatgcaggttgcgggtccgattgttttcaaagtagactcgcagtttcaggtaggagctgcacgcatggaagatgtgatatacagtctgaattactcgttgaggcttcttgagtctggcaaaatcgtggcttggtattctccaaagagaaaagaaggcatgatcgagctccgagtttttgagttttga

SEQ ID NO: 178299 - DNA, 941 bp, Arabidopsis thaliana landsberg
atggcatccctactcagagctaggccaccaggactgagtcggcaacagcttcaactggcggtaccacccggggacggtcgaggaaccacaatcacaactcccctccccgggacagacatcatccccgacgacaggaggacacgtgcggagtgtccgctcttactccgcgtctcagggccatccaatggcctcccaacttcaaggtatccaatgttgacaaatatgaacctaagcaagatccatggggttggttggctgtctacaccaccgctgctcgagctgccggggcgtctgaagacgtgatgaccgcgtacttacccattgtccttgggcaagacgcgctgcaatggctgcgacatctaccccgacactgcatcgacgactggaacgacttcagtcgacgcttcaccgccaactttgagtccctcttcgacaaaccagcgcaaccatgggacctcaaatccatcaagctccggggggacgaaactctccggtcatacctcaaaaggtttcagaccatgagaaatcgtattcccgaggttgttgaagcagcagtgatcgaggacttctaccgaggatctaatgacccggccttcgtccgagccatactacaaaaggcgtcgataacttccgaacagctgttcagggaggcggacctctatatcaccgccgatgagcgtgcccaggacctcatcggggaacaaagcccgctccatctgcaccacggcgtgacgggaactagcaaaccgacaagcgctgggagaagaggccttgtgaagaagtccatgccgccggaccacccgtctctcgtgcccgaggggcaccccgcggaggcgaacgaacattggacgacatcctcgacacccagtgtaacacccctggtgttactgttactaaaacttgagcataacatcatgagcatcagcatttcatatgtttga

SEQ ID NO: 178300 - DNA, 514 bp, Arabidopsis thaliana landsberg
atgcaaaaacagatgcaaaatcctagacagaataataacaagtctgaggtaactactgaggaagttctgaagaatgctgatttcagggtgagtgtaatttgtaaatatgtttcacaactagtgtatcatattcgtttttgtgctcacctatgaattatgttttgttggacagaatgttaggttccttgcaaacttcatcactgaagctgggatcattattaagaggaagcaggtcagatggatgtttcttacttttacgatacataatggcgttttgctagttcacatgatgaatccctctttttatttatctcttgcacagactggcattagcgcaaaggctcaaagaaagattgctagagagatcaaaacagcccgtgcatttgggctgatgcctttcacaacaatgggtacaaaggcatttcagttcgggaaaaccatggagaacagagaccaagatttcgagtatgaagtgcttgatgatgatgatgagtttgacgagggaaatgcttga

SEQ ID NO: 178301 - DNA, 250 bp, Arabidopsis thaliana landsberg
atgtatcctaaacgcaacttccctgaaaggtaagaagagtaagaacaaacgcttgatttcaaactttgagatttcggtctgatctgatggaatgtttattggcagtttcacggaggtaaaagagaaggaagtgaggcctctaagtgcagagaagttgaaaaacttggggtggaagtttaggccattagaagaaaccattgatgattctgttgtgagctttgaagcagctggtgatcttccaaaggcataa

SEQ ID NO: 178302 - DNA, 1526 bp, Arabidopsis thaliana landsberg
tactaagagtatacccgtcttttgatttgtggcgacttccttttaccgaagagactccttcggccggtgagttttcggacgcagatcatcatcagattcttgtctctctctggtcagtttcatagtttttttctaagtttgaattctgattcttaaagctcgtggcttttgagctgggtttgttgacttgatcggatttgacgcctcctaattgttgcgaattgaattatattgtttccgtgttgtgatttgtcagaagctttgacgatctagggttgtatatcaatggtgtcttagcgtagaattgagtagaaatccgaatgatttgaagaaattgtttcaattgtgcttagattttatgttgcgtattccatttatatcgacaaagttctaaactttaagatctaactcttccctgcacttgcattgtgtttatggttttctctctcagttatctgagtgataagaagtattttcagtgcttgaggatctgcaaaagatatccatctgcggtttaacaatggtaaattctcagtgctaattcaggattatgtgatgtgaagatttttgtgagatttttttttttcctctcatttgcgtttggtgggatttgattcagcattgatgctacattgtaaggtttaatgattgatggagtaaagaaaactaatttttgccattgttttgactgatcatgcgtttttttgatgccatcctttttggttttgcaggttctattacagttggatccattcctcaatgaactcacgagcatgtttgagaaaagcaaagagaagggttctgtgtgggttactttgaaaagatgtaactttgaaaatctcatcctccacttttgttatatgtttatacttgaaatatctttttgaagatatcttatatgatttttgttacttgtgtcagcatctctcaagtctaaggtgcagaagaggaaactgagctcagttggagaatccattgaatacagatgccttattcgagcaaccgatggaaagaaaactgtttctacttcggtatgttctacacattatctcaagattatgatctcgaaccatgtatgtttccaaacgtaggaactattcattagtaaactaaacagcacatcgattactcgagatattgtttaagagttactactctctttggataatgaactagaataaaagataacattctctcttaagtctctatttatccttccttgcactattgtagttgccttctagcagttgaggaagtagctcggtaaacaaataaaacgattgaaaacctacccaagttcttgtaaagtgatactggtctacgatctgtaagaagctaacttgttacaatgctttcttgtttgtaaggttggtgctaaggatcaccagagatttcaagcatcatatgccaccattcttaaggcccacatgactgctttgaagaagagggaaaggaaagaccggaagaaatcgacagaggcagagaagaaagaaagcacttcaaccactaaatctaagaaactttga

SEQ ID NO: 178303 - DNA, 95 bp, Arabidopsis thaliana landsberg
cggatagacaaccatatgtggagcagaaccaggtcggcaagcaacgctatgcagaagagtatgcagcctaccgtggtgcagccgctgaacagtga

SEQ ID NO: 178304 - DNA, 469 bp, Arabidopsis thaliana landsberg
  unsure (1)..(469): unsure at all n locations
atgtcggtggtgctggcggccagtcccgacgagcacctgctggtgtgcaagggcgcggtcaagaaaatgctgtcgatctgtgccttcgcgcagcgcgatggccgcgtcgagccgatgagcgaggcgcgccgcgccgaaatccgcgccatgacacaccacctgaacgaggatggcctgcgcgtgttgattgttgcggtcaaacgcgcgccggccattgaacatacttacggcgtggccgacgaaacagggctgacggccatcggctgcctggcgtttctcgatccgcccaaggacacggccggcaaggccatcgccgcattgcgccagcacggcgtgcaggtgaaagtgctgaccggtgacaacgaggcggtgacgcgcaagatctgtcgcgaggtcgggctggacgtggccgattccgtcatcggcaccacatctgacgatctggacgacgcggccttggacgncactg

SEQ ID NO: 178305 - DNA, 469 bp, Arabidopsis thaliana landsberg
  unsure (1)..(469): unsure at all n locations
aagaaaataccatcgaaaccggcgaagggtttaaaaataatttacccttaggcgacctttatgaaggctggtttcttgattatgcctcttatgtgatcttggaccgggcggtacctgccggcgatgatggcttaaagccggtacagcgccgcatcctgcatgccatgaaagaaatggacgatggacggtacaataaggtggnnnnnnnnnnnnnnnnnnnnnnnnnnnnnnnnnnnnnnnnnnncgcgtctatcggcgatgctttggtgaatatggggcagaaggacctgctgatagatacgcaggggaactggggcgatgtacgcacgggggacgacgcggcggcttcacgttatattgaagcgcgcttatccaagttcgcgctggaagtggcttttaacgcgaaaacaacgacctggcaattgagttacgacggccgcaaaaatgaaccgctgacgctgcccatgaa

SEQ ID NO: 178306 - DNA, 804 bp, Arabidopsis thaliana landsberg
cgtaacattgaagtaagcggtaacatttcggaagaatctctttctttaggtgagttttcgttaatcttcggcgagtttggttaaagtaatggtttttgttctgtctttgcattcttgagatctattgattcggattttggattcagaacaatgttattggtttgctcattgtttcagattactaactttgtttcttctttctgtgtgttttcagttgatatgagccaacaacgtacacgctctcggaacccgttcaagattctgtttacgaagaacaacaatgctcgattatcgccaaagcttctctcactgttgaacaatttcgagactaacttgacggtatcgattagagaacttgtaccaaaggataagaatgatatcgttagtgtttcttggatgatacaagccatggagtctctttgtgagacacacaagagtatcaggacgctcgtcaaggatttagaggttccagtatcggatttggaggagaatttcatttatatcttctctgactttagcttgaagcgggaactctgcaacgcctttacctcagagatatatcatttggaacatggcaatctattactaaagtttgcttttagtaagctggagacaaacagtggcaatattcttgagcgttggaatcagcacatggtttccaagaacccgagtatcgaaaactggggcgcggttttgagtaggcttgttgaatcgatggatcatcatcatcatatctccaagaagtggaagaagaaatactctgcggaaggaaaagttctcttacgagttttatacggtgtaaag

SEQ ID NO: 178307 - DNA, 629 bp, Arabidopsis thaliana landsberg
atgcacgtcacttctgaacagagtagaagaagtgttgaacactatagcggattccgaatctacgaaaatggtacttcaaacactgagaaaccccataggtcgaacgaccatgtttgggtctatgtaatagtatcaattatggattttagaagtatctatgtgtgtttggcaggtctcagaagcaattaaaactggagctagggttatgaaggacatcaagatcagtgcagatgatgttcatgactatctagaagaacttgaggaaactattgaatcacagaagcaagtcgaaaaagctctcggtaagtggtgttttgtcgtttaaacatacatacacgattacttcatcaacttttgtgtttagctagattttttctgttaatgcggcagaatcagctccatatccagatattgatgatgaagatatcgaagaagaattactggaactagagatggaccttgaaagtgaaagttctcaggtcctaccagcgacttcagatactgcagattcactgactgagatgttctcagagcttaaacttggcaagacgaaacaaacattggaagagcaagctactgagccagctcagatgaaagatagcggaaaaaagattcttgaagcagcatag

SEQ ID NO: 178308 - DNA, 484 bp, Arabidopsis thaliana landsberg
atgccggacagaaaaaatacagaagagcagaaaaaagcattcgcagagatacttacgaaagtgggcggaccagtgcaggaaattgttcatgatgcgctccaaaaaagcagtgttgatattgtacaacaggcagaggaaattcttgaggaagatatcaatgacctgaataaacaaaatgaactggaagaaagtctcaggcatgaaaactcccttatcggtcagggttttcgtggagcttcgtggttattcatctatacaaatagcagggaaatctttaactatgaactgggatcagccgatcaatgggaatcaaaagatggtttcgaccttatccgaaatatgcgtatcatagatgaaaatacggttcgggtactagataatcaagtggttaacacaagcaggaatattgctcgcgcgaggatcgatcaaacgatagtgccaaccaatacatggcccttatttgccgcgcacttccatgctcagg

SEQ ID NO: 178309 - DNA, 98 bp, Arabidopsis thaliana landsberg
atgcattcgaacagacgaaacgaaagaaaaaaagaagccaaagattcacacgtgaaatacaggggaaccctagaaattagacgacgccgagaagaaag

SEQ ID NO: 178310 - DNA, 3528 bp, Arabidopsis thaliana landsberg
atgattcgtctccgtttcaatattctccgatcttcacaccgtcgtctcttccaccgtcttcctcgatttttctcctcctcttctgcgccaaccaacggttcctcaggtccttccttgaatctcattaaacctaaactcacaccgtctccgccgccacaccaatcacgaggtcttctccggtcaatttataccgtctcgccttcttcctccttctctaagaaatccgtttttgttctctccgccgccgctttatccaccgctattgcgtattccgctgttttcccttctgatcatgatcaatcaaatcgtagccctagcggaaacagccgtatatacgagtctatcgaggacgctgttcagaaatccggtaattcgttgaggagagtggttcatcatgctagacagaccggtgttgcggcatcggttctgtggcagtcgcttaggtctgtgctctcttcagctaatcatgaggtgcgtgcgggattcgagctgcgtgtggctgctcttttagccgatatagcgtccgcaaatgctgctcgtagagccgctctcgttggagctggcagtggtgcggtggttgattggttactggagacggtggccattcccggcgacagaattggggcacaggacgaagcggctagggctctagcttatcttattgctgatccaacggtgaggaaagacgctctaggaaggcccgatgcagtgcccaagttactgaagttcgtattctcgtgtcaaccaaaaaacaaaaaggtccgttttgcttccactagttgcttgaaatgattaaatttcgagtgattacttgttctcgttattaaatggattagtctggttagatctaatggatagatactagccagctgatatgactctaggtaacatttttggatttagaagaatcaaagcacatatctatgatcagcaagtagttgttgtagaaaaatgagttttgtatatcgctagggttgtttatcatgtgtcaagttgtagatttctctttctcattaacacactagaagctttttgatacatctgattcttgatactgttatgcttctggttgtgttttgccattgatatatagcttttctttgggagcagcattcaagacgtagttcattcgatatttctgattctttgaaaggtaggagcatgcttgtggctgccataatggatatcgtcacttccaactgtgacactatagaaaagacacctttcaagtcatccttgcctggaaatgctacgatgagagatattgctgctgcaattcaagtaattgaggaaggtggtatgtattttgatgagccagaaaaagatgatgacagtgacgatggaagaagtgggattaagggaattggaattaaaatccttgaaggaaccacagttctgggattatcaagaaccagtgggcttgcgccgttgggtgaccttaatgctaatgcgggagaggagactcctaaaacatttgcattgcttagtaaacatgataattcttcacaagctaatttgtcatctgccgtcattcctggcctttgggatgatttacattgtcaacatgtcgcagtgccatttgctgcgtgggcactggcaaactgggcaatggcttctgatacaaatagatctcatattcaagaactcgatcgtgatgggcaagttgtcatgacagctttaatggcaccagagaggactgtgaagtggcatgggagtttggtggctcggctgttgttagaggatctcaagcttccattaagtgattctgtttccgactggagttccagtttacttgccactgtttcacatgccagtaaaactgaggatatctctctggctcaagttgcgttgtctgcctttttagtttctgtcgacagaagtgacaaagcacagaagatggtaatgcagaagggtcttcatctgatgagagatagtgctaggaaaacgagaaaacacaaaacagtgcaagaaggtttgtcaaaggctcttgaattactctgtgctggtgacatgcatttatctcttgaagagagtcagaaatggtccggcatactactttcatgggttcttggaaaagttgcatctgatactgttcaatcttcagcaagaagaatcctttcacgcacctttgaagactatggaccacactctgtcccgatatctcagggatggttgacccttataatgaatgagattttgaaccacagtaagacggtgtcagctaaaggagctagcctacctaaaaacgagaaacctaaggttcataaaatttatggtcattgattctgcatctgaacagagaatagttgagaataatgtctattttagtttagttatatctttcaatttatttttgtaacaaaagctattttctttcgcatgcaggtagatcagtccaaagttacttctgctactcagtcaaccaatctgttagcagttgctgttgttaatcttgccatggctcaactgggtacagtcccagagtctgtcaataatgttccactggcagatctgctcctttcagagccttttgcggtaccaattaagaatttaaagaaggatagccctcctaaatttaatgctgctgagtctgcattggcaaccattaaggcaatcaagtcactgacggatgtttgtgctgaagattctgtatgccagaacaaaatagttgattttggtattctttgtttactaaggcgctttctgttaagtgatgattatgagaagctaggtgcaatagaagcttatgatgcatccagagcccttgaggctcgagaccgaactccagatagtcttggtgaatcttcaatcacagatattcaggatccatgtagtgtcagagtcccagctagtgcgcacatccgaaggcatgctgcgagattgctaactattctttcgcttctaccgcaagtccagaaaatcattttagctgatgagacatggtgcaaatggcttgatgattgtgcaaaaggaaatatttcctgttgcaatgaccctaagacacaaagttatgcaagagcttctctgttaaatgtatattgcaatcagcaagatggtagtggatcaggagacggtggcagttccaagccagacatctctaacatgaacagcaactgtcctcgctatggagacatgatatttttaattaatcccggactaccccattggaagtgtcatgaaaaagaacgtcaaagtggtaagaagaacgaatcctcaagtgaaggtgaaccagcaaatgttactgatacagtcggagaccatgttgttgatgctagcaatctgtctagctccatagatccttccagtagtggttcgcatgtacatgatcctgaatttgatgttatctttcttcatggcaggcgtggtgggccctttaaaacttggcgaattgctgaggataaatcttctaccaaatctggcttggtggagaagattgaccaggaagcaggaaagctgggaacattttggccgagcgagtggctttcaaatgatttccctcaagctcgcttgtttacccttaaatacaag

SEQ ID NO: 178311 - DNA, 203 bp, Arabidopsis thaliana landsberg
atggagaaagtcaaattctttgcaattatctttacggtgtcaatggttatgacaatggtttcggcggaagagttaccggtgaaagtgacgggcaatgagatgactcttgcggcggaggctgccgcttcgagtttcaaaagcagcgccggagaggctgctcaaggagccaagtcatgggctgattgggctactagcaaaatcag

SEQ ID NO: 178312 - DNA, 71 bp, Arabidopsis thaliana landsberg
ttcataaaccaaaaattttaatactgaaaattttgacctcaaaccgaaccgaaatccgagttgaagattga

SEQ ID NO: 178313 - DNA, 466 bp, Arabidopsis thaliana landsberg
tcgaaagaaagttgtagatttggtggtagagaaggatggtggtattcctggggtcagtaggaatcttgaaggcgaattcctgaagaacgttgatgtaaaccaatgtgacattgatttcattgcgaggtctcctggtgcccggaatttacgcgcctcatctaaggcgaggagaaattccagagcgaagcaagatccaaagaagaaagctgtcgttaaagagaaaaccctaaatgagctaaccgtcaaagaaccaggcccccaaaagaaaagaggaaaaaagatgacggttccaaaggtgcctacaaaggtgaaactaaaaatgccaaaatcacatgctattgatgcgaagataggagatgctgcttctgtccccaatatagttgaggaagtcaaggaaaaagctgacaagattgacggtgagaaggacaatgatgattctatatttgatattacagaccagttctag

SEQ ID NO: 178314 - DNA, 486 bp, Arabidopsis thaliana landsberg
atcggccagggcgtcggcggcggcagcggcaccgccgccgaatcggccttcgcgaccgtcctggtccccggcgtggtcggcatctccatcatgttccagggcgtgcagtccatcgccctggccatggcccaggagttcggcttcacccgggagatcgaggaccgggtgcaggcgccctgccccgtctggctcgtggccatcgccaaggtgctgtccggcgcggcgcaggggatcatctcggcgatcatcgtcctgccgatcgcctcggtcgtgcacgcgccgggggtgaccgcccacctgtccctgcactggtggatcatcgtcacgctggtgccgctcgcgtgcgtcgcgatggccggcctcggcctgcttctcggcaccagcttcgagccgcggaacatcgggctcatgttcggcttcatcctcctgccgatcacgttcctgggcgaaacctactactcgtggaccaggctctcccccgtgacc

SEQ ID NO: 178315 - DNA, 112 bp, Arabidopsis thaliana landsberg
gaggagactgatagcagctgtgacagcattggccgccgttgaagatgtgtcccgtgacggtgacagagctaacgtcaaaggacgttcgggacctacaataattaagccctaa

SEQ ID NO: 178316 - DNA, 386 bp, Arabidopsis thaliana landsberg
ttgcaaaatctgcgcgagtacgtaaagcagggcgatccggatgtagagtaccagtgggagtttatggatgggctgagtgagttgccagaagagtatcaaaagaagcttaagactgcggttatcgaggggaagattgcggatgaggattggaagggggtaggtttcgcatctggtgttgattggaagaagctcacgtgtgtaggatcctgagtacaaccagctcggacagaaaggcacgcaaccgagacctaagaaggccaagaagcccgcagagggcgaagatgaggtagggaattcctcgtttgacccagctgatatatttgctaaatatttttagaatggagaaggctcgcctccagcacctactactaagaaacgtggtcgcg

SEQ ID NO: 178317 - DNA, 74 bp, Arabidopsis thaliana landsberg
atgtatcctggaagccagttgcctgataaactcgtctccaatctccgaaagcattacgattctttgcctctcag

SEQ ID NO: 178318 - DNA, 767 bp, Arabidopsis thaliana landsberg
atggaggtaagcttatatataaaccaaattattgtcagaacattcttaaaccaaattattgtcacagcccttaagacatattcgtttgtaattcattattcaggacaccttggagacggttgaagcttctctttcagtgttggagacgcaacccgaagaaaacattgacgatgatcctatgcgggaggtaagctaataaataatttgttggaacacatcggagagggtttcagcatctcagtccttaaaccaaattaatttcacagtccttactccatcttcctctgtaattcataattcagaaaaccttggagactgttgaagtttctcattcactgttggagacgcaacccgaagaaaacattgacgatgatcctatgatggaggtaagctaatatataatttgatttaacacatcagagagggtttctgcatctcagtccttaaaccaaattaatttcacagtccttactccatctccctttgtaattcataatttaggaaaccttggagacggttgaagcttctcattcagtgttggagacgcaacccgaagaaaacattgacgataatcctatgatggaggtaagctaatatataatttgatttaacacattggatttagtccttaatatggcacatgtgcatagttattgtggacatgattttgtggatacttactagtgtacttcaatattcaggtcactttggagtcgggtgcaacatctcaatcagtggaactgccgcaccccgatgaccttatggag

SEQ ID NO: 178319 - DNA, 847 bp, Arabidopsis thaliana landsberg
atggagcttattgttgaccccttgcttattctagaaaggtatgaatacaaataaggatataagacccgtagaaaatggagcttattgttgcccttgcttattctagcagattatatacttctccacaatgtttattagcacagggactatcagtctccgtgttactaagaaaaggctaatagatgcatatttcgctttcatctcactttcaggtatttgtggcgtgggaaacatacttttgccattgcccaacacaaacaccaccgaaacatatatgaggaagctgatgcgtgcaagaggagaaagcgatacgcccgacctctggttgatcttcatatgaaaatatatcgatacgagggcttggaaccatggagcatcaagaagaacactgttagtggtaaagaacatagcaaaaacatcaatgtcatcgtgcaccttattgattactaagcatcttgtcttgcgttccacagatgttcgagagggagctgtgataataagagagcacactgcaatgaacaatctgttcagctgcctgtggttcaatgaggtacacctgttaacaccgagggaccagctaagctttgggtatgtagtggacagactaaaaggagccttcaaggtgttcatgttccagaactgtgagtataactctctcttcgaactgcaccctcacattcgagagcattcctcgaagattgagtgggtcaagagtcttcaggaactcaaagggaagggagagagtttgaaggaaagccgaggcggctttgggctctggactccttaccctggtgaccttgattctgttgagctgccaaaagtagtaagaacttctaaagctggttga

SEQ ID NO: 178320 - DNA, 503 bp, Arabidopsis thaliana landsberg
ctagtaaagctgaatctacaccctgatgcaaaaggctcatatgtagaagtcttggaaaggtatatcaacttggggcctattgtcgacttttgtgtagttgacctcgagagacaggggcaaggtcaggttgtaacttgttctggagcatttaaggatggttccctccgcgtagttcgcaatggaataggaatcaatgaacaggtttgatttatgcgcgaaatctcattgtcttgtatgcacaattttctcatatggtttctatatcttaaaactccgctctattacaggcgtctgtggaacttcaaggtatcaaaggaatgtggtcgttgaaatcttcaattgatgaagccttcgatacatttcttgttgttagctttatcagtgaaactcgcatattagccatgaatcttgaggatgaactggaagaaacagagactgagggctccttgcctcaagcgcagaccgtattttgccatgatgctgtgtactatcaactcgtacag

SEQ ID NO: 178321 - DNA, 229 bp, Arabidopsis thaliana landsberg
atgaatatgagtgtggccggcgatttttttctcttcacgtctaaccccgatagattttcacagtaagtcatgagagaacgatgtcctattttcatgttcaaattgatttgcagtttcaatcaagattcagccgaaatgaaacataatggtccccatgccatcatggttatattgatgcatgttaaatctcggattcgcgtaactttcaagagcttcgggattgcttcag

SEQ ID NO: 178322 - DNA, 401 bp, Arabidopsis thaliana landsberg
atggacgaatggaagaactggaaaagattttatgcggtgatcgcacaggcgaatatttgcctggccaatttatccctggtacaccagaatgattttcgctatactaccgatgaaatgaccctggacatggccaatgtccgttttctgagagcgctggcctatttttacctggtacgcatctggggcgatgtgcccctggtaacgggcatcagcgaaaacggctttaaaccggtaaaaaaagaaaaccggagcacggtgcttgcctttatcacacaagaaaccaaagcggcgctcaacgatctgccctggcagtataacgggcaattccccgaacagcaaggacaatattgggagcaaagcggcaccttctggcagggcatcgtggcaaccaaaggcgccgc

SEQ ID NO: 178323 - DNA, 516 bp, Arabidopsis thaliana landsberg
atggaccgggagacggcggagaagacgagcaccgcgaacagccccggtgcgaacatcagcgagccgacgctcggtcggacgatggccttcttcttcctcgtcacgttcgccggcctcctcgtcatcgtgcccatgaggaaggtacgtaggcaggctctgaccaaccaccaaccatcatcaggcgacgcgtcctgacgtcccaccggtgaacagaccatgatcataccccaccggctgacgttcccgagcgggtccgccacggcgcacctcatcaacagcttccacagcccccacggtttcatgcaggcaaagtgagtggcactggcagcacatgcctggtgacgctcagctcagttcctggagctgacggatagatgccgctttcttatcacaggaggcaggtgtcgctcatcgtccggtcgtgcctagggagcttgctctggtccgtcttccagtggttctacaccggaggacccaactgcggcttcactgcgttcccgacgttcgggtcaccgc

SEQ ID NO: 178324 - DNA, 309 bp, Arabidopsis thaliana landsberg
gccaggctgaaggatggtaatatcaacgttatcgccgtggatacaaaagaagttacagcctggaaagacggctacttcatatttaagagtgaagatatccagagcattatgaggcagatatcacgctggtataacgctgaagtagagtatcagggagacatttcaggaaaagttttcggaggaagaatatcccggtccaggaatgtatctgaagtgcttaaaattttggaattgaccgggtctatacattttaaagttattccgggagattctgaaggaaaagaaaggaggataatcgttatgccataa

SEQ ID NO: 178325 - DNA, 1406 bp, Arabidopsis thaliana landsberg
atgggaggaggaaatgatgagagagaacagactattaatcagctgttgacagagatggatggattttctggcaactctggtgtgatagttttggcagctacgaataggccggacgttcttgattcggctttgttgaggcctggaaggtttgatcgacaggtcacggtggataggcctgatgtggctggcagagtcaagattcttcaggttcttttcatagctgttttataaaggttactggtttgtctatggagttatgtgaatgattcttatttctctctatggggtttggttttattttaggttcattctagggggaaggcactcggtaaagatgtggactttgacaaggttgccagaaggacccctggtttcacgggtgctgacttacaaaacctgatgaatgaagcggcgattcttgcggctaggcgtgagcttaaggaaataagcaaggatgaaatctctgatgctcttgagaggatcattgctggacatgagaaaaagaatgcagttgtctctgaagagaagaagagacttgttgcataccatggttagcattttatctaactatatgtaatggagtacgcagctgggattcttgttttctgaccacctcaaatgaattttaaatttacagaggctggtcatgctctagtgggtgctcttatgccagaatatgatccggttgcaaagatttctatcattcctcgtggccaagctggtgggctcactttttttgctccaagcgaagaaagacttgagtctggattgtacagtaggagctaccttgagaatcaaatggctgttgcacttggcggaaggttagttagtaatggcctccacgcctcgtcacaaaagccagtctttgaatatacagagaagggtttaattatgttaaaccatctctatctctgttgtgttggctatgtcagggttgcagaagaggtgatctttggggatgagaatgtgacgactggagcatcaaatgatttcatgcaggtgtctcgtgtggcacgtcaaatgattgagagatttgggttcagcaaaaagattggacaagttgctgttggtggagcaggaggaaaccctttcttgggtcaaagtgtaagtatataaaactcgatactcaggttttcataatttattgtgttgtttccagctctcaaaacatgttttgtttgcagatgtcatcgcagaaggattactcgatggcaacagcggatgtggttgatgcggaagtgagagagctcgttgagaaggcgtacgtgagagcgaaagagatcataacaacacaaattgatatcctacacaagcttgcacagctccttattgagaaagaaactgtggatggagaagagttcatgagtcttttcattgacggacaagccgagttatatgtttcttaa

SEQ ID NO: 178326 - DNA, 977 bp, Arabidopsis thaliana landsberg
atgggtggaaaatcaacccttcttcgccaagtttgcttggctgtaatcttggctcaggtaagctatcatttgataaaacattgtaggcaatgcgctttgacccgtttaatgttgatgaaagagactcaagcaatgatgatcttttcacagattggagcagatgtcccagcagaaacctttgagatttcgcctgttgacagaatttgtgtccggatgggtgcaaaagatcatatcatggcaggacaaagcacgtttttaacagaactttcagaaactgcggtaatgttggtaagtaatgttcattctgtttgtcaaattgattacatgaagctttctaagataaatgtgaaacttgccacagtggttacccttttgagagttggtcacaggctttgtaaactatgcgaatgccaacaaacgcactgatagaatgttttatattaataatatacagacatcagccacccgaaactcgctggtggtgctagatgagcttggacgaggaacagccacatcagatgggcaagccattgcgtatgttgaatcaattattgcgtatcttgttttttgggacttactgttattgttcactttatctaaaatatcttaactatttacagggaatccgtacttgagcacttcatagaaaaggtgcagtgtagaggattcttctctactcattatcatcgtctctctgtggattatcaaaccaatccaaaggtattgtgaaaagtgtctgcttcagtttctgcgtttgaaagacttgggaactatcagtaatctgattgtttgtgtacattctgaaacttgtcaaaaaccgatcagtcttgaatatttttttggataggtctcactttgccatatggcatgtcaaataggagaaggaatcggtggagtagaagaagttacatttctctatagattgactcctggtgcatgtcctaaaagctatggagttaacgttgctcggttagatg

SEQ ID NO: 178327 - DNA, 1209 bp, Arabidopsis thaliana landsberg
tcaatcgataagtccatccgtttgggtttggaagaattggagaagaagtctgatattgatgatatcttaagttataggtctgcagcggaaggtgagatgcaggtatggtaaattaggttgctgttgtagcaatttatactttggctgtgataccaaagtctgttcagatatctgccataagttgatgccctagcaatggcaatttcttatctgtccttttaccttggatcttactatgcaggaagcttgctcagaattgacagtaaacatgggagcgactggtgccgctagatccgaaaaggatcagagtgcccctgaaaaggaaccgagtgacgatcctacattaaataagtcgcgtgggtggttgaactggttgtcacggggaatgcttggtgccggaggcacagaggattcaagtcagttttctggtgttgtttctgatgaagttgtcaaggtattttaagtactaattaatagcagtagagtttcagaattctagaattcttcgaaacatcctagtaactgttcatccactgcaggatatacacaaggcaacaaagttttaccctctttcttcatctcctagaaatacaagtgcaactggtaagatctgtacgtgctccattcgactcaacgtacgcaaattttctgctactttgcaacatataagtgggtaagttacaatttctcagttatctcatggcctctgccttaactagtttgtattttcattcttctttatcttatttattccacagaagttcttctcaagttattacagagttggacattttgggggtgattgttgaatgcaagtcttggaaagattctacagccatgattttatctgttatttctggaagaatggtctatcctcacaatgggaaagaaattttaaccatgaaaagggtttgtgtcctaatattgtgttacacctatgccatattgttaataattgctaatatctaaaatcatgaacaatattagactagtgcttagtaaggtggtatgaacaatctaggtgtaacttatgctccgtagtctgtgttattaaaatcgattttagcgcttttcataatgttttcaggaaacgaataatttaattgtttcatgcaggtctgttctcagagtgatacactagaagcgaaaccctcatatggagcgcggttggagttgtctaaagatcatgatgttgcattgtcattaaag

SEQ ID NO: 178328 - DNA, 1343 bp, Arabidopsis thaliana landsberg
gtagggaatttaatcggagtatatcctgacctcatggattcctttatagagtttttggtgcaatgtgaaaagaatggtaacgaggcaaatctatgtttctctcttcctacattcattgatttcagaaaaaagacagatttgtaaccttttgaatcttcttgcagaaggactgctctctggtattctgactaagagtaagtctacttatcttttgcaagggtacatgaatctgatgctgagatatatttgaagtattcacgagtagtgaaactacacaactccactatgaaatttgatcttctttccagatatatccatttctagttctgaaaagaaaacaaatccattctaaactatactgcagaatccttgtggagtgaaggcaaatatcctcaaccgtcactggacaatgatagagaccaggaacataagagagatgacgggcttagagatagagatcatgaaaaggaaaggcttgaaaaagcagctgcaaatctgaaatgggcaaagccaatcagtgaactacatctctcgaactgtgaacaatgcactcctagttatcggttacttccaaagaatgtatgtggctgcagccttttatatgtggatctactattcttgagttcatcttttgtttcattagtctaatgtaagacattatactttttgcagtacccaatttcttttgcaagccagaagacagagatcggtaaactggttcttaatgatcactgggtctccgtcacatcaggaagtgaagattattcatttagccacatgcgtaagaaccagtatgaagagagcctcttcaaatgtgaggatgacaggttggttaatcaacttctaatggtggactggaaacctatattccatactttaaaaaaaaaaattggttactgacctgttattgtgagccattttctgtgtcaaattgtgagccattattcctctctttatgctataggtttgagctggacatgctattagagtctgtaaattcaacgacaaagcatgtggaagaattattgacaaaaattaacagtaatgaactgaaaaccaacagtcccatccgtgtcgaggatcacctcacaggtaacataagctggtgtaaaacaataagcagcatggatgttaaatcactagcagctgagctctttaaatttttttttttttttttttatggattgctttgttactgtctttgtagctctaaacttaagatgcatagaacggttgtatggtgatcacgggctcgatgtgatggatgtgctgaagaagaacgtgtctcttgctttacctgttatcctaacacgtttgaaacagaagcaagaagagtgggcaag

SEQ ID NO: 178329 - DNA, 98 bp, Arabidopsis thaliana landsberg
aatctcctaacccgagaaagtctatatactttgcgggtatattggcctttgcatcttctggtttggatggtaatgatggtgatgatgatgatggttga

SEQ ID NO: 178330 - DNA, 509 bp, Arabidopsis thaliana landsberg
atgccgctgatatggagaccattcttgataattgtttccatcgtgttcaatgggatcgtttccggaaggagcattaggagaaaccaagcaacaagaaagcgtggaaggttacgacggatccagagagacaaaagtttgaggagtcagcccttgttccagaaaaccagtttcgtgctccacaccaggtaatgtttttttttggactcccattgcctttctttctcttttttgtaagttgtatatctaagcagttatatattttcaaggttgggctagattaagggtttctattccccaagcctttggtgcatagatgagcacatagtgcaatcgttatcggaaaccgtggcatgtttgaaagagagaatagctgtggtgatcagaattcaagcaagcaaacagaagttatgtggaaatgttgattattttgaacagaagagaaactaattgagtggaattattaagggccctcttctattgctttcgtttatagaaactatatactctaa

SEQ ID NO: 178331 - DNA, 169 bp, Arabidopsis thaliana landsberg
atggatccccaagccccgggtcttgcgcggcgaacgggaaagaaggtcgctaccgatgaggaagaaaaggttgaagtttccccagaagaggagcttgctcgactctggctcctaaaagaacttcgaagttcgttgaacttaaaagccatcccattactcattctttcag

SEQ ID NO: 178332 - DNA, 67 bp, Arabidopsis thaliana landsberg
atgatcaaatctgggccgcacgatcgcaaatggacggtgcggattagatgcgattcactccaaaccg

SEQ ID NO: 178333 - DNA, 2118 bp, Arabidopsis thaliana landsberg
atggaccccttggcaaatgatttagagggaagcaaggtattatatctattttattctagtcagattctctagtttggcaatttcaaataatcttatttcttttttaatttaagcggcctgagattatatcagctactgaagcagttacctctcctaaacattcgattgttaatgaagaggttagttgacattcgttttagcgaaatcattataatcttattgtagtaaattagttgttaacgattacttgtttaagttctcgtgctctcagcagacagcaaccgatgtggaccccttgggaaatgatttcgaagaaagctaggtattagatttattttcttctagtcaagtagactagtttataaaaaacttttttgtttgtctgactttattcttttgaatcttcgttctctagggtgtctccgtgtttggcgaagattctgttggcaacgagacgtctgcggagttgccagatatcttggttagcagctaaattgctatcaatattgctatcttgtccttagaactcctttcccaaattcacgtcttctctttctgtaaggattaatattggcgtgataacttattaggacctaaaatatacctttttcgggggttttagtttgttttcaacatttttttttggtgttttaaaatattaatcctaatttcttttgaggtacttatattgataattgatttcttcacagtaaccagcctaagttaaatagataagtttatcgcactaactataatattaaagttaatccattattacattgtttttctatgactattctttgtctcgaatacaatctcgtcgtggtctttttggcgtgaagtttagttatatccgtcacgattttactatggttattaagaatatccataaaagttttcaagcggaccatctttttcaccgggtttgttcatctcgtcttttacaaaactctaattaggtccctatgcctgctcatggcggtgttgttgggtatggagatgtggttgatatccccgatggtgtgtcggtagatgtgccaggaaccattgtcccggttagcttgataacattattagtatcgctttaacatatcattcgttgccaatcgataacttttgcttttgttttggttttaataggctttttgcaggggtgccccttctgctgtttcatctccccgccaggttatttatttatttttttttccttgtctgctaatcatattgttactgagttaaatttctctcatgtaaattttcaatttgtaatcgttcgtccatgcgccgtggttggtttgcgcaggattcagatgaggtaattcgtagtggttgcgctgttaattctttggtgatcgattaggttttttattaatgtattccatttcaggatttcacaactccacccccttctaaagaagcgatgcccctctccaggcattcaactttttttttttttttactttagctcatggagctctgtttttaatattttacattttaaactacttggcaaacagaattatggaaatgttgataatgtcgagggtatgcgtggaagaagaagtaaaaggctccgtactctctctaccaagttagatggtcggttccagtacgacaagaaaacgaaattgttagttgggcatccatcccctgttattaatcaggtcaacgtcgaccctgaggagcgattccaaaactcactgaagaaactcaaggcgataaggtttgttttatcctgttttttaattgtttagtcaatacatattttgttatttttaattatttccaggggtaatctttcagcttgttttctctatagttctattagcatttgtggtgggattgctctatctaataaagacattttggacttaattgaccgcaagaaaaatctgacttccaaggtattatgtctgcgatatatatgcgcatttaattttaaattgtttttctcatttacttaattttttcgtgttttactcgtgcccacaggtaatggatactctcataagattgagtcgtcatctgttgcgtactgatgatgtggacggcgaaaaacttcgtctcgaagttcttgattcgaaatttgtttcattgctctgccggcatttcacgtag

SEQ ID NO: 178334 - DNA, 1072 bp, Arabidopsis thaliana landsberg
atggtacagggtgaagaagaagaaacccatgttggccagatagtagagttttttaagacaacagatggagaaagctacttccgagttcagtggttttacagagcaacggatacagtgtgtatacaagttcttctcttttgtttgtctaattgtttgcgctgcaacaactagttactcatttgtctaatgtttgtagataatggaacggcaggctactaatcatgacaaaaggcgtctcttctattctaccgtaatgaatgacaatccagtagattgtcttatttctaaagatactgttttacaagcttcacctagggtatgctgagtcaagctcattctctttctctctctctctctctctctttgttttgggtacaatctcaacagagttgatcagtttgttacaatctgcatttcaagtgattttgtttcatgactttgcaggccggattgaagcccaattctataaaatctgactactattttgatatggagtattgtgtggagtattcaacatttcaaaccttgagaaatcgtaagcgctcatgtaatatgtttatgagttatcaattggaaacggatatagctgttttctctttatttctttaagcagaacagatgccacagtttatgagcaggtcgacacagtctttatataagatcctaggtacagaagcttgagcattcttttttcttcttttttttggtctcagctaaaacgtccaaaaacaagcttgagtgttgtgccgatgtggtacctacagaatccactgaatctattttgaaaaagaaaagttttagcggagagcttcctgtgcttgatctttacagtggttgtggtggaatgtcaactgggttaagtcttggagccaaaatatctggtgttgatgtcgtgacggtacttgatttaagtaattaatctttatctctttaacttaggatggaaagctctttcttcactcagtttcatttaatatctggattcgtttttatttttctctttcagaaatgggctgtggaccagaataaggctgcctgtaagagcttgaaattgaaccatccaaacacgcag

SEQ ID NO: 178335 - DNA, 1128 bp, Arabidopsis thaliana landsberg
atcagctttcaatacagttttcagagatatcactaatttgccactcagttttgatgttaataatcaaccatcttcttctacacaaccatttgattcagcaacttctatacaacattcacatggtactgtcattactatacaatatccaactttcagattctatccgctttagaagattttaaaaatggttgtcacagttattaagaatgtgtttgaactactcgcaggttcagttgaaagatcaggacttaactcgattggcagagaaaattttcatcggcataagacagcttctactagaccatttagtgatctcaccaagccaaatcttcaaccatcacctcaaaatttatatgcaatgatgacaccagctactgcatatacattgaacacatattagttgttatatatgtatcttttagttctccaaactactctgtctattatgtaatttttaacttttaaatatttgaatcattaatctaaatcttattttatgtattacaaggacaagacctgagtaatccatattcatgtataagcaaccaaacacaaacaccagtaatgtcaacagagtattctcatgtacgaaatttacaagcagaatttgagaaagcatcaacatttgctaccaatccgagtaagaatatataggtttcttttcatttatattaaagtatcattttatataaggtgtgttaatcttatagatattatatttgatcataggagcagaagctaaaatcaattcagatactagcagtgatgatgaaaacatggccaatatgatgtttgatggtgcagtatatgaaagtgatactgatgtggatcaaaattactctcttagtagcactgacgatgaaagtgcagacacaaccacaatccaaatagaatctgaatcaatggctaatgtatctactcatgaagtagaagacattgtgtcacagttaagtgaaaatgacatagaacttgatacattcagctcacaaatggatatatttatgattccaacagaatctactcaaacagcaaatgtcccagaatctgctcctaaaaaaagaggtcgtccaagattggctgtaaccaaacgaatgagaatgaaacaaattagacaacagaataagccag

SEQ ID NO: 178336 - DNA, 277 bp, Arabidopsis thaliana landsberg
atgaggcttgatttatctgccaagtttcggcaagttcttggtcttgccaaagatcatgcatctattggcagagctattgtacaaaactacaatgaaaaagccttttttgacattgaagtggcagtggttcgagccactagccatgatgattgtcctgttgatgataaaaccatgcacgagatactcttccttgtctctaacacaccgggatcgattccttttcttgctgaacagatctctcgccgtctagccaagacaagagattgcttagtcgcgg

SEQ ID NO: 178337 - DNA, 57 bp, Arabidopsis thaliana landsberg
atgataaggctaaggctaaaggcgggggacgacgttgtgacccaaaagaagagggag

SEQ ID NO: 178338 - DNA, 424 bp, Arabidopsis thaliana landsberg
catcggcgacctggtattcctgtccggctcctacgagcagttgcgcactaccttccagggtatcctgatccggttttccgccgtaacgcagggcgcgctgtacctgcgtgatctttttgcatttttcgagatacaacctaaaatgtcgtccccgttgcatccgcggccttttccgcagcctatccggcaggggtttacgttcgaagaggtaggctttaaatatgtcaactccgacaaatgggcgatccgccatcttaacttcacgctgcatgccggcgaaaagctggcgctggtaggagagaatggcgccggcaaaaccacgctggtaaagctgctctcccggctgtacgatcccgtggaaggccgcatcatgctggcccggatccacctacgggaatacgaccttaccacaaagcgcaagcag

SEQ ID NO: 178339 - DNA, 329 bp, Arabidopsis thaliana landsberg
atggtgaactatgtgaatgggctcgacgtggaaggtgatatcttatttttgaaagcatgtggatgggatgctccaagagagattacggtccctttcatgatttatacttattttttgaaaaaagcggttcaacatcacctcactatctacgatatggccgttattgccctgaatcatcgcaaaccccctaaatacaacctttgcaagatggtcttggaagataatgcggagaattcacaagaagatgaactttttttacgaaaggcttatgagaagatagattcacggctagaggagtacccgcggttgttctttaagaagaatagatg

SEQ ID NO: 178340 - DNA, 237 bp, Arabidopsis thaliana landsberg
ggttagctggtgcaaccgctgatgttcattgttatgatgttctttctaataagtggtcgaggtgagtagaagatatgaattgtgctgtttaaggtaggagatctagtgatttgttgttaagtgtgaagttgaattaatatgatgaaatgatggtataggcttacaccttatggagaaccacctagtccaagagctgctcatgttgctactgctgttgggaccatggtagtaattcag

SEQ ID NO: 178341 - DNA, 330 bp, Arabidopsis thaliana landsberg
atggcgtcagttctccgtgctgatgctcttttagtgacgcgactggggttgatgtgctgcgcctcggcgcagacaaccttccataaaaccgctgtgcaccgctgcgacgaagctgcaggtaccgtattcggatatgtttgtgatcgttgccagccaaccaagcagtagcagcacgtgcgtcctgattgcatgcgtggtgctgtcctgagtattgtcaggctgtgcaccgacagcgcttatgccttagggattctggcggtggtgcctgacgtcaaccctacactgacgctgcatggtctgctgtggatgcttccacgctgctacgaatga

SEQ ID NO: 178342 - DNA, 314 bp, Arabidopsis thaliana landsberg
atgacgttggaaagcgagaattggatctatgaaacagtatgggatagagaaggaaatccaaagaagtcgtcaacatgtgatttagaggtaacttcagagaaattgagtgctgactttttatcgagtcaagaagatgattataaacgacgtcgttgtgtctatctaatgagctacaagttaaaacaagccaaatctgatagagatctacatcgtcaagaatcaatagctcgtaagtttttgtttaagttgaagaaactcgttcgttctgagtgacgtcgtcgatcgttatagtgcgatcgtatcttaatgactag

SEQ ID NO: 178343 - DNA, 1181 bp, Arabidopsis thaliana landsberg
accaatgaacagaaaggaagagcctttagagatcttcaagaccaaattctggagtttaggagaagaaacttgatcggggacgagaaaaggaacagaaccaaccacttgaaatcacttgagatcagatgtatgtacaatcaaatcctaaggacaaaagataaaaaaagtgtgttctttttatttattgttttgtccgagaaaagaaaactattaaaggtctttacttttttcaaaactttttcttgttaataacttacttaactaaaacttgagatgtgtaatctttacagctgtttaaagctttctctgattcgtcatcacagctttaagaatgtgtgtaatcgtcattgtaaacagcaaaattacagaagaatttaactagttgtgtatttgctatatgtagaccattagtattttgtcatcttaactttcatataaactggttttgtcgttggctaaaagtatattaaaaattttaaacagaaaaagagtattatggtaggataaattgcaaaaacaaattaacatatgctagtttttacctggcatttaacaaaatttatgatttctgtttttatatcgaacatacatagtttcatgatacaatcaatttttgcacttaggtatgtgaagtaatagaaatggaagaaaaaaatacaagaaaaaggaacttcagaagattttttgtctccaagtgaaagccggtccttagttttgagaggcttgaagcacaaaaataattatgtggtctatcaaatatttacgacttaaatattgtattacaacattattaacatttaaatatcttaaatagctaaaaatataatatttttgactttcaatgaggcaaggaactctcgagagaggtcttcctagacccatgttggtgaagatagcttcgacgtcttctaaaaacacctccatcgattatattaacgagtgtttatactatttttttttaatataaatttgaaatatttgtgaaaggagaaaagagaagaaacatatgttaaagacactttttacttacatgtcactttttgattgggtttaatatttttacaatttattgattaaaattttaatctaacttaagacacttcactttgatcaccggtgcagatactttaagagcctcgcttcacgaagaaaaaccggatcggaataacgagtgggagtga

SEQ ID NO: 178344 - DNA, 128 bp, Arabidopsis thaliana landsberg
acttgtgtttacaaaatggcttggtttttgcaaccgagctagctcggtgttttgtggacgtacgacatctccatcgagaatatgtttatgttttacaatccacaagtattgtgaaaacggttttatga

SEQ ID NO: 178345 - DNA, 107 bp, Arabidopsis thaliana landsberg
aacagacgctttgccgtcgagagttgcttgatttaagccgtaggattataagacaatgcttcagaggaccggatcggacggtcatcatgagatatagaaatcaatag

SEQ ID NO: 178346 - DNA, 102 bp, Arabidopsis thaliana landsberg
atgggaccgaccttaagattgtcacaagacaagtaaaggatattaacattccatattcccatgagaaggtttttcaaaatatttttgtcgttgagtttcaaa

SEQ ID NO: 178347 - DNA, 712 bp, Arabidopsis thaliana landsberg
gatccaggattacaaatccgtggaggagtataactccgagctctttaagattgtctctatcctgaggctgtgtggtgagaaggtgactgagaatgacatgctcgagaaaactttctcgacctttcacgcgaacaacgtactgcttcagcaacagtaccgtgcgaaagggtttacgacttacacaagtctagcctcctgcttgcttcttgctgagaagaacaatgagctgttactcatgaacagcgcattgagacctcccggatccacagctgtgcccgaagccaatagagccgaaatggccaaagcgcctaatgaacctcaggcgaccaaggaatccaactacgtccataggggtaaccctcacggccgtagccgtggcagaggatgtggtggaagaggtcgtggcaatttctacggccaaggaaaccactatggtggtagaggccgtgggaactatggccgaggtaggggtaaaggccgcggtgttaacaaatcgcgtggaaaggctaagtccgtgtgctataggtgtggcatggacgaccattgggcaaagacgtgcagaacctctaagcacctcattgaggcatatcaagagatgataaagcaaaagggacccgaagccaatttggttcatctcgatggtgaaggggatttcgaccacgagaacgatgacctaatggattatgagacttcggacatcttgggaaaatag

SEQ ID NO: 178348 - DNA, 1173 bp, Arabidopsis thaliana landsberg
atgtatatagctacatctggtcttgataaacaagtgcttctacgggatgttgataagaaacaagacatagataggcataaatttgaggagaggatatgttgtatgtcgtggaaaccgaatggtaatgcattgtcggttatcgatgccaagggaagatatggagtttgggaatctttggttccatcatctatgctatctcctacagttggtgttccagatatagtaccaaagaagaggaatgagattcttgattttgatgatgaagttgaggaagaaatttatcgtgcatctgaaagtttagatgatgctatgggagatagtgatgatggagaatctcatcatactagtaggaaaagattgaggaagaaaactttgattgatgaagatgttgatgatgcatatgaggaacttaatgatgggagtagcttaccttcggcatctgagtacaggaaaaagtcacatagaggacatagagagaagcagggtgcaagaagtggggcttttaaaggcatttcagcctcaaccaagtacaaaatgcaaagttcctttcaacctggtgcaacaccaccggaaccaggaaaacggacattcttgtgttacaatatgctgggatgtataactactattgaacatgaggggaactcacgtattgaggtacttgaggcttacatttgttatgcttctaacttgatgttttccttttattggtttttcagaaagaaagggccacacttgttcttttgtgtgattttgttttttcttttcttttgcaagcattctaaatgcagacagattttcatgatactggaagaggtccacgagtttcatcaatgatagacatttacggcttcactatggcatcaataaatgaaactgggtgtgtctttgcaaatccctgtaagggagaaaagaacatgagtgttctgatgtatcgaccatttagaagctgggccagtaatagtgaggtaagaggatcattacttacacagcattcatcagaaattccggtccaggataggaaaatgaatgacttggttcttttttgattgatacatccagtggacaatgaggtttgaaggtgaagaggtgaaagatgttgctaacggttctggttgggttgctgcagtagcaggcctagaagtgcttcgtgtatttagtgagggcggattacag

SEQ ID NO: 178349 - DNA, 362 bp, Arabidopsis thaliana landsberg
ccggctcagataagctcatcggagttggccgcctgccgatcgggtgccacgtaccttgaagcttcaccatgtcgcagtaagccattctatattgctggctcgtcgccggtaagcctgccacggtgaaagacacgtagctattgcgccagtgctcttccctctctccgaccgccagcacgccatgaccaaattgggagccaccgctctgggatactataaattgagcacacccctagctccattaagtcatcacgaagccaaagcatccgctactgcctccgattagccacagagagctcaatttctttcttccccaaatcagttttcgcacccgtgaacactcgtcgtggcagacgctacag

SEQ ID NO: 178350 - DNA, 103 bp, Arabidopsis thaliana landsberg
tactggcacgcacagcaaccggggcaaaaacggcagccaccgctacatcctcgacatccgcatcgaatgcatcctgggcaaccgttgcaaccaccatactcag

SEQ ID NO: 178351 - DNA, 549 bp, Arabidopsis thaliana landsberg
gtcggtgaagtacaaccggaccacgattgttgggaaagaccggaagatatggacacgccacgaaccgctttcgccttagatgcaccatatccagcctccgatttagcgggagaaatcgcagcagctttagcagccgcttcaattgcattcaaacaagcaaatcctaagtattccgcaatattactcaataaagccgtacaaacgtttcagtacgcagattcacatcgaggttcttacactgataatccgggaatcaagcaagtcgtttgcccgttttattgtagtgttaatggatataaggtatatcttgaatatttctcgaatatttacaatcaatattaaatgggtttactttcatataatcatcatgttatttcatatatataggacgagttgctatggggagctgcgtggttgagacgagcaaccggcgaagattcttatctgagatacttagtggacaatggtcaagctttcggtgaaagttccaattactttgagtttggctgggacaacaaagttgggggtgttaatgttctcgttgccaag

SEQ ID NO: 178352 - DNA, 280 bp, Arabidopsis thaliana landsberg
atgaacgtcttccaccgctttggcgcgcatgtggacgccggtggagccgatcgtcgagcaggcggcattgcgcccgctgctgcgcacaccggcgccaagcgccgtcatcaccatgtcgacatagccgaggcaaacgggcgttcctgcaagcagtccgcaggccttggcggcctccgccgtcaggggatggctgacttccgtgccgtcgatgatctcaggcagaagattgcggcgacgatcgaggccaagcgcatcgatgacgacgctgtcgtattggcgc

SEQ ID NO: 178353 - DNA, 345 bp, Arabidopsis thaliana landsberg
attcagtgatggaaatcggattttgaatagccttgaattatctggaaatggagtaggaatcaaactgttcaactgcggatttcatagttctccacagtgttatacatcagaatctgatgtaggtacgcttgttaaccagaactttggtgattgagaatagaacaaatttgtgctcttgataatggttttgcctttgattctttatctgcaggagtgaaaactcatgcacctgcgttatttagtcatcttgaggatgattatttctcagagttgggtcctgtagaaaaagaagtggatgagaatgtaattgtgaaaatgttaactgagaagccagtgatatctctg

SEQ ID NO: 178354 - DNA, 128 bp, Arabidopsis thaliana landsberg
tgtgcctgttcatgaaatttgttaagaccgagagtggaaagacaaatgctgctcgtccaagcaatactaatgcggttatgacaccggagacacccagagtacccccaaagctgcaagaagatgattaa

SEQ ID NO: 178355 - DNA, 350 bp, Arabidopsis thaliana landsberg
atgtcaaagataaagcctttgagtaaatcatcgcaggacttgagtcttctcacatctgatatcgcatcattcgcttcttctattggcttagcttctgctcttccttcttcgggtttcaacgacactgatttccgaaaaccagctaaatccaaaacccagaaacggaaaaagcctaataaggatcagcaacacatggatgaagatgaagaaggagagccaaaatcgaacattgggaatgaaaagggaaaagattttggagcgaggaagcaaaacaaagatgcaccggtgaagcaaacgttacaaccgaagccaaagcctggattcttatcgattgatgatgagagtactgg

SEQ ID NO: 178356 - DNA, 1708 bp, Arabidopsis thaliana landsberg
  unsure (1)..(1708): unsure at all n locations
tttaccgtcaccggtttcatctctacttcttcaccaaatgatttcgctaagtcgttaccgctgctgttccaaaccgccgacgtttgtcactgccgtcgttccaaaccgccgatgttcgtcaccgccgtcgttccaaaccgccgtcgtttagccgccgttaccgctatactcttgtaagtatcttattagtttataaagtgaacggtttttgatttgaaatattagatttggtttttgttgtgttgatttgaacggtttctttgattgttgtgtggtttgcaaaggaattatggttcgtgcaaagttagtcactcctacttcgagtgagagtgaagatgagagggtcccgacccgtgaaatggatgtgaaccgagaagaagtggtagaggaaaacaaagtggaagacgaaaactgtgacgaagagcatccggaaaaccttaacgaaccggaagaagaaaaatctgaggtatatacaaatatctgaaaattttatgtgaatattgatatagtgtatagggacaactataaaataattagtacaatttaatagtatagttttgtgtgattggtgcatggatatacgttaacatgatcaatcatacattggtttgcattagaaaattgacttctgaaaaagttgataatgttgttctgagataactagtacaagtagtacagcgaaatattaattttatggttgtgtatgaattttcaggaaattaatgatgaggagccaattcaacctcaggggatggaagaaagccctgaagaagaggaaaaaagaaggggaagaagaaaaatctgaggtaacattaatttctgaaaattgtgtttgaaagtagtgtatatggacaactagaaaacaattagtacaagttaatagtataggtttatttgattggtgcatggatttatnnnnnnnnnnnnnnnnnnnnnnattggtttgcattagaaaattgaattctgagaaaagttaataatgttgttttgagataactagtacaagtagtacaacgaaatattaattttatggttgtgtatgaattttcagaaagatgatgatgtggaaccaatgcagtctcaggggatggaagaaaaccctgaagaagaggaaaaagaaggggaagaagaagaagaatctgaggtaaatggttatttatgtaaattgtgtttgaatattgaaagtagtgtatagggacaactagaaaataatgagtacaacttaatagtattggtttgtttgattggtggatgcatggatttatacgtgatcaatcatacattgatttgcattagaaaattggattctgagaaaattttataatgttggtctgagataacgcgaaatattaattttatgcttgtgtatgaattttcaggaagatgatgatgtggaaccaatgcagtctcaggggatggaagaaaaccctgaagaagaggaaaaagaaggggaagaagaagaagaatctgaggtaaatggttatttctgtaaattgtgtttgaatattgaaagtagtgtataggaaaatcaaaaccctaatttcttttcaatccaacccaaaacttaccagagaatttggatctggcgggattagattcggcgtcggcggaggttcgtcgtgttgttcgtcggcagaggttcgtcgtcagagaagagagaaggagagaagaaaagtttttgagagaaaaaaggagaagaaggaaataa

SEQ ID NO: 178357 - DNA, 550 bp, Arabidopsis thaliana landsberg
atggctgctcgtgtcgtactacgaaggaagaccaaggccacaactgtgattcaggtggagaaatcttattattattgggaaaattaatggaataaaaactgtctcttccttttacttttcatctttgagcttcgcagccttttctcactcgtcaaaatttcttctagactctgatttttaatttttcattgcatataccagagccattgccgtagactccgggccgagttgcactacaagaagctgaaaaaagcagcaattacaacacaaagtgcatggagagcaaggctagcccgtaaagaactgcgaaagcttaagacggtgtgcttttctacctctcacttctgtctgtgtctgtttatttttttatgttacagtctaagcatttcacatggaaactgtaacacctcagataatgtttggtcttttgatgccttcatatctcctgcaggatgcgagggacactgtagtccttcaagctgccaagagtatgcttgcggagaaagtggaagaactcacatggagactggacctagagaaacgcatgagg

SEQ ID NO: 178358 - DNA, 259 bp, Arabidopsis thaliana landsberg
aaggctccttgcatgagttgcatactagcatcgataaaatatggcatcaatgctttggtcaggacgatttgttggatcagaccatcagagactgttttgagggttttggtcttcatgtgccggtatgactttttgtttatttgatctccccttattgattcttgaactgtgtatataaaaaacgtatatgtgattctttttacagggtgaattttcggatcaactgcagtggatagatgatgatgatgatgaggattaa

SEQ ID NO: 178359 - DNA, 141 bp, Arabidopsis thaliana landsberg
atgcccaaaccggacaaaactttccccctccttatcctcccggtgctccccagccttcttaaccctggggttggaccgtacgagttcggatcgagtgattgcccacacagtctcgagtggttgtactattatagagtacag

SEQ ID NO: 178360 - DNA, 11 bp, Arabidopsis thaliana landsberg
atgactgaaac

SEQ ID NO: 178361 - DNA, 1388 bp, Arabidopsis thaliana landsberg
atgcttgattggcttcaagaaatgtttggatttcaggtaatttttctagttcgtgatgcttgccaattgtcattaagcttttgttgagagtaatctataaattctttaatggtttggcggaaagacaatgcagctaatcttaggagcacttaatcttattacttgctaacatgcaatttttcttgtttatgctatggttctgcagaaagacaatgtggctaatcaaagggagcatctgatcttattacttgctaatgtgcatataagacaatttcctaagcctgatcagcagccaaaggtttataccttaattttaccattgttgaaagaccacttttatataggtttcgtgtgtccatgcatgtaggacatttctgcgcagtacattttttttccatggaatatatatgtaactgcatcctactatgagcataatatttaatgaatgtactttcagtttatcctttcgtttgttctcattgtgccctcacagttagatgatcaagcattgacagaagtgatgaagaagcttttcaagaactataagaaatggtgcaaataccttggtcgaaagagtagtctttggtaagggaattgtagcaacagagagtttctgtatgctgttcatgtacaggaattagatttcgtgtgtgtgtctaaatgtttatgcaaactctggtgtggagaatctgttttaaagtatgatcttcttgtaggttgccaactatacagcaggaaatgcagcagcgcaaactattgtatatggccctgtatcttctaatttggggtgaagcagcgaacttgagattcatgccagagtgtctctgctacatttatcatcatgtaagtttcagtttgtaaggtcttccgtagtttgtgcgtgattcttgtatttttatgcttgtccgccaatgataatcttatgctttactgtcattcttaatccttgaaagttatatcttttgttgtttatatttctgctaaggagctataacttgcacgcacagtaataaaattgtcatctgagtcttgttttgaggcaaaacatgtgtatatgtgctcaggttgacgtatttctgatgagaaaatgtcaattgatattattccccttagaaattagaatgttggttaaatgtcaattgtgctcagggtaccatgctttcttttgataaatacacagatttttttgctagtatgcgttcctagatgtgatattcttatacttcctactctatttcatgctttcgcagatggcatttgaactctatggtatgctggctgggaatgttagtcctatgactggggaaaatgtgaagccagcttatggaggcgaggaagatgcattcttgaggaaagttgtgactcctatttatgaagtgattcagatg

SEQ ID NO: 178362 - DNA, 509 bp, Arabidopsis thaliana landsberg
atgggtcgtgttcgccacttcttaggcctttcagttggtctaatacaggtaggttacatgggggctaattgcttttcaccttttagattttaaagcagaacattagtgacattccttataaacctgagtcaacaatcagagaagggatgaaagctgaagagagaaaattcaactatagctgtgatataacatacaccaataactcggtaagtatatcattcatatcgattcttctacttggattaattttttttaatctgtcatctcccaccaacactttttgcatacctcaggagcttggatttgattatctacgagataaccttacttcaaaccgtgaacaacttgttatgagatggtagatcccataaatctattcattccttagtgttgttcaatagtgactgtttatgacgtacaggccaaaaccatttcactttgcaatagttgatgaagtggactcagtcctcattgatgaaggcagaaatcctttgctaattaatggtgag

SEQ ID NO: 178363 - DNA, 52 bp, Arabidopsis thaliana landsberg
atggcatcaagtatttcaatcgcctgcaacggtagtcaaacccaagcaactg

SEQ ID NO: 178364 - DNA, 80 bp, Arabidopsis thaliana landsberg
atcaaataaagcaatcatacggctacttcctggacgggaccaaattggccaacggacttgatgacttggttaaactttga

SEQ ID NO: 178365 - DNA, 346 bp, Arabidopsis thaliana landsberg
atgcaaaaaggttacgaacccttaattgataacagtcgacgacgagcatatgattcaacattggaatttgatgactcggttcctgaatcacatgaaggagcaacagaggaaacattctttaaagtttatgaacctgtattcaaacgaaatgaacgattctcaaccattcaacctgtccctcaattaggtgatatgtcgaccaatattgacaccgtggatcgattctatgatttctggtgcaatttcaagacctggcgtgaattacccaatgaagatgatgaagcacctgaagagactgatgatcgtcatcgaaaacgagaattagaacgtgaagccgccaaagcac

SEQ ID NO: 178366 - DNA, 145 bp, Arabidopsis thaliana landsberg
accccgaaacaggatagaagacgccatccggggcttgttgatacttattacgcagcgcttctcacccagcgcgcaattccccgctgatttcgacatacttcagaacggcttgcccgttatccagtcccccatcttcgccatgatg

SEQ ID NO: 178367 - DNA, 313 bp, Arabidopsis thaliana landsberg
tgctagcgcaggttactgtttcgttgagctctctagtcctgcagcagccatcaaggctatcagcaccctgaatggcatgctgattcctggaacaaacaagactttcaaattgaactgggctactggtggtggcgtaacctcttcatcgtaagtcatacgttcttcgtttaaagtgatctactttcagcttgctttcgtgttctgatctcataacccctgatttctgtcttttgttagtggccctggcaccagccaggagtactctgtatttgttggtgatttatctccagaggtcacagagtacatgctgatg

SEQ ID NO: 178368 - DNA, 178 bp, Arabidopsis thaliana landsberg
gtgcataaggttcaacacaaaccaagaaagtaatcaagttagggtcacaattcaattggagcaaaaggacctagagtgtgctgaaaaatggcgcaccggacaccagggccgtacagagttgaaccagcactctcgggaaaatggaggcgcgctccgctataattcaccggactgttcg

SEQ ID NO: 178369 - DNA, 435 bp, Arabidopsis thaliana landsberg
atggggacggtgaaggagacgaagaagagctttgtgatcggaccggtccaggaaccggaacagcgacgtgacccaatgaggccggtaagacatggatttgaagcttttgtcccttcttgcagtgtccaggaactccgcatatgaagtgttggagtcccggtttggttagactgattgagtcagacccggtcttgtatctccttagcggtttagacgattcacacatctcgaaatcattgtgagtgacttccgtgacgtcgtggtaatctttgttgtatgcgaagaccagagtgtctccgacttgaaaaactcttgaagaagcccaagcctcataatcgcctccaatcatcgtccatcctttcgtgttgccgactttgtgaacggttcctccaacggcaactccaaaaagagtcacaaaaatcagcaaagaagtga

SEQ ID NO: 178370 - DNA, 111 bp, Arabidopsis thaliana landsberg
aaaatagaggaggaacgagaggagatagagagagagctctataggaaacttcctcgaaggagctttgactcgtcagtcgtcactcgggggcttcctcgtgatactatttaa

SEQ ID NO: 178371 - DNA, 148 bp, Arabidopsis thaliana landsberg
atggcttttgtacaggaagacatagctgctatattcaagaaagcagataaggaaaatttaggaacactgacaatgaaagaatttcatgaagtaatgagtgacatatgtgatagataccctcaagtggagctctacttgaagagtaaag

SEQ ID NO: 178372 - DNA, 292 bp, Arabidopsis thaliana landsberg
atgatcaacgaatttgccaaagaatcggcattgcccaatgaaatggtccgttatatcaacggtgcgcccatacagtttgatgtcaatgccatttttgaatggaacgatttcgttcgcggaggtgtttctttccgccaccagtcatcggttggttttactgccggtgtgcaggtgaacaaaagcctgattgttggttatacctacgatatgtcgatctcatctgtaaaacaatatatcaaaggcggacatgaaatcatgctgggttatgcctttggtggtggtgcctcaagag

SEQ ID NO: 178373 - DNA, 330 bp, Arabidopsis thaliana landsberg
gaaatggtattggatctgaaacaataccagatactgtagcaaatggtcaagatcttttgaaagatgaaattgtttctgaacatttaaccaggtaccttttaattagcaatgaaattgttgtttctgaggacttggtgctatgttgatactaaatggttttatgttgatttatatctcttaaggaatatacagtttttcggtcttgaatcgcagcataaagtaactggatcatatgttgtggttattggacttggaggtgtagggagtcatgctgcgtctatgctcttgaggtcaggtgttgggaagcttcttcttgttgactttgatcag

SEQ ID NO: 178374 - DNA, 164 bp, Arabidopsis thaliana landsberg
atggtggcgaagggcttcttcaagttgcaagtgacactgacgacctcaattagcgccctgcgtgtcatgcaccaatttgtttgtcctcgcgagctggccgtttcgatcaggcggttcgcgctactgctgcgcagtctgagttgcgggcgatgcgcggcacgcag

SEQ ID NO: 178375 - DNA, 932 bp, Arabidopsis thaliana landsberg
atgatgtgcaagatcttggcctgtctcctcaccactcaaggtaccctatcactccgtagttgctttcactcgaatgactggcgtgattacaatgtttacaaaacattgttggtttgtcttccttatgaaattgttgagttgtttggaccgcaaaaagcattcacgtcttggctttcgtcgacgccctttgtacaatacctcaataaattctcctcttgtctcacaatgttataatcctcctccatgggttgaatcggagctcatgacaccaaggtagccctcactgttcgaaaaacattgtcatcaagtccaaagaggaattgatgctctttgtcatcttcacagtctttctcatgcaactcaccaagattgcattcacatttaccacacttgcatactctcaatggtcgataagctgccatactatcccaaatgcgagtaagctttccgaagtacgcttcaattgcaagtcctctctgcttgcaacacgccaattctgccttgatttgctagatctttggcccattcatgacagaaaaacgctttttgagatgatcccacaagtccttagctacatctcgatgggagatgttcgatttcagattcaaatcaatcgacatcttgatccatgacacgaggagtgcctgaatcgtccaccagtcttcaaggtctggtgatccttcagccggtcgagctatagatccgtcaaggaatccaaacttctttcgtgtaaggagagacgtcttcatttcgcatgcccactcatcatagttcgttccctggagcagaggatgcgagatcacgactcctgggttgtcggcagcagtcaaatcgtacggaaaaatcgttcgtcggacctccgtggttgctggtatcgttgtcgggttgggttggtttgccgtcgaaaacaagaaaaacagagtttagattga

SEQ ID NO: 178376 - DNA, 584 bp, Arabidopsis thaliana landsberg
ggtctggagataaaggttccctatgggatcctaatggtgtagacgtgctctatactggtgtgatgcctaagtggctagatgatggtgccctttcaggaagcaagaagctacactactatgaggtgtgtggtgtttgctatatctaaacacacagacacagatcacgccttgttcccctaatgttaaaaaaagtttcaaatgtaggttaatgattccgatttgcaagagaataaatggcttcatctatatgctcaagttggagcatactctaagtgggatcttggcatggtgagcctagctatcagtatactcatttgttttggggtcgtcatgcactcttctctcatacacaagcttttgttttgcaggttaaacatttcccattggagataaagaaagtagtggtacaaacaatggaagacgacatagagtcaaatttgaagttgaagtcgagcaatgctatcttctatataaccttcacgactagtggaggtgtcgagtgcgcatacataataaggcaaacgagggatggaagaccacaacacatgtgccttgaaattaataatgttgagatggacaagtag

SEQ ID NO: 178377 - DNA, 1899 bp, Arabidopsis thaliana landsberg
gtactagaagctctgcttgcgcctggatctgagttatggatgtttaatgaggttccagatcaagaaagagagaaaaagttgacagatgcaggactaaatatatcaaaattggtgaatataaaacttgtgcataggcagggaaatgcagtgatcaggcgtcatttagagagtctccctctagaaacttttgactcagtaagttgttactttctgattgatgtagcatgagaatagatatgccactttctttccaccatcttcttgattaccaaatcaaattgcagatcttaattcttgcagaacagtcactagagaactctattgttcattcagactctcgatctcttgccacgcttctccttattcgggatatacaggtacatgtcctatgtgttttctaatggaaacatataattcagttgtgttattataatctttatgcatgcatgtctcttgagctcataacatatataagactactaatggaagctgttattttctattttaatcaaacagtcgaaacggcttccatacaaagatgcaaagtcaagcgcgttacggatatctggattcccaaattgctgttggattcgtaagatgcagcaagcttcagataaatcaattgtgataagtgaaattcttgattcaagaacaaagaaccttgtatctgtgtcaagaatcagtgattacgtactctcgaatgagttagttagtatggctcttgcgatggtcgcagaggataaacaaataaaccgtgttttaaaagagcttttcgcggaaaaggtacataagaaacgaacttgctttgcttctgtagaatgtgaagttgttctcatgagtatagtcagttttttttgttgcagggtaatgaattgtgcataagacctgcagagttttacatatatgaccaagaagaggtttgcttttatgatataatgagaagggctcgtcaaaggcaagaaatcataatcggttatcgccttgcgggaatggagcaagctgtgattaaccctactgataaatccaagcttacaaaatggtcccttgatgatgtttttgtagtcatcgcctcaagtcagtaacttaaaaaacgcgtagatgatctctgactgtttgaacgctccaggacgtaacatggtaccttgagtccccattttttcgcaacttggtctgaccattttcttagaagaagcaagaatcattcaagaccccttttttccacaacttgttcatttagtcactacgaaacagagacgattatttgtatagtaaatgaccaaacactcttcaataaaatctgtatcttgttttagttctacccatgaaagacgtgattcatcacacagttgcagcaagatcatactctgattcaaaagaattaggacggtaagcaccgcgtcacaccactcgaccatcccccaaatctcttcaccatcatcttgttcttagtttcgtacagccattggtagtaagcacaagctcagaccataaaaccaccatctttccaccataatccaccaacaaaacacaaccataactttcaaactttggcaatcctgtcaaagccttcaactctatccaacatcctccctttgtatcataccatttgaacaacgataatggtaaaataccttttcaatcacgcaaaaagaaaaccatccccaactcgatatctgaccccataatgtttcccattgtccttctttaggtatgtaagccaaaccattagttaatccaaacatgtcgacaccttttcattaaccactgcttgtacggtcatattatcatagtcccatatcccataagaagaatgggaaatgaggttggagccaatacatacccacttgtcttctttttcttattaggtttcaggcagagagtgaaccagcgagggttagg

SEQ ID NO: 178378 - DNA, 294 bp, Arabidopsis thaliana landsberg
atgagcagaagcttcggattcccaactttagaagacggactttcggtgctgtcaaagaacgatctggctgacagcctagcttacaacagtttaaaggtgcgacaaatgaaattcttatatttttgttgagttcaagatttttcgtttgtttaaaactattaacacagacatattcctgtctgcagggcctgatactcagcaatgccctcagagcacagaaagatgctgaggacgaaggatgtactatagccctgaacaaccttcgttccgaagtaattgaactgaggaacgaag

SEQ ID NO: 178379 - DNA, 333 bp, Arabidopsis thaliana landsberg
atgtacgcgcaccgctccggcaaggcggtggtgaagctgctcgagaagggcatcaccgcgcgccagatcctgaccaaggaggcgttcgagaacgccatcgcggtcggcatggccctcggcggctcgaccaacatcgtgctgcacctgctggccatcgcccacgaggccggggtcgagctgaccatcgacgacttcaaccgcatcggctcgaaggtgccgcacatcggcgacctgaagccgttcggcaagtacgtgatgaacgacgtcgaccgccgcgggggcatccccgtgctcatgaaggcgctgctcgacgccggactgctgcacggcgac

SEQ ID NO: 178380 - DNA, 230 bp, Arabidopsis thaliana landsberg
cacctgaactcccaccgggtggtcctccctcgtacatattgagactgagtggcaacagcgatgagaagtggaacttctggttagaggcaagtagtgaagaagaagtgagagtagatgtagctgttcttgatcaacgtcttgatgaagaaactatacatttgaagggtcttttcccaaaatggtccgatgtcattgcctacactagttttctttctacttacttgttctga

SEQ ID NO: 178381 - DNA, 688 bp, Arabidopsis thaliana landsberg
atgaattcccggccaagtaatccgacaaagctcatagtaagatctgcaacgcttttattctgtggtgttgttctgattcagctgtttgctgttcaaattgatgctcaaagatctacaagtcgatggcagacgctcaatggtgagagttgctctcactttctctctttcttttgcacattgtttccaagaaaacaagagaacttacgtattagtatagtactttctttctttatccatgtgtgtagtagaagttgggataattaacttcactttgatttcaggagaacaattattaaagtccaataattactttgattatgtaagcatatactgtatacttttgtcttttaagtattaaaacaacttccaattacttaatttatttatttactaggtgatgctccactggtgattgctcgtggtgggttctctggattgtttccagattcgagtatcgctgcttatcaacttgcaaccctgacaagtgtagccgatgttcttctatggtgtgatgtgcagctaacaaaagatgggcttgggatttgcttccctgatttaaatctggccaatgcttcaactattgatcttgtttaccccaatcgtcaaaagtcttaccctgttaatggagtcacaactaagggttggttcccctttggtttaaccatgccagagctgcagggagtttctt

SEQ ID NO: 178382 - DNA, 1748 bp, Arabidopsis thaliana landsberg
  unsure (1)..(1748): unsure at all n locations
atgataccaaagaggaaacaatccaatgcattgcaggctgtgattaacgccatcaagaacctccattccaacaccatcaaatccgctccatcggggatcttaccaaggagcctttctcggcggttagcaaccaagaacaaagcagaaaaccaagcaagcatcaccgttattcgggtcaaagacatcgtgcgatggcactcatctaaggacctgcatgaggacatatcacattttgaacctcatcagtacacaaccaagaacacgacaacaaccacaggatcctccaccaccagcggcacatcctgcagcagttggtctgacttggattttacatcggagtttttaccatcatcatggggaagtaacgttgaggagtgcggtgaaaaacagagtgttaaaaacaacttacactgcgtcggcgaagattcttgcacagcagtaatactagccgacactgaagtgggacctgaggtaagaatactatattaagagaaatagaaactcgtacttataacattaattaatcacatactttgactactacatgcataaataaagagaaaacagaatcaaatcaaaattaagaaagaaataaagtgacaatgtgatctgagaatagagatcttatgggttgactttgcttcaaccgtaaggtcgcccatgctgtctctaaatgcacgtgcagctgtttgttaatataaattcacatgaagacaaaacagaagctgtctttgtccttggtacatataatagcatgtaccctttaattcctttatgactacgaatctaacaacttaatgaatgagtcttataagagtaacatttaacatactgaaattattaccctatgcactttactagttggatgatttggttggtctaatatgtaatgatcatggtcaggagaacttacagtgtgaaaaggagcacaacagccctgtctcagtgtttgagattcaacatgaggaatatgacgaaacatcagactcttctttcagtcaatgccttgacaatgtggaaagtgagtatagatttccttcattgcaatcgaagcaagttctcttcttagattttttcagacttttnnaaagtctgaaacatacgttatgtaaatgattttgcaggaaccaaaacaaaagctcatgcaaacgattcagcggtttgagtctttggccaacattagtcctttcaatttggatgaatggggctcaatggatgaagcatcttgcatggaaggaggacaagagacagataccaagtatgatgatgatgagaattgtgatactgttgatagagagagtgaagatgaatacaatgatgaggttgaagagaaggcagcacagctatggaaccgagtcaaagaaagacacgccatttggatccacgaagaacatctgataatggactatttcagagatgaattgatgcaaaggacaaactcattccacgaaactcaacactttgagaaccaattggtatgcgaggcaaaaggatggttgcagggaaagagagaatcagagcttgaacgcggaacaagtgagcagaggagacaagcatgtgctagagaaatcgaaagacgagactggaatgagaaacagatagaggaggagcacgaagtggtggtcacacagattgaggaagaactcttcagactgttaatggacgaaactttaacaacgctctctaccaaaactgattccagtccacctgaacatcacaaaacagtaacatcaatgcttaagctttag

SEQ ID NO: 178383 - DNA, 289 bp, Arabidopsis thaliana landsberg
gtaactgtgacacaaaacggcagcccggtcgctttcacattgagcggaggtattattaccatcaatgcattgctgatcaacggaccgaatgtatttacggtccacgcagccaatgaatgcggttcggccgaccagcagatcaccattaattatgatgcacccaaagtaccggtggtgaccattaccaatccggctactgatggatcaacggttgaagttccattgttcgccttcgaagccaacctgcccaatgtgagcagcgccagccagatcaacatgaacttcaatg

SEQ ID NO: 178384 - DNA, 388 bp, Arabidopsis thaliana landsberg
gtaaaacttcaaaatgaaatgaaccttcgaaagaaagcggagtcttctgctgcaacagctgaggaaaaagctaaacttttggaggataaactaactcacctatctggaagtgtggacagggagaagaaacgtctcaacaatgatattgctcaactgggtaaagaagcaaagctttctgtggctaggattggtgcagatgtaagtatcgattaagaaacttgatagcttgactgaagttttgtttttggtttctcatgcaattatcgaatttgcacctgttttcctttgcttttagcttgaaaggatgcaatgtagggcacaaaatgctgagacggactcaaatcttttaagatcacaactggagcatcttaaactgatattagacgag

SEQ ID NO: 178385 - DNA, 103 bp, Arabidopsis thaliana landsberg
atgtacaaggtccagtggagtaatcactcagaggaagaagctacttgggaaaccgaggaattcctgagatccaacttccccgattgcctacctaaggaagctg

SEQ ID NO: 178386 - DNA, 224 bp, Arabidopsis thaliana landsberg
cctcttctttgcctccatataccccaaaacataccacaagctactcgctgacgtgtttccaaaccggtgtaacgtcatcctcgccggttcaagatcgtactcgtttaagtcgaggctgtaccgatcgcgtcgataaccgctttacctccagtgtgaatgcagaaatggtcaataccggtcttgaagttaatccctgctttaaccctgcctttggagctgcctga

SEQ ID NO: 178387 - DNA, 419 bp, Arabidopsis thaliana landsberg
attacttagcccatcctcgtcatggcggtaaagtccagtctcggctcatcaatgaggaagaagtgttcgactcgttgcatcattgggttgcaactgggtccaccggtctgaccaaatgcgggattaaccttgtgaatggcttgcttgcacacatgtcaatgaaagatcaagtccgagccattcaagatgcttcagtgatcataggagctcatggagcaggactgactcacattgtctctgcaacaccaaacacaacgatatttgagataataagcgtcgagtttcagagacctcatttcgagcttatagctaagtggaaaggattggagtatcacgcgatgcatttggcgaactcacgagcggaaccaacggctgtgattgagaagttaacggagatcatgaagagccttggctgctaa

SEQ ID NO: 178388 - DNA, 204 bp, Arabidopsis thaliana landsberg
atggccttttatgagctggaagacaacatggacctggcagaagccttcatcaaatccgttataggttacgtactggaaaacaaccgcgacgacctcgacttcctggctaaccgcctcgtggaagaagataaacaaaaaccccaacaggaacgcagcgaaatgggcctcatagaaaaactggagtttgtgctgcacaacgaattt

SEQ ID NO: 178389 - DNA, 63 bp, Arabidopsis thaliana landsberg
atggcgcacgccggaccgtggcacggcgtccctcgtcaggcggctctgagccatcgacgctct

SEQ ID NO: 178390 - DNA, 89 bp, Arabidopsis thaliana landsberg
ggataatgttgttgatgctcctgatctcaccgctcgttgtggaagtgataatcaaaagtgttatgatgacagtcataatgagaaggagt

SEQ ID NO: 178391 - DNA, 209 bp, Arabidopsis thaliana landsberg
acacacttgaggacactccaccatcatatatatggatcgacctgaaatccagggaagttacaagtttgtcaaatgggtctaatataggtgctgactttacgtctaagatgattgttaatggatctgttgcggtatctgctacacgatccccacagagagcttataattattctaatggagttgttggagatcaaattccccttaactga

SEQ ID NO: 178392 - DNA, 95 bp, Arabidopsis thaliana landsberg
cccatttagtggtggaatgtactttatctcctaaaggcccaataatgacgactcttgtaaaggcagtgaatgcgatccttcgatttacaagatga

SEQ ID NO: 178393 - DNA, 59 bp, Arabidopsis thaliana landsberg
atgggaggctcggatcggaagagtgtttgggaacaagtacttgtacctcggcacctata

SEQ ID NO: 178394 - DNA, 289 bp, Arabidopsis thaliana landsberg
atggaacagacaaaggatgattctgattttgaggatgattttgaaacggtaagcatttcttagtgaatgtttcagtggcagagaatgaatgatctttaagctgttttatgtgacagaagaagatggagactgatacatcagctcaagaggcaaggaatggtaaagacatacaagggattcagtgggaagggtttaagtatactagagaccagtttcgtgacactaggttgaaacaatatgataactttgttaatatcttaaggcctagctctcgagaaagcttgataag

SEQ ID NO: 178395 - DNA, 1308 bp, Arabidopsis thaliana landsberg
atgccaagcggtggtaacggagcaagtaacggagtcgctaacgcgaattccaccggtaacgcaggaacaagcggaaacgttccgatatataagccataccgtcacctgaaaaccctagaaggtcacacggcggcgatctcttgcgtcaaattctccaacgacggcaatcttctcgcttccgcttccgtagacaaaaccatgatcctctggtcagcaacaaactactctctcattcatcgtaacgaaggtcactctagtggtatctccgatctagcttggtcttatgattcgcattacacttgctctgcttctgataattgtacgcttcgaatgtgggacgctagatctccttatgaatgtcttaaggttcttagaggtcatacgaatttcgtcttctgtgttaatttcaatcctccttcgaatttgattgtgtctggatcgttcgatgagacgattcgtatttgggaggttaagactgggaagtgtgttaggatgattaaagctcattcgatgccgatttcgagtgtgcattttaatagagatggatcgttgattgtttcggcaagtcatgatggttcttgtaagatttgggatgctaaagaaggaacttgcttgaagactctcattgatgataaatctccggctgtttctttcgctaagttctcgcccaatggcaagtttatactcgttgctactctcgatagtactctcgtaagttcaaacttcgtcttggcttaataatgaattgaagaatgtagaaatatttaggtttcgaatttgcatcatgtgtgatttgggatatgaacaagaaattaagagttagtctttgatgttgttgatcttggtaacattttgatacagaacatatatagtaactatgaagaagaaataaagtgttgaactttcgtatagtcttggatgggttcttgcatttgtgttatcttgtcgatcttgagatcatattgatgtagaagatgagactaaatggattgattttatctttgtgtattttaacagaagctgtcgaactatgcgacggggaagtttttgaaagtgtatacaggacatactaacaaagtgttctgtatcacatcggcgttttctgtaacgaatgggaagtacattgtgagtggatcagaggataattgtgtgtatctgtgggatcttcaagcgagaaatatactgcagagactagaaggccacacagacgcagtgatctcagtgagttgccatccggttcagaacgagatatcttcatcgggtaatcatttggataaaactatcaggatttggaaacaggatgcttga

SEQ ID NO: 178396 - DNA, 186 bp, Arabidopsis thaliana landsberg
aaactcaagagtccaggggcctgttcggctggctacaagccgacactgttgcagctgtttggactgctgcagctgcaatccatagagagaaaaatactgtagaagccgcagccgcagccggattgcagccgcagcaagccgcagcgaacaagctgcagattcctaaatcctcttgttctagcaatt

SEQ ID NO: 178397 - DNA, 231 bp, Arabidopsis thaliana landsberg
atggtaagagttacatctgatcatcatcacacaatgataagaagttagtaaagttttttataaaagttagtatgttttctttctttctaacattgattttgtatgttgtaggaaatcatactacgtggtgtgttcttgttgactttactgcattctattcttgtaaacggccaaatctatgatgtgcttgaatttggtgccgatggaaatggtattaccgatgattcaaag

SEQ ID NO: 178398 - DNA, 2606 bp, Arabidopsis thaliana landsberg
agctacccttgttgatggtgggaagattcgaggagcagggaatgcttggatctgtccagaggtatgttatatgtacttccctacctttccttgtataatcctacgacagttgaccttgcatcattaatgtatccgggttgggtgaggactgggttgagggaaaacgagacaccaagcagttggattaacaatatgaccaagtaatgtgggtcaatctgcagatgcatacttactctttccagataattttattaatagcctgttaggtgtatcaattgactacatcaagccccatctatcatccaaaaaatggttgtgatttttttgttccacattaggcatgaagagtggtagttgtgtctgagatatagacttttctctttcgaatgaagcatatggtatgcttcccttcataagtaacttggtttgttaactgaaattttttgtttatgtttcacaacgaccagcctgtctcaccttactccattcaccaattatatggaagtttcaatttaatctcctagagttgattgccatttccttgaataatagtttcacgactcactagctcacttgacatactgttttataaggttaatttgatggacaatatgtataacatcctaaaatttagtgtctttatttcatcatccctgatttagcaattttcctaattgatgctgaaattgtatatacgtttacagggggaggtggatgataccgcactggatgtgaacttttcaggaaatatatcttttgataaggttttgcatcgttatatgcctgaatattttaacatcgggatgctgaagttgggtgatttaactggggaaacaaaactttctggggccctcttgaaaccgtaaggtttccttgccatcctcttgggctatatttagtgttctttgatgtttgtgcttgacttgttgcgcttcatttgaattttgaatgcaggaggtttgacataaaatgggcagcccctaaagctgatggctccttgactgatgctcggggagatattgtgatatcacatgataatatcattgttaattcatcctctgttgcttttgatctattcacaaaattagatacctcataccatgacccttgtttgtcgcaccaagacttcactcaaggggaggccatgccatttgttgttgaggggcttgatttggatttacgtatgcgtggttttgagtttttcagcttggtctcttcctatccatttgattcaccacgacctacacatttaaaagcaacaggaaggatcaaatttctggggaagataaaacgacacagcactacaaaagatggagatgttgggtcagacaaatgtgaagatgcagctgcaatttctagcctagatggtgatatttccatttcaagtctcaagcttaatcagttgattttggcccctcaactgtctggacgtttgagcgtttcacgtgatcatgttaaggtaatgtactgatttcttgcttctacagtgaaccgtatcatcagtattagtaacacacagagcactggtagcagctatccttgcgatggtggttctgaaaagtagttgcaatagattttttggttcggcaggaaaagatttgtaactgatatgagatttctaactgttgaagctttttcttattttattttttttgtcaatttattgaagccatgaaggctatcttgtcaaatttgtgtgactcgtctcatatatctgattttaacagttctagacaatttgtagttatagaaaggttagcccatgatgtttatactaatatttttgtagtattgttgcatatctagcttgatgccgcgggccgaccagatgaaagtcttacactagactttataggtccactacagcctaattctgacgaaaatgtacaaagtggaaagttgctctccttttctcttcaaaagggacaactaagagctaacgcttgttttcagccacaacagtccgctactttggaggtattgctttctcttgtgtgaatatatgctttaatttgatatttcaaagagaatgagaatcggccatagatggtttacattttgtccccatttctggtcgcagatacgcaattttccacttgatgagttggagttggcctcactgagagggttgattcaaaaggtaagcaatcgatatgagtttgtctattctgtactagtgctgagtgaagttcagaaatagcagtgtattaacagtattatcagcttcagtgttttcaggatattttcttgcatgttcactgtcaatgaagattaggatcacttaataaaacattcttaagatgacaacctgcaaatattatgtgttagttacttagttatagcagaataatggaatttgaagttctaatgtggtttaatacttctcatagaagcttataacttagaaaatcagcttttcagaagttacaggggagggctctctttataaaattataatatcgtactttccatattacttgcaggcagagattcaactaaatcttcagaagcgaagagggcatggcctgttgtctgtaattcggccaaagtttagtggagttctaggtgaagctttagatgttgcagtaagatggagcggtgacgtg

SEQ ID NO: 178399 - DNA, 92 bp, Arabidopsis thaliana landsberg
tttggtatgtgaggacatctccggagggctagaatttaagggtatccccgccactaatcgtgttgatgattcaccagttttaccaacatctg

SEQ ID NO: 178400 - DNA, 887 bp, Arabidopsis thaliana landsberg
ccggtttatgaaccagtactttttgttgatgcttgccttcagctatggtcacttatcacccctgtgaatcctgcaagtacatggggtccgttaatattcatatttgcggtctcggcttccaaagaagcttgggatgattaccacagatatctatcagataagaaagcaaatgagaaagaagtttggatcgtgaaacaggggatcaagaagcatgtatgaatcacttttccatgattttttcatggcgattaatttttaggtggtggtagtttgtgttaattgtagtagtatgttgcttgtagattcaagcacaggacatacaagttggcaatattgtctggttgcgtgagaatgatgaagtgccttgtgatcttgttttgcttggtacctctgatccacaaggtgtatgctatgtagaggtaggtagacttcatgtatatgatttatgttacaatttagtttccaggttggtggtggtagctttacttgagtacttccaaatgtgctaaaagttaagtcatacatgcagactgctgctttagatggtgaaactgatctcaaaacaagagtgataccctcagcatgtgtgggaattgatttagaattgttacacaaaatgaaagtaagacttcttataaataatcatatcgttcctggctttccatactatttcctcttatcagattttatattaagctatctatgttttcagggtgtgattgaatgtcctgttccagataaggatattcgaagatttgatgcaaacatgcgcttatttccgccatttattgacaatgatgtttgttctttaaccataaaaaacactcttcttcagtcctgttacttgagaaatacagagtgggcttgtggagtatctgtctatacag

SEQ ID NO: 178401 - DNA, 70 bp, Arabidopsis thaliana landsberg
atgttgaaaacagaaaatcaaacaaaaacagttaaacactcgaccaacacagctctttgcagagctctgg

SEQ ID NO: 178402 - DNA, 604 bp, Arabidopsis thaliana landsberg
atgcatcgcgttacctgtaatgatgtagtaagatataattcaaagccttctttgtcgctctcccactaacattactccttttgcttcaatcttctttgtgtttgatgaataacaaaacggttttgcttgttcttgatagaaagtttacccctctactggtattcaatttagggatgtgaatttagttgattttctgttgtaggttgtctcagaaaaaaagctgctgaaacatctgcagcaaaaagtagctaaactcgagtcagagttaagaagcccggagcccagttcatccacctgcttaaagtctctgttaattgagaaagagatgaaaatccaacaggtatgacttagactttaagaactagaattcacatcttgaattatctcttctgaatattttaaatgtggagtccacagactaggtaaaccatatgggacgtgaacttaagtttattaacaaaaacaacttgaattttttatgacttgcaattattcattcatgtttaactaatggcagatggaatccgaaatgaaagagctaaagcgtcagagagacattgcacagtctgaacttgatctagaaagaaaagcaaaggagcggaag

SEQ ID NO: 178403 - DNA, 124 bp, Arabidopsis thaliana landsberg
gcaggttgattccatgggcaagagtgttggtcgtgcagataacttggatatctccattcaggaagagcccttctacgaggctgcggtccttttggcaaagtccaccattgtgataaccaactaa

SEQ ID NO: 178404 - DNA, 1177 bp, Arabidopsis thaliana landsberg
atgaacgaagcattcaacagtttttgtgagtctcaaggaatctttcatcaatactcagcacctagaactccacagtcaaacgaagttgttgagagaaagaaccggacacttcaagaaatggccagagccatgattcatggaaatggagttcctgagaaattttgggctgaggctattagtacagcatgttacgtgataaatcgagtctacgtaaggttgggatctgacaagacaccatacgaaatttggaagggtaagaagccaaatctgagctatttcagagtatttggatgtgtctgttacatcatgaacgacaaagaccagctggggaaatttgattctcgcagtgaagaagggttctttcttggatacgctacaaacagtttggcttatcgtgtttggaataagcagaggggaaagattgaagaatcaatgaatgtcgtgtttgatgatggaagtatgcctgaactgcaaattattgtcagaaacggaaatgagccacaaacgtctatctcaaataatcatggagaagaaagaaatgataatcaatttgaaaatggtgatatcaacaagtctggagaagaatcggatgaggaagtacctccggctcaagtccatagagatcatgcttcaaaggatataataggagatcctagtggcgaaagagtaacaagaggagtcaagcaggactatagacagctggctggaattaaacaaaaacacagagttatggcctcatttgcgtgttttgaagaaataatgttctcttgttttgtatccattgtggaaccgaaaaatgtcaaggaggcattagaggatcatttctggattttggctatggaagaggaattagaagaattctcgagacaccaagtctgggatctagtgccacgaccaccacaggtgaatgtcattggtactaaatggattttcaaaaacaaatttgatgaagtcggaaatatcaccagaaacaaagctagactcgttgctcaaggatatacacaagttgaaggacttgattttgatgaaacttttgctccagttgcaagacttgaatgcataagatttcttcttggaacagcttgtggaatgggtttcaaactgcatcaaatggacgtcaagtgtgcctttctgaatggaatcatagaggaggaagtgtttgttgagcagcctaaag

SEQ ID NO: 178405 - DNA, 270 bp, Arabidopsis thaliana landsberg
gaccggccaaagcacaggctgtggcctttcgaagcggctctgatcactctgccttttaccgttgtgagttcgatggttaccaagacaccctttatgttcattcagccaaacaattttatcgagaatgcgatatatatggtacaatcgatttcatattcggcaatgcggctgttgtgttccagaatagtagtctttatgctcgtaaacctaatcctggacataaaattgcattcaccgctcaaagccgcaatcagtcggaccagcccacgg

SEQ ID NO: 178406 - DNA, 2093 bp, Arabidopsis thaliana landsberg
atgccggtgagtttgactccgaacgcaatcacggcgataaatgacggcgacgtgaatttgaagccgttgttacaggttttagaaatcaaaatgataggaagaagtcaagagagaagccaggagaggtatcgtttcctcatttcagatggtgtttctgctcaacatgctatggtcgcggttcagcttaatgatcgagtcaagtcaggacaatttgagaaaggatctatcgttcagcttattgattacatttgtagcgacgttaaaggccgcaagtaatttttccattttctctctggttagatctagttttcgttgtgttgaattgcttagttttctagtgatctctgatttgttgcttagtaatgtttctgagtattcgtggctatgtatttggtttagtatgtgtaaggcatttgttacaatgagtttgcagaagcaatgatagcttcgcttttggtagagacctttcaatgaggtttcgtgtattgatgaatgattttggttaacatgtactagtgggaaagatttgtgttgttgtctttgtagttcatggtatttaatgggtggtaggcagatgttaaggacaacatttaggatgataatggagatgattttgttgattgtgtgagttggaaaatatagttacacaattgttttggttgaacatgacatatttgaaggagttttgctctctttgattgtgattttcttatggatttattcatactgtgtacaggcttattgtggtgctgaacatggagacgatagtacaacagtctgaaaccattgggaaccctacaatatttggagaaacagatacagaagcccagaagacattttcaggtacgggcaatataccgcctccgaacagggttgtttttaatgaaccaatggttcagcattctgttaatagagcacctcccaggggtgtaaacattcaaaatcaagccaacaatactccaagcttcaggccatctgttcaaccttcatatcaaccgcctgcaagttacagaaatcatggacccatcatgaagaacgaggctccagctcgagtcatccctattgctgctctcaatccataccaaggtcgatgggctattaaggctagagtaactgcgaaaggagatatcagacgatataacaatgcaaaaggagatggaaaggttttctcgtttgatctgcttgactatgatggaggggagattcgggttacgtgctttaatgctcttgttgaccgtttctatgatgttactgaggttggtaaggtatatttgatttcaaagggaagtttgaagcctgcacagaaaaatttcaaccacttaaagaatgaatgggaaattttcttggagtcaacatcgactgtggagctttgccctgatgaagatggctccataccaaagcagcaattctccttccgcccaataagtgacattgagaacgctgagaacaataccatactcgatgtcattggtgtggtgacttctgtgaacccctcggtgccaatcttgagaaagaacgggatggaaacccataggaggatcctgaatctaaaggatgaatcaggaaaggctgtagaggtaacactttggggagaattctgtaaccgagatggtcggcaactggaagagatggttgattcagcttttcacccggttttagcaataaaagctggaaaagtaagcgacttcagtgggaaatcagtagggacaatatcttcaacacagctcttcataaatccagatttccctgaagctcataaactacggacctggttcgattacgggggaaaagacactgcttccttctccatctccagggacactatgcctggaggagtttccaggaacgagataaggaaaaatgtttctcagatcaaagaggaaggtcttggaagatcagataagcctgactggatcactgtgaaagcaaccatatcattcatcaaaacagatagcttctgttatacagcttgtcctttgatgatcggggataaacaatgcaacaagaaggttacacggtctggaacaaacaggtggctctgtgaccggtgcaaccaagagtctgatgaatgcgactatagataccttcttcag

SEQ ID NO: 178407 - DNA, 155 bp, Arabidopsis thaliana landsberg
ctttagatagaattgaagaagaagaagtgattgagatcttgtcttattttgctggagaaaatgtaaaagcgaaagagaagaaatttggcaaagagaagaaaaaaagaggagaaaaagctaaagaagacaaaactatgagactaatctttacgtga

SEQ ID NO: 178408 - DNA, 408 bp, Arabidopsis thaliana landsberg
gtcggcaagtacaccgatggccgtggcgtgaacatggtccttgatggcatgggcggcacgcagatgtcgttgttgggcaatgtgctggcaccgcgtgacagcctggtactgtatggcctgcaaggtgtcaaccagacgccgttcccggcatgtgcggcgtttcagaagaacatccagttctatgtgcattgcatcggtaacttcaccggcaagctggagctgggcatcagccaggatcaggtggcgttgcagcgcgccctgcgcgatatcaaccagttcactgccgaccagttgctgacaccacagatcatcaaggtgtacccgttcgagcaggtggtcgaggcgcatcgctacatggaccagtgcccgtcaggcgggcgtgtggtactggacatggcgcagcactga

SEQ ID NO: 178409 - DNA, 177 bp, Arabidopsis thaliana landsberg
tgtataaaaaggattcgaccttgtcacttgctgatgagagcacctattcaggataaataccactaccagttatggctaaaagaatccagactggaacaaactactctggggggccacaatcaaacaaagaaacgtacgagagtacaagcacttgaagccatagaacatttggcgtaa

SEQ ID NO: 178410 - DNA, 821 bp, Arabidopsis thaliana landsberg
atggtaaacttgcggagtgggatttgggaaaaggctgtggaacttttcagagagatgcagttttctggtgctaaagcttatgatagcacaatggttaagcttttgcaagtttgtagcaataaggaaggttttgcagaagggagacagattcatgggtatgttctgagactcgggcttgaatcaaatgtgtctatgtgtaactctttgattgtcatgtattcgaggaatggcaagcttgaattatccaggaaagtttttaactcgatgaaagaccggaatttgtcttcgtggaactcgattttatcgagttatacgaaacttggttatgtagatgatgctatcggtctcctggacgagatggagatatgtggtctgaagccagatatagtgacatggaactctcttttgtcaggttatgcttctaaaggcttatccaaagatgccattgctgtattgaagagaatgcaaattgctggtctgaagccaagcacgagctcaattagtagtcttcttcaagctgtagctgaaccggggcatcttaaacttgggaaagcgatccacggatacatattaagaaatcagctttggtacgatgtgtatgtagaaaccaccttgatcgacatgtatattaaaactggctacttgccttacgcccggatggtttttgatatgatggatgcgaagaacattgttgcttggaattcactcgtctcgggactttcgtacgcttgtcttctaaaggatgctgaagctttgatgattagaatggagaaggaagggatcatacctgatgctattacatggaacagtcttgcttctgg

SEQ ID NO: 178411 - DNA, 225 bp, Arabidopsis thaliana landsberg
tgcagttttgcgcacaacggcgtgtgcggcgccggaggcttcagggggacccgtgaacacggagaacaacagaacaggccgtcagacggacgctcagggccttctcaggcccgaacaggagcgtccgcaggatgcatgggcgcgattcatgaaggcatgctgcctgcggtgcccccgccaccgcagcacctgctgagcttgtggcgcgccgagtccggggactcg

SEQ ID NO: 178412 - DNA, 276 bp, Arabidopsis thaliana landsberg
atgtatttaatacgggcctacaagaaagagcctgtttttgccaatgcacatagcatctacacgcttcagggcaatacatttaaagaaaaattagggcccgcattccttcccaaagcgcgtatcagcaaccagatcaaggaaaaggacctggaactttatgctcccggcaccaatgccgccctgaataaaggcgcctgccacttcgcggatgcggtagctatcggcgatgctaaagcagacaaaaagctcatcgaaaccatgaaggaggaagaccag

SEQ ID NO: 178413 - DNA, 140 bp, Arabidopsis thaliana landsberg
atgtggattggtgttaagcactcgagcgggtctaacagcggtatgactcgtattctggtatgtggacacatcagtgatccaccggtagagaagctgctgtgtctggtgaagatatgtactgtaccaccaaggtctctgcg

SEQ ID NO: 178414 - DNA, 530 bp, Arabidopsis thaliana landsberg
atgtcggtgattgggaacatttcactttccgcatatgtaatttctctggtgagctttggcaaatgttcttttctcagcatagtggtggtggttgggttgatgcatcagatattgagtttgtgaaagataacaaaccggctgtgtactcatctaaacacggacatgcgagtttccctcatccaggaatgtacctccaaggctcgtcaaagctcgggattggagtcagaaacgatgttgcaaaaagcaagtacatcgtggattcaagccaaaggtatgtgatagtagcagctgagtatttaggtaaaggagctgtgatagagccgtgctggtttcagtatatgagagaatggggtccgaccattgcatatgattcagggtctgagatcaataagatcatgaatcttcttcctttggttgttaggttctctattgagaacattgttgatttgtttcccattgctctttatggagaagaaggtcccacagggccaaaggagaaagataactgggaaggagatgagatgtgctga

SEQ ID NO: 178415 - DNA, 220 bp, Arabidopsis thaliana landsberg
atgtacttagcagctggacatgaaggaggtggactttcgatggtaagtaacattcatcctaatcttctaacacctttctcaagaacccaatcatgattcacggtttcttgaaatcgtttaggctctagcaacagcggaaatggtaacggacatggtactaggaaaaccatcacaagtggatacttcaacgtttggggttaaagggcgtcgttgttgctga

SEQ ID NO: 178416 - DNA, 47 bp, Arabidopsis thaliana landsberg
atggtgaacaaagagttgaagcgtgaaacgacaaccattgtgtggag

SEQ ID NO: 178417 - DNA, 752 bp, Arabidopsis thaliana landsberg
gagcagtctccatgtcggagtttcttcttactcgctccatttcttatccaagattcccaaaaaaattaaatactgcgattctcatgcgtggaataaggacatacactgcaccggattctcaaaagaagttgtgagagcatatcttgatcaatacaaggtcgacatggagagtttcttgactgctagagctcaagagctcgtctccggtggattgctatttcttcttggatcatgtctaccaaatggagttcaaatgtcagaaacattgaatggaatgatgatagattgcattggatcttctcttaatgacatagctaaacaggtaaaataataaacaacttacatatgatattatgagtaataatagtcgttactaacatagttgactttgatttgataacgacttttaaccaaaaaagggaatgattgatcaagaaaagcttgagactttcaaattgcctatctatgttgcatacacgggtgtaataaaacaaatcatcgaggaaaatgtgtattacacgacagaaaggttcgatataatcagccacgaaaacgaggagattccattagaccccgagtttttgacggtctcgtttaaggtcactgttggaggaattgtagcttcacaatttggtcaacatgtcatggagaaaacatttgaagttgtcaagacaaagacacaagaaatgcttcctcaacttgttaatgccaaacccggaatgcaataccttatcgtgcttaaaagaatttga

SEQ ID NO: 178418 - DNA, 843 bp, Arabidopsis thaliana landsberg
ttttcggctaggcttcgtcttcctaaagagatcagaaaagaacagaaaaaggtcagtatgaataagtttgacctcatttggttccgaatatggattgtttcactaacatatattttcttgttttgttaggaatttgtggaacaagtcatgagacttgtagagcttgacactctgagatatgctttagtaggtttacctggtaccacgggtctttctactgagcagaggaaacgtctaacaattgcggttgagttagtagcaaatccatcaattattttcatggatgaaccaacatctggacttgatgcaagagcagcagcaattgtgatgagaactgttagaaacactgttgatactggaagaacagtggtttgcaccattcatcaacctagcattgacatttttgaggcctttgacgaggtttgacctaattttgcttggattacaagaatagttatgaattgttatcagtcgatgatcttaataacgtctgtaccttttttttttgcttaaccttaaaaatacagctgcttctaatgaaacgaggaggacaggttatatatggtgggaaattgggtacacactcgcaggttctggtagattactttcaggtacttacttgtccctgccttttcctattctgttttgatcttcgcacttacatacttgtgcaccacgttaaatatgacaaaccctaaaccctctacaggggattaacggagtacctccaatctcaagtggttacaatccagcaacttggatgcttgaagtaactacacctgctttggaagagaaatataacatggagtttgcagatttatacaagaaatctgaccagtttag

SEQ ID NO: 178419 - DNA, 1323 bp, Arabidopsis thaliana landsberg
atggcgttgcagaaggctgcacaactgcgaataatggagaaggagaagaacaaaagcccatcatatgctatgtgtatttcgttacaaattaataaggttgtttggagcatgcttgtagatggtaaatcctttgctgaggcagagataaatgacatggtaagtataaacattctgtatattcttagtccagtgccgttagagtcgtagcatcacataatcacattttcttattcatatactgattagtcctacggaatgatgagcgtaacttgcgtagcaatttgcttacaaattttccatcgtctacttaattaatgactgacttggtctattgcctgtttaaattaaaaggcaatacatatttaactggatttatacacgcagatttatgactttgatcgggactacaaagacattggtgttgctcgattcaccaccaagtactttgttgttaggaactgtctgccaaatgcaaagtcagatatgcttttatcagcgtggaatcctccacctgaatggggaaagtacgttttccttacatgcttatttaatgtacttgtatattttccatattacatgattgacattttaatcctagatgatggtttcttagtacatgatctggtcttgttctgtctttaagtcgtcataagagtcatcttgtcacgttgtgttaagtgacttcctttctgtgatattggttcatttcgttaaaaagtgacgtatcatcttatccaagaattctcctgggaaatgcacatcgttgtggattttcatcctaaattgttaatagaaagtatcctatgtagtgtgaatgtgtgatgtaaatcatcgttactttgtcatcattatttgatgctggttctgactttgggtgtgtgcttcctctttctatttgatgcacttaaactttgtgtcagttccgataaagtcaatttcattaaaagtgatctataactttgtttacaggaaagtcatgctacgtgtggatgcaaagcagggagcgccaaaagatgcacactatccccttgagctttttcatgtaagtatctttcttctttctttttctcttcaatttttcgttactgaattcataaacgtaaccactataattaataattgactcaattatttgtggactattttacatcttttaactgaactctctttgctttctgtgtttgtgtaaaatttgtctgataattacttcaaaacttgtaggtggagatttatcctctaagaattcatttaacagaaacgatgtacagaatcatgtgggagtatttcttcccagaagaagagcaggaatcaaaaagtcgacag

SEQ ID NO: 178420 - DNA, 127 bp, Arabidopsis thaliana landsberg
atgatcgaatataatatggcattaacagggcgctcagggtctatcatctgtttgggaaacaaagaatgggacagtgacccagacaagggccccctaaaaatcgcatatattcggcaacgaaaacgag

SEQ ID NO: 178421 - DNA, 48 bp, Arabidopsis thaliana landsberg
atggctacttttagaagatatacgaaatggaaatcgagcaaggacagg

SEQ ID NO: 178422 - DNA, 151 bp, Arabidopsis thaliana landsberg
atgtcggtacgtcggacaaatataggtgctgctcagttattctcacggttagttgcagagttagtaactcggtcagttgcagttttgtgtgttaagccgggaacacgcagggcagcacgatatgtcgtacgtcaaagatccaacaaacatg

SEQ ID NO: 178423 - DNA, 269 bp, Arabidopsis thaliana landsberg
atgtcgaggagaaatcctcagcaggacaatggtttgaagtttttagagaatgcattccttgtgaaaaaacaaattggattaaagtttaagaacatcaaaactaacatgaaaggtgagatttttttgttaaatactttcagatgctactttttctatgttgtttttgtaataactttttcaacttccttttcttaatcttttagagaaggcagtccttgtggaaaatgaaatcggattaaagtttaagaacatcaaatttgaagtgaaag

SEQ ID NO: 178424 - DNA, 63 bp, Arabidopsis thaliana landsberg
gtatttgtttatcctttggctgagaaactgctaggacctgttctggtcacccgatatgctggg

SEQ ID NO: 178425 - DNA, 530 bp, Arabidopsis thaliana landsberg
gagagggcgcttccaacacagagaatatttttgtgaagatattcggcgtaagcaacagcaatgtgctgctgggccataacaattcgcgcgacctggagaacggccgtatggcgcctacacgcaacctgatacgtcagtacctgtacagcgatggattgcctgcatggaataatgatggcacagcttcggcaaaacgttccacctattttgtggccgaagcaaatgaaagcagctacaataccgttttcgataaccgagatccccgtgttgcctattcttactttaaagcgggcgatgaagcttaccagggaccctgggttcccaaaacatcactgggctcccgtacagcttttgcacccaagaaaggattcagcaaaacagaccagtacatcaatggcgcggacactaccgacaggatacttatccgttacgctgaattattgctcacactggtggaagccaagtatgaactgaacttgtccattaacgatgcagaccttaacagcaccattaatgcactgcgtacacgc

SEQ ID NO: 178426 - DNA, 1162 bp, Arabidopsis thaliana landsberg
atgctgcacgaaaagtggaactgcaactttgtacgttgtgtgcctcttctgagtattcgtaagaagtcaaaagaatatgggcttgtgtggctgcgaacgacactcttaaaagtgttactcggtggggattttccaatcataaatgacgagacaacccataaatctgtgaagaaagaattgcttgagaccaaggtttttcttgttctggatgacgtgagtgacaagaaacagtttgagtatcttcttggcgacctcaaatggattaagaagggaagcaaaatagtgattacaacgtgtgatagatcgttgctggagggaatttcccatgatacttatttggttccgcaaatggacaatgcagatgcctttcaactctttagtcaccatgctcgtaatgatcagatgtgtagtccgcggacattgttggctcggtctagaacatctttggataatgctggaggcaacccactagctctcaagctaatgggtaacaaaattcgtgagaaagacaagacacaaagttccaatgtgatgatgcaagatgtttggaaattctatattgatcaacttaatgagcagcagaaagaagtgtttctcgacattgtgtgttatttcaaatcagaggatgagtattttgttaggagtatactggattcaggaaatcctgactctgccggtgctgtgagtgaagttacagatctagctaacaagttcctgattacaatctccgatagccggattgagatgaatgatctggtctacacgttcggtaagtaccttcgtcctccccggcggtataggctgtgggaatacgaagatatcatcaacaagctgggaaaaatgggagaaactgtaagttattttatatatcatatatattttttttgcagaggagagaatagccaactatgcttgcaacatttggctttagatataacatttgcatatgtcttggatcatatataaccttttgagccattacttacatgatagtcttgtacttgttttttttttttcatttatattttgaaagtcttgggttcgttttttactccagaagctaatccaaaacctaagtaatttggcgatggttgtaacatgcttactttacccctttcagaacgagaataatatgagaggtatattcttagacatgtcagaa

SEQ ID NO: 178427 - DNA, 242 bp, Arabidopsis thaliana landsberg
attgccttattaataaaggaacaagatacacgattggtgatggtagttctattcgaatagggatggataatgtggttgattctcatcatccttggcccttgaacacggatgagagatacaaagagatgtcacttgataatttactctactttaatggctccagctattcttgggacgattccaaaattacaaagtttgtggacccaagtgatcatgattatctccggcgtagttacctctga

SEQ ID NO: 178428 - DNA, 136 bp, Arabidopsis thaliana landsberg
gttatattgagcctgtaattgtcatccttcaggaagaagagcatacttgggctgggcgagtttcatggaagcaccatacttgcgtgctttctgcccttagtatcaattcgacattaaaacaacacccagtcatctg

SEQ ID NO: 178429 - DNA, 125 bp, Arabidopsis thaliana landsberg
tgttaccgagcttgctaactttcttgggcactaaatttgaagacatttttgatgtagatcatttgattgatgacttgaaggacgatgtcctacttgttagagacatacctgactggcatcactga

SEQ ID NO: 178430 - DNA, 126 bp, Arabidopsis thaliana landsberg
agtccctgtgacgagcatggaccactctacgtctttctttaccctataggcttggtccacgtgtcttctccaaagacgaaaccactacacactgtggtgaatcttgtaaggcttctgctgttgtaa

SEQ ID NO: 178431 - DNA, 451 bp, Arabidopsis thaliana landsberg
atggtcgtagagtgcttgcagttttcgcgcgatggcgtaggatttaatcctacgcttctcgaggagccacgtatgcgcaccacacagcagttcagcatcacccttccgaatgaaatggccgacttagtgcgatcgaaggtcgccgccggcgagtacgcgaccgaaagcgaagtcatccgcgatggcttgcgcacgttggctgcccgcgacaaggctgtcaaagcttggttgcgtgaccaggtggtgccagcggccgaagcacttgaaagtgatccgtcgcgcggaataccgatcgaccaggtgcgcaaacacctcacctcgaaaagggctgcacgcaccggccgctcgcgggcgtgagctggcgcgtcattttttcacccgaggcgcaagatcgcctcgatgtcatcgagcagtatattgccgaggttagctcgccgatcccgtcggcccg

SEQ ID NO: 178432 - DNA, 1169 bp, Arabidopsis thaliana landsberg
atgagaaagccaatttctttgaaggcccataattctaagggtgataagttagaagaaacgtgggccaatgatgaaaggtaatttttcaataacctcatccttgttaatgttttgttgtagatcagaaatcttttgggtatcttgtgtggctcgtaactattttgcggtcaggtcccgaaatgaggatggtcaagatgataatgacgaaggacttacatggaaatctcctgaggaagaagaagaagaattactaaatagaatcaaggaagagagcaggaagcgaatggaagccatactggagaaacataagaggaagcccgagcagcaaaatgaacttttaactcaggataatgggaaaggtattcgttcagtctttattgtgatcaccatatttcacgactctgatttcttcaaatatgaggttttcacctttctactcgtggtatatgtgaatggctctttaacaaaaagctgtaacttgttttcattagatttcactggttgatctcacagacaatgtctttgtccatacaatactctcccacgttcaaatgtaaaaacttgttttgagatgtttagcattgaggcattcccagtgattcttctgtttttgtggcagatgttgttccagaaactggtgctccagtgtcgacttctcctgcagttgtcatagcagctaatgtaggccaggccaaaactaacttggactttgatactgtcgctgccaaggcaccattaatagccggtgggccacctactatgtctggaatttcagactcagagaagaatcaagctcaagcggggcttggtgaaggtagcccgaaggtgcgttagcaaaggaaaccttgattgtttctttggtattggtgatcatgtgtggctcgagtaattcttggttgtaggtttatactatcggtatatataaatatatgtgatgatgatcttatattcttatacacttttatatgaccagagtgaaaggtcaggtgacatgtatcatgatgatatctttggagagtccccggatggtatccgaaaagcggtatgtgtttaactaaactacttaatatcgactaaccgtgtatttgtactgtttactaacctgttgacgtcgtcatcttaaggatactgatatgatcatcatgaaaccctttttctttagtgtatga

SEQ ID NO: 178433 - DNA, 211 bp, Arabidopsis thaliana landsberg
accgcacttcgccattgcccggctcaggcacctattccgatacaaggtagtgttctggggagggatagacacagatgccggcaagcccgcggtagagagggagctcaacgatccggcctggaccgtgcgcacggcgcgcgacgggctcgggcccatggtgcgatattacaacatgttcatgcgcttcctcgtcatcgtcgggctcgcctaa

SEQ ID NO: 178434 - DNA, 77 bp, Arabidopsis thaliana landsberg
aaataaggtccatcagctcacctttggttgtcgtcattgaagttaccaaaggtgatggatttcgactcagtatctga

SEQ ID NO: 178435 - DNA, 65 bp, Arabidopsis thaliana landsberg
atgggcgagtcgtttatagttttcatggttgatgcagagaagctgaaggtgtctcattctgcata

SEQ ID NO: 178436 - DNA, 78 bp, Arabidopsis thaliana landsberg
atgcaaccatccatagacttgctcttcttgtgtcctcaaattaaacaagacgagggcgttcttgttccaacttcacag

SEQ ID NO: 178437 - DNA, 109 bp, Arabidopsis thaliana landsberg
ggaacgtatagaaacattgaaacgtgtaagattaagtaaagggattagagtttatattacggctttggctaccgttgataaagatgtaaatgcaatattcgattcgtag

SEQ ID NO: 178438 - DNA, 48 bp, Arabidopsis thaliana landsberg
atgccggggctagctgtgttggcgtttttcaatgtccgcccaaccccg

SEQ ID NO: 178439 - DNA, 230 bp, Arabidopsis thaliana landsberg
ggacattgatgcaaacctcggaatccaccaagacaagactcaaagattcaaaggctaaactatgcggaagtggtgatgatgatgaagtaaccgatttgatgttgaatccacaacaccgagggctagagaatatgatccaagggctattcctcgcgaggatcagagactacacgaaacctaagtggtttgattccacaaactacctagaactcgcaagaacaatgatttga

SEQ ID NO: 178440 - DNA, 46 bp, Arabidopsis thaliana landsberg
catccagccagaaagagaggagtgcactgttgatgagagcttcggt

SEQ ID NO: 178441 - DNA, 168 bp, Arabidopsis thaliana landsberg
atgaatccgaaaaatttgtggaacccagtgataaaagtggtcggggcgttacactttaccactcgacaaaagaaatttggttattctctgatccttatccattatcgaaatttgttgaacccagtgatagaagtcatcttcttcttagaaatatcgaagcatcagttt

SEQ ID NO: 178442 - DNA, 316 bp, Arabidopsis thaliana landsberg
  unsure (1)..(316): unsure at all n locations
atgctaggcaaggctgccccggcttccagtggggtcggccagaacctggctgcagcggcaatactactccgagagatgccggagccatccaccactaaggggcagcgtatccagggagaactcaagaatctcctggagaatgccacggtgcaacgggccgagagctctgcctcccgaaggcaaggtaccccccaaagcatcgcgtcgtgacttcccgattcatgcgggaagcctcgatccacaccgggcgcacgcgggacgtgacgtnncggccccaggccgcctcggcaacgagcaccaccgccacgacgaaaag

SEQ ID NO: 178443 - DNA, 70 bp, Arabidopsis thaliana landsberg
atgcccaaacagagggagaagcccaagattcgccagcaagagagcccaagaggcccaagaaccatgaacc

SEQ ID NO: 178444 - DNA, 198 bp, Arabidopsis thaliana landsberg
atggcgagaaaagctaccaatagttttttccttgaagaatggttaaggactgtgagtggaagtagtgtctctggtgatctagtgaagcaaaattctgctccatctgctaggtcgattattcaagcatggtctgagattcgtgaatctcttcaaaaccaaaactttgattcacgttaccttcaagctttgagagctttg

SEQ ID NO: 178445 - DNA, 268 bp, Arabidopsis thaliana landsberg
atgtctgagtccgacgtcgtcaaagcttcatactggttcccggctactgactttccggccacggacatcgactcatcccttttcactcacctcttctgtacatttgccgatctcgaagctgagtcatacgaaatcactatcgccacatggaaccaagcaccattccacgcttttacagagactgtccaacagagaaatcctcacgttaaaacactcttgtcaataggtggcggtaatgctgacaaagacgcgttcgcatccatggcaa

SEQ ID NO: 178446 - DNA, 266 bp, Arabidopsis thaliana landsberg
atgaagttgtcgagggagtgaagaagccagatgataaaagcaaagtagaaaagaaaggagatggagacaaagaaaatgctgatttagatgaaggaaagaaacgagatgaggtagaagcaagaaaatcggaatcaggcaaagttgtggagggagatgagaaggcaagtccaccacaagaatctatagacacgatccagaacatgacagatgatcaaaccaaagtggaaaaggaaggagatagagacaaagggaaagttgatccataa

SEQ ID NO: 178447 - DNA, 871 bp, Arabidopsis thaliana landsberg
atgaaacgacagctagactggacacgacggtacaagatcattggaggaattgctagaggaattctttatcttcatcaagattcacgactcacaatcatacatcgtgacctcaaagcgggcaacatcctcttggacgctgatatgaaccccaaagttgcagattttggaatggcgaggatttttgggatggaccaaacagaagccaatacgagaagagttgtgggaacctagtaagtttttctcttaaaatgtattgcctctctatagactgtattatgcttctatggactcaacatttttagtattgtggcagtggttacatggctcccgagtatgctatgtacggccagttctccatgaaatcagatgtgtacagttttggtgtcttagtatttgagattataagcggcatgaagaacagtagtctctatcaaatggatgatagtgttagcaacttggttacatatgtgagtatagagcttaagactttcattttcattttttgctttatttaaaagtgactataacaataaattattaaaatgttcaatagacttggagactatggagcaatgggtcacaattagaccttgtggatccgtcatttggagataattatcaaacacatgatattacgaggtgcatccatatcgctttactatgtgttcaggaagatgttgatgatcgtccaaacatgtcagcgatcgtccaaatgctcactactagctcgattgttctcgccgtgcctaaacaacctggatttttctttcggggtaggcatgaacaagtaggagaagtaggttcatctgtggataggcttgctctctgttcaatcgatgatgcttccattactagtgttgctcctcgttga

SEQ ID NO: 178448 - DNA, 2059 bp, Arabidopsis thaliana landsberg
atgaaagaaaaccctaacgagaagaagaagaagttcgaacaaaacaatgataatgtagttcgtggggacaagtttgaaggtgggtctggttttgccttgtaacaaaaatccaaccacacatatcaaaatccaaactttctctcaatctctctctgtctgtgctctctctctcttcctctgctttgagagatagtggaggctctctctttttttttctcactttctcgctccaatggccccaccccattcccttttttagttagttaattatatactaatatgcatgattagcaatttatagtttacttttgatttgttttctttgttaaacaagttttgcttagtgagaaatgagagaagaaggtctaaagttgaaaagaaagcatattagaaacgtcttaccaatcccactgtaagactataaattcccaattaggtggtttttattttgatgaatgataatgtcaattagttagttggttcttgtaatctttaactatgagtctatgagcattattaaaattgtaatgtttttcaaattggtctttacctttttgagtataattggtctctctgtcacgtggtgtttatggtttgaagacaaccttggggatctcttccacattaatctcccaaatttccctgttttacccctctcgatgaaagcaaaaatgttattttcccccttgggaacaaggatgtttttgtcttctttgaatggggaacttaaacggtgaggcgttaaaatcttgagtaccgtcgttaaatccacgtcagccaaccatggatgagccacgcttttttgtatatgtgacagctagtaactactactctagtagcatcgcacacgagagatcgcacgtaatctgtctgtgtttaggcaaagctcacacacgtgcgtgaagttgcatcttccaccgtacacgtgtcaggttatggccactgaacatgaacaagaacaatgggaaatggaagtctagcgaacggtcataaaatcgtagaatccaatgtgaaattagttggaacccatatagttgtcttaaagaaagccgactttctctctctctctctctctacctaattattatagtatctctttagggcaaaatcataaatgattgtggagatttattggtccttttgttcatacattttttgcagtgatgttttcataaattgacattcttacttcttagtttaacttccgtcagttgctcaaaaataaaagtttaacttccatcgaaacgttttactagtataagagacttataaatacataatggacaaattaaattagatagcaatatgattggtgattatagcagcattggaaggctacgtagttagatttatatacatgtatatactagttaaacaccgcatacataccttatgtatgcaattattacatcacacggtgttgcattgacatctaatataattacgtggaagtacatgcatgacttatgaaaacatgttgggcatgtctctgagaagaattacttacgtgtggcatcgtattgacaaatgacaatgaagatgttttggaaattaagagagagaaaacatattataatacatggagctttttggatacgccgacaaaatgtgtgtgtgtggtgtatcaccgaaatctaagtaaaaatgtatgtgccggtagttacggccgaagtcgggaattgtagagttgaagtttaaattcaagtcggtttagctcagagctactttagttttactccaaaacattcatgtaaatagaaacaaatcggtaaatcaggaagtttggggataagttatgcatttgcaatggtgtagctatcttttggttctaatggattcgtctttaaatgtgattttgggatgtaagttagagaacagaactttgtaaacaaatttattaggcaaaacactatttcttttattttctcatatagttagaacaacgaaactagccccgaatatgtgtctacatgaattatctaaattcgactactacacatgggctaagagactagtccggaatttcggtaaagtgaaaggctatccaaaacttatataa

SEQ ID NO: 178449 - DNA, 2030 bp, Arabidopsis thaliana landsberg
attttggagattctatcaaccattttaaatgaagtcagtggacgagggctggcaagaaaaatcatcgcagttataaaagctgctaacatactgggccttacattcactgaggcatatcaaaagcagccgatagagttgttacgattactttctcttaaagcacaagattcttttgaggaagcatgtctccttgtccaaacgcattcaatgcccgctgctagtatcgctcaaatacttgcagaatcctttctaaaggtaacttagcaaaactatctctgttaacttgtacacgctttgtagattttatttttgaatgcacaaaaatctttatcttatggtccttatttgattagcttggcaaaaacctcctacatcttctttccgtcctgaatcttttctgtgggctctttcgtgttatgtctctaatctgttttctttctccagggtttattggctgctcatcgtggaggatatatagattctcaaaaggaggaagggcctgctccacttttgtggagattttcagactttttgaagtgggcggagctttgtccatctgaacaagaaattggtcatgcattaatgcgtcttgtaataaccgggcaggaaataccacacgcgtgtgaggtatgtgattttgtaaaagcttattaacaatagtttatgctgcatgagtttcaagatggatgagagaataagtattcaaccctaatttggtaatataatggaatgctgtttttaggttgagcttcttattctgtctcatcacttctacaagtcatccacgtgccttgatggagtagatgttcttgtggcacttgctgccacaagggttgaggcttatgttgctgagggagatttctcatgcctggctcgtctaataactggagttggaaactttcatgctcttaatttcattctcaatattctaatcgaaaacgggcagcttgatcttttactacaaaaattttctgctgctgctgatgcaaacactggcaccgctcaggctgtcagaagtttccggatggctgttctgacctcgttgaatctgtataacccaaatgaccatgatgcattcgcaatggtatgtatgtctttagtagctggaatcagccaagtaaaagagtttatttcatcatgttttgtctgcttaccacaagttcatcttagattaactttgactgcatctattacttgtgaacgtgaaggaacattttgggtagtttttttaaaggtttttctgttcatggcttttttcatgagacatgcattttctgcaggtatataaacactttgacatgaagcatgaaacggctactttgctagaggcacgtgcagatcaggctgcacagcagtggtttctacggtatgacaaggatcaaaatgaagatctccttgattctatgcgctattacattgaagctgccgaagttcacacttctattgatgctggaaacaaagcgcgaaaggcttgtggtcaggcttcccttgtctcccttcagataaggatgccagattccaagtggctctgtttatctgaaacaaacgcaagaagagcacttgtagatcaatcccgtttccaggaggctctgattgtagcagaagcttatggtcttaaccagccaagcgaatgggcgctggtgctttggaatctgatgctcaaacctgaactagcggaagattttgtggctgaatttgtagcggtgcttcccctacaggcttcaatgcttctggaactggctagattctacagagcggaaatggcagctaggggagaccagtctcagttctcagtctggctcacaggaggaggcttaccagctgagtgggccaaatatatgtggaggtcattcaggtgtttgttgaaaagaacacgggatttgaggttgcggttacagcttgctacaacagcaacgggatttgctgacatggtagatgtgtgtatgaatgcgttggataaggtcccggaaaatgctggaccacttgtactaaagaaaggacatggaggaggatacttaccactcatgtga

SEQ ID NO: 178450 - DNA, 1538 bp, Arabidopsis thaliana landsberg
atggcgggtcgcagagacaggatccaacagctccgtggatctcgaattgcgattgccatctttgtcggaattcttatcggctgtgtctgttccgtcttgttcccgaacggcttctttaactcgggatcatccttgattgctaacgaagaacgcatttcgaaatcaacctctacggtactgagagagatcttatgctttaaacatctacaaattcctttttttagaaatttttctgtaatctcgagctctcgatttgtgattagaattagtgtttgttggaatttgagaatttgagtctctttcgtttgttatgaagattcaaaatcttcatggatttttgagtagaactacaaattgcatgtcttgaacatttgagtttaactggtgaagtttcattttttttctctgttttttgaattgttcaggatggattggcttcatgtgaatcatctgaacgagtcaaaatgctcaaatcagacttttcaattatctcggtaaagaacgcagagttaaggaagcaggtaagagaactaacggagaaggtacggttggcggaacaggaaacagagaatgcaaggaaacaagtcttagttttgggatcagagataaaggcagggccttttggtactgtcaagagtctgagaactaatccaactgttgttcctgacgagtctgttaacccgagattagctaagcttttagagaaagtagctgtcaataaagagatcattgtggttcttgcaaattcaaatgtgaaaccaatgttggagttgcagattgctagtgtaaagagagttggtattcaaaactacctcattgtcgcgttggatgattccatggaaagtttctgcgaatcgaaggaggttgtgttttacaagcgagatccagataaagcagtggacatggttggaaaaagcggaggtaatcacgctgtttccggactgaagttccgcgtcttaagagagttcttgcagcttggttacagtgttcttctatcggatgtggacattgtcttcttgcagaatccttttagtcatttacacagagactctgatgttgagtcaatgagtgatggtcacgacaataacacggcttatggcttcaacgatgtgtttgatgaaccatcaatgggatgggctaggtatgcacacacaatgaggatatgggttttcaattcagggtttttctatctaagaccatctcttccttcaatagacctactcggtcgtgtggcagatacactctctaagtcagaggcatgggaccaagcggttttcaacgagcaactcttttacccttcgcatccagggtacactggcttacacgcttccaagagagtcatggatatgtacgagttcatgaacagtaaggtactcttcaaaacagtgagaaagaatcaagaactgaagaagttgaagccagtgattgtgcatctcaattaccatccagataaactcgaacgaatgcacgctgtggtagagttctacgttaatggcaaacaagatgcgttggatagctttcccgatggttcagattga

SEQ ID NO: 178451 - DNA, 1132 bp, Arabidopsis thaliana landsberg
atgtttgactctcaccatggatattatattgaaaatggtgaagatagggatcctccattaggtgagtccctttgattttctgcttttactttgctgcaacgattctgcaaaaattctcatagggccgtacaatctttcctggattgcaagaatattctgtgatacttaagctgcttagagaaaaccaaagtaaattctttagtagcaaacataaatattttgatcaaagtcctggtgatttttaagtgagtctatgttactgttagttgggaaaaagtatgaatgtctccatctttagacgtccggggaaaacagaaatgttacatgatggatgatggattaaagttcttatatatgtctgggaaaaacgtccggggcagaccacttgtgactatctttgtttgggcagtggatgcttctttttattattctcagtgactagtgcattaattatcttttaaatctgcaggctatcatttagatgattcggaaataacattgaatgtttgtgtgaggaaacaatttgagggaggggaaatatctttcataggcacacgatgcttgagacataagcgaacagacgtaaagccagaggtatgtgtgaccttttgatgagattttttgtcctattacatgccaatatttcgtatatggcaaaatgttaatgaaggaaacaactatttctcactgaagcaggaagtttttcattactgtcattcaccgggtcaagctatacttcatcgtggccgccaccgccatggtcccagagccaacacaccatcttgttctcgggccaatatgattctttgttgcagaaagtaagcaatttttgaagcttgcctcaggatttcagatgacaattgaatcacattttactcttcttttccattgcagctctttgtttagagagatggaaaaatatgagaaagatttcccagagtggtgcaatgaatgcgcccatgaaaagaaagaaaaggaaagccagagtcttgctgccaaaagaaaggttattaaaaaaagaagacatgattatgcacaagtttataagatttttggtttgagcatggttatgaacctgcgggggtccttattgcaggggatgattcgaattgcgactggaggcaaagcatga

SEQ ID NO: 178452 - DNA, 369 bp, Arabidopsis thaliana landsberg
aatgagcccggccacaaacagggcgacacccgcggtcgccgagccgatgagatcgaacatgctctggatctccgttggcacgcgcacatccaacagcacgagaatcgtcgccagcaacggtgcccacacgaacggccgcttgaagctgtacaaaatgctccggccgagcagcgtccagacgcgcagcgtcgctgcaccggcagcgcgctgacgatcgtattcgagcatcgttaccgtcagcggaacgatcatgatattgaacatcagcgctgcgaccgcaatcgtgaggagcgcggactctcaaaaagcggcgtaaggatcgggatgccaacgaacgatgcatttgaatatgtcacgctgccggattga

SEQ ID NO: 178453 - DNA, 1128 bp, Arabidopsis thaliana landsberg
atgaggttcagtaacgaattggcaggagagtcttctttccctgagagaaaggttcagcataagtgcaacgattataacattgtgtctacaaccactgaattgagaactcctcagaaggaggtaggtttggccaacggaacagaatgcttggctgtttctcctattcctgaggattggagaactcccttggcgaatctgacaaacacaaacagcagcgcttgcaaagattggcgggtgagttctggagaaaagttagaaactcttcgacagcctcgcaagttgaagagactacgtagacttggagattgctcgagtgctgtaaaggagaataatcctggtattacagaggcagaccatatcagatctcgttctcgcggtaaaaagcacattagaggtaactggttctgtattttcttttactacattgaaatgatctgggagttgacaatgaccgaaaatttacggattctgatgttgcttaacatcaccagaatctccccagtatatgtatgtataccaattggtttgattgattaggaatccataagatcttaatagaatattgccagtgtcatagtgaagtggaaaagtgctgagagttggtttacactttcttctgttgcttttgcgttggtgacaaaaaaggtcaattttcaattaaaatttgagttatttgtggtatacatctgcgttagatcaatgtcttgatgtgctgagagaaatgaaacatttgtcatgttgatctgtttgagtgattgctgcttggttgctctgtgtcttaaggtaagaagaagatgatcatggatgatgatgtccaagtcttcattgacgaggaagctgagtaagttcttctctaatctaaaaataaacatctgatggtctttcttacttccacaaaacagcgagagacaacataacaaaagtagtctttctgactacaaagttgatgttagttgtttcaaacctctctattttgatcagggtctcttcgggagcagagatgtcggctgatgagaacgaagatgtgactggcgattcatttgaagatagtttcatagatgacggaacaatgcctacagcaaatactcaagccgagtctggtaaagttgacatgatggctgtttacag

SEQ ID NO: 178454 - DNA, 87 bp, Arabidopsis thaliana landsberg
atgccgagaggaagcccattacctcctaagcgttcaccattctttggtttgaaaagtctttttgggaaggagattgagactgcgagg

SEQ ID NO: 178455 - DNA, 204 bp, Arabidopsis thaliana landsberg
atgggtaagatcacggggtttctcgaattcgagcgtcatgaccgcagctatgagccggtcgcggagcgcgtgaagaatttcgacgagttcgtcattccgctgtcggataaagagctgcgcgatcaggccgcgcgctgcatgaattgcggcgtgccctatagacatggcaacggctcggtcgcgcccggcacgccgggctgcccg

SEQ ID NO: 178456 - DNA, 73 bp, Arabidopsis thaliana landsberg
ttcggtgttcattgatttagggttcctgataaacttcggaaacccctattttgaattgtttcggaattatctg

SEQ ID NO: 178457 - DNA, 628 bp, Arabidopsis thaliana landsberg
tgcactatagatttgaaggaaaacgtcatgactgttggaggaggagaggtctcggttccctttttgcaaggttagttctctactaccttctcaatcttgatagctatgagtgattctaaattcgctgcctttgttttcaattaacctgacaaaaaccatactttctcagagaaagacatcccgtcccgatttctggatgaagagcgtgttccaaatgatgcatctagctctggagcaacggtaagaagttttgcatactgtcttctatggttctgatgaactaaatttcaaaacaatttgttatgatcaaaaacttttggtcccataggttccttctgggttcacagagaagaagaataacactgttgcaaacccaacaagccaacaaccgaaaaggcagaacacatcagaggtaaaaaaactatgtttaaggttttagtctcacatcttttgattctttttcagtctccattaatcaatttcatcacataatccacagggacctgaatttgaagccaagattgcaaagcttgtggaactagggttctcccgcgattcagtgatacaagctctcaaattgtttgaaggaaacgaagaacaagctgctgggtttctctttggcggctaa

SEQ ID NO: 178458 - DNA, 949 bp, Arabidopsis thaliana landsberg
atttacagctacacggagatgatgtgtactacacgttggagaatgcttctcttgaaagtgggtttcagcgagagggagggattcgccacaatccgagcttaaccaaggtgattcatttcaaggagctctcgttatataaaatgtctaaaatttaaattttattcaaaaggtttcaccttcggataaatccgaatcactaaatgctagttttatgtttgtttgtttatttatctttcgtgcatcagttaatttctctattgtgatgtttattcagagcctatcgaagccaagttttacctctgggacaagaggtagtgagtctgattttagtaatctttctcaaaggtcgaggtttgaggagttaccagacacttggtacactcagtttatttcaaggtatggttttaagtatggaatgtctgttggaggacaagaatctgataaacgcacacctgaagggatgtctacttaccttagagttgtagatactcataagagaaagcgtgcaccttttttagaagatcgaagtttagctcatatgagtagatctagtacacatcctagttctggctttgatggaagtacttcagaagatgatatactttttcttccggagacaatgtttagaatgaactgtgtacctgagactgccctttcgccgattaccagaacacaagacaacttaaaaacagaattctatggggtacttgatactttaccgcaagttactaccaggagtcatattatgatcgagaggcttgggctgatgcctgagtaccatagaatggaagaaagaggagttttacgccgtagaaaagctgaaaaaatgggttttagtgacgatcaagcagctctggtgtcacggaaagttgttgcacgcatgcttctgaaaatgggacttgaagctgccacagaggttccgattgatgtcatatctcaaattagttag

SEQ ID NO: 178459 - DNA, 3453 bp, Arabidopsis thaliana landsberg
atggcatctaatattatcaaatatttgctggttcaccgaaaatctgctttggaggatttgctcgtcaaaaaaccacaccgaggacaaaaatttgatgtactacacgggggttttgatagattgctgactggaaatcttccagaattctctaagtggcttgagagctccgagcaaattataactaaagtactggagcagggtgctgcagttatgtggatacagtacatagctggctcggcaaaatttcctgatgttagaatgaaaggcatggatggtcgtcgcactagagagatggggagaaaattgcgagatacgtctaagttagacctgaaacactgggagcaggtaaatgagcgaagatatgcacttgaagtagtacgtgatgcaatgtctgctgagcttagagttgtccggcaaaataaatatggtttgatacttcatgccgagagtgtgtggccaactcacctccaacagcttgtacatgagcgtggtatattcccaatgcgtatttcccatggagttgaagatcttaaatggcaactctgtcctattgaaggtccatatagaatgcgtaaaaagcttgaacgatgtaaactgaagattgatagcctccataatttactagaagggaagttggaacttggagaaattgagctactcaaatccaaaagtgaagatggtcttgttatttctgatatggattctgagccagctttcctgctaagtgaactttacagcgagtccttttccgaagaggctgatgatcttaaggatgttccatctgctagaaatggatggaataatgatagagcaactagtacaaatgaggcgagtcttcataattctctttcttttggtggcaagtctagtagtacagcagtatctgttccaataagcgttaacacagatgaaaaatctgagactggatctccaataaagtcatcttctggtaaaatggacgaaatcaaacatgtggaggaagaatcagagaaggaattgaaagatgatggtgagtatctgatcagaccttatctggaacatcttgaaaagattaggttccgatataactgtgagagagttgttggtttggacaaacatgatgggatcttcttaataggggaactttgcctatatgtgatagagaacttttacattgatgatcatgggtgtatctgtgagaaggaatgtgaagacgagctatccattattgatcaggcacaaggtttgaaaaaacaatttcatggaagcttggaatccaagtccaagtctagcacattgtggagtacaacaataaaaatcggtgctgtagggggaagagcatgggcatatggtggtggagcttggggaaaggaaaaagtgcgtgtgactggtaacttgccacatccttggcatatgtggaagctggatagtgttcatgagattctaaaacgtgattacgagctgcgtcgagttgctgttgagatatttagcatggatggatgtaatgatctccttgtgttccacaagaaagaaagggaagaagtcttcaggaatctccttgccatgaatcttccaaggaacagcatgtatggcatcttgttgcgtttcatatcaattttttttggcgctctcagcatattccccattttccccatttttctctagtcatgaataaacatgtctcgttaagctccagagctgagcattatatagctcagtcgtccatgaggcccttcctaaatctatgaatgtgttgtttattctgtttgtttttcttttcaggctcgatacacccatatcaggatcagcgaaacaggaaagcaaagagggtagccgtcttttcggattgatggcaaagtcattcacgaaaagatggcaaaatggggagatcagcaatttacaatacctaatgcatctcaacacccttgcaggacgtggatacagtgatctcacacagtatccggtatttccgtggattctagcagattatgatggcgagagtcttgatttgtcggatccaaataattttcgcaagcttgacaaaccaatgggttgccagacgcctgaaggagaagaagaatttaggaaacggtttgtgatatgcccttaaacttgatttagagcttttcttgtgtgttcctcaccatacagctttcccttttaattagttatgctttcatcgtgtcgtaatcatattccaagaagtgtttctcatgctttccttctccctttatcatttcagatatgagagctgggatgatccagaggttccacaatttcattacggttctcactattcaagtgctggcattgttttgttttaccttattcgccttccaccgttcagtgctgaaaatcagaagctgcagggtggtcaatttgatcatgctgatcgacttttcaatagtattagagagacttggcttagtgcagctggaaaaggaaatacatcagatgtgaaagaactaattcctgaatttttctacatgcctgaattcttagaaaacagatttaaccttgatttgggtgaaaagcagtcaggggataaggtagcaagttgttctaatggtgcttatgttccttttacttcgctgtttccctttcatgagaaagttccttgtataatgtcaggttggtgatgtaattttacctccttgggctagagggagtgttcgtgaattcatccgcaagcacagagaagctttggagtctgattatgtttcagagaatctgcatcattggatagatctcatctttgggcacaagcagagaggaaaggtacattacatgttctccttttggtagtcaatagaaaaatctaactatcatgtcttagagatgttgcttcttaaaatatcgaatcatgaggctgtttattttcaggctgcagaaaatgctgttaatgttttctaccattacacgtatgaggggattgtggatgtagatgctgttacggatcctgccatgaaagcatccatactagcacagatcaatcattttggacaaacgccgaagcaactattccagaaacctcatgttaaaagaaggacagacagaaaattccctccgcaccctctgaaacactcgatgcatcttgttcctcgcaagatacgtaaatgctcatcatctataaaccaaatcatcactttcaatgataagttgcttcttaccggcgctaactgtctcctgaaacccagaggctataagaaatacataagatggggtttcccagacaggaccttgagatttatgagctatgatcaggacaagctcttatccacccatgaaaatctccatgaaggcaaccagatccagtgcgctggtgttagtcatgacgggcgcattgtggtcactggagcagaagatggtctagtctctgtgtggagagtcagcaaggatggcccccgtggttcacgacgtttacggttagagaaatccctgtgtgcacacacagccaaggtcatttgtctacgt

SEQ ID NO: 178460 - DNA, 603 bp, Arabidopsis thaliana landsberg
atgatgtccggcgggaactacacgactatagacagccagaaagtctctggatctgtacctgtaagttttttatgtctcgatctcgaatgtttacatgagtgctcgtccctacactgattcttccgatctgatctagttttgtttgtgtcaatcgtagtctgttccagatccaggccataccaccgtcaaaatcgcaggtaacattcttcgttttatgatttttggttgctgaggtgaaattgatattagagcgtttagggaaagaacgatcctatttggaattataggcctttttttgtctgtgggacgtaagactatgttgaatcttagctaagattactgcaacttgttaggcaatggctatggactttgaattaaactgtaatttgaacagatgagggtttagccaatagtagaagtgtggtttgatttgacatggttatgttcatgttaagttgtgattgagggatgcattgttttgcagagtcaaatctacaaactattcctccatctgctactcagggcaagatctctgggggtagtaattcccctcgtgatgctgacgggaagatactctcgacttcagaattatccaatgcctga

SEQ ID NO: 178461 - DNA, 331 bp, Arabidopsis thaliana landsberg
atggaggaaggaacttcaggttcacggagaacacggtctcaagttgctccagaatgggcagtcaaagattgtctagtcctcgtgaatgagatcgctgcggttgaagccgattgttcgaatgctttatctagcttccagaaatggacaatgatcacagagaactgcaacgctttggatgttagcagaaatctaaaccaatgcaggaggaaatgggattctttgatgtctgattacaatcagatcaagaagtgggaatctcagtacccaggcactggtcgttcctattggaccctgagtagtgacaagaggaagttacttaatctcccggggg

SEQ ID NO: 178462 - DNA, 330 bp, Arabidopsis thaliana landsberg
aggaagcagcagcgaatgcaaccgaagcgacttttcatcgtcgatgccatggccatggccttccgctcgttttatgcgttcggtttaggcaggcctcttacaacctcctcaggattgcccgtggccgccgtttacggcagcgccgtgttcatgaacaaattgctgaccgagcagaagcccgattatctcgccgtcgcctgcgactcgcgcgagccgaccttccgccacaaactctacgaccagtacaaggcgaaccgcaccgagatgccgccggagcttagagctcagctcccgcatttctaccagctgctcgaggcctacggcgtgccg

SEQ ID NO: 178463 - DNA, 126 bp, Arabidopsis thaliana landsberg
atgaaaaaaacgaaagacaaagcagaggaacgagtatgccggaggaaaggggaagggatcagaagctttaccttctccgactccggtcaccggaaaaatgaagaagaagaaggagagaaagaagga

SEQ ID NO: 178464 - DNA, 422 bp, Arabidopsis thaliana landsberg
  unsure (1)..(422): unsure at all n locations
atgagctggccgcggccgatcacgatgaggtggtcggcggtgacggccatctcgctcatcaggtggctggacacgaagacggtgcggccctcggaggccagctggcgcatgaaggtgcggacccagcggatgcccnnnnnnnnnnnnnnnnnnnnnnnnnnnnnnnnnnnnnnnnnnnnnnnnnnnnnnnnnnnnnnnnnnnnnnnnnnnnnnnnntgccccatgccgagggagaaaccgcccgcccgccggttcgccacgtcgcgcaggccgacgaggtcgaggacctcatcgacgcgacgggccggcaggccctgcgtctgggcgaggaacagcaggtggttgcgggcgctgcggcccgggtgcacggcgcgcgcctcgagcagcgcaccgacccgctgcagcgggcgcttcaggtcctg

SEQ ID NO: 178465 - DNA, 65 bp, Arabidopsis thaliana landsberg
cattatttgatatcatcaaccattatgtacgagttgtgtgtactcatgttgctcatgaagcatga

SEQ ID NO: 178466 - DNA, 4071 bp, Arabidopsis thaliana landsberg
  unsure (1)..(4071): unsure at all n locations
ccaaagcctctgaagaatctagatggacaattctgtgagatatgtggagatcagattggtttaacagtagaaggagacctcttcgtagcttgcaatgagtgtggttttccggcgtgtagaccttgctatgagtacgagagaagagaaggaacacaaaactgtcctcagtgtaagactcgttacaagcgtctcagaggtaagttatttattaatctccctctgctcttgtgttgttcgacgaaatgcctctatgaaaatttaaaaaggctgttcctttttttagtttgaacttggagagtaatgatctgttttttggtttctgaaggaagcccaagagtggagggagatgaagacgaagaagatattgatgatattgagtatgaatttaatatcgaacatgaacaagataagcataagcattctgctgaggctatgctttatgggaaaatgagctatggaagaggtcctgaggatgatgagaatgggagattcccacctgttatagctggtggtcatagtggagaatttccagttggaggaggttttggtaatggagaacatgggcttcataagcgtgtgcacccatatccatcatctgaagctggtgagtctcatggaaatgttaacttacatatagatttaagaatgtctcacagtgatgattagttagggtcatgcatatctccatatgtgcaaataacataagtatgaggccttccagcttaatagtagatagggacatagtttcataaacatggactttgggttctattacattctttctatgaaattcatcagcagaccctttttctaacaatactttcctttttgtttatgtgtgtaattttaatgtggtagggagtgagggaggatggcngcaaagaatggatgactggaagctccagcatggaaatcttgggccagaaccagatgatgatcctgcgatgggactgtaatgcctccagaagatttatttaagacatcagttttgtatgatccggattcatgcttacaaaattttggatttgactggaaatggctgtaggatcgacgaggcacggcagtcactctcgcggaaagttcccattgcctcaagcaagatcaatccatatcggatggtcatcgttgctaggcttgtgattctagcagtttttctgcggtataggctcttgaatccagtgcatgatgctctgggattatggctgacctctgtgatctgtgaaatctggttcgctgtctcttggattcttgatcagttccccaagtggttccctattgaacgtgagacctatctagatcggctttccctcaggtaaaatccacagattctcaagtagaagtcttaaaatctatgacgttggagtttggatgtaaatattttttgtttatacaggtacgagagagaaggtgaaccaaatatgcttgcccctgtagatgtctttgtcagtacggtggacccattgaaggagcctcccctcgtcacatccaacactgtgctgtcaatcttggccatggactacccagttgagaaaatctcctgctatgtctctgacgacggtgcttcaatgcttacattcgaatctctctcggaaactgctgagtttgcaagaaaatgggttcccttctgtaagaaattctccatagagccacgggcaccggagatgtacttcacgttgaaagttgattatctccaggacaaagtccacccaacatttgttaaggaacgtcgagccatgaaggtcagtgtatatcacctgatctagttataccaccacccatcttttcactataatctaaacttcataagtgaaattgacatatgacagagagaatatgaggagttcaaggtcaggatcaacgctcaagtggcgaaggcctcaaaggttcctctagaaggttggatcatgcaagatggaacaccgtggccagggaacaacaccaaggaccaccccggtatgatccaagtcttcctcggccacagcggaggatttgatgtcgaagggcatgagcttcctcggcttgtgtacgtgtcccgtgagaagcgtcctggttttcaacaccacaagaaagctggcgccatgaatgccctggtaattttcttgatctgccttggaccaaacaagaaactgatctccgtgtcttggacctaacctgatacttctgtcaggttcgagtggcaggcgtactcacaaatgctcctttcatgctgaacttggactgtgatcactatgtaaacaacagcaaggccgtgagggaagcaatgtgttttttgatggatcctcagattggaaagaaggtctgctatgttcagttccctcaaaggtttgatggcattgacacaaacgatcgttacgccaacagaaacacagtcttctttgatgtaagactcaattcatatttttccaacttctggtctaaatgaaaatgtaccctcttgcttacactcttgtttgctacagatcaatatgaaaggtctagatggaatccaaggtccagtttacgttggtactggttgtgttttcaaacgacaagctctgtatggttatgaaccaccaaagggtcctaaacgtccaaagatgataagctgtggttgttgtccttgctttgggcgccggagaaagaataagaaattttccaagaatgacatgaatggtgacgtagcagcccttggaggtaaattatcccaacaaccttataatatcagtccattcttgcagtagatttcgtttatgttggaatcttgcggatctgatagtgttttttggcaggagcagaaggtgataaggagcatttgatgtctgaaatgaactttgagaaaacatttgggcaatcatccatctttgtaacctcaactttgatggaagaaggtggtgttcctccgtcatcaagtcctgcagtgctccttaaagaggcaatccatgtcataagctgcggttatgaagacaagactgagtggggaactgaggtaataatactgaatcgtagaaatcaccttcttatttgtgatttagtagctggccattgtaaaaaacgtttgtgtatctcgaaattgcagctgggttggatctatggctctatcacagaggatattttgacgggattcaagatgcattgccgtggatggaggtctatttactgcatgcctaagaggcctgcattcaaaggttcagctcctattaatctatcagacaggttaaaccaggttttgcgttgggcacttggatcggttgagatatttttcagccggcacagtcctctctggtatggctacaaaggaggcaaactcaagtggcttgagcgttttgcttatgccaacacaacaatctaccccttcacatctataccacttcttgcctactgtatccttccagccatctgtctccttactgacaaattcatcatgccaccggttagtaaaattatcagagaaaagcacttagaagctgcatcaaatgtgctaactatctgttttcccaatttttctttcagataagcacatttgctagtctcttcttcatctcactgtttatgtcgatcattgtaacgggaatcttggaattgagatggagcggagttagcattgaggaatggtggagaaacgagcaattctgggtcattggaggaatctcagctcatctctttgcggttgtccaaggtctcctcaaaatcttagcaggcattgacacaaacttcaccgtcacatcaaaggcaacagatgatgatgactttggagaactttacgcattcaaatggacaacactgctgatccctccaacaactgtcttaatcataaacattgttggcgttgttgcaggcatctcagatgccattaacaatggatatcagtcttggggacctctatttggtaaactcttcttctccttttgggtcattgttcatctctacccattcctcaaaggtctgatgggtagacagaacagaacaccaaccattgtggtgatttggtcagtgttattggcatctatcttctctttgctttgggtaagaattgatccttttgtgctcaagaccaaaggacctgacacttccaagtgtggcatcaactgctga

SEQ ID NO: 178467 - DNA, 95 bp, Arabidopsis thaliana landsberg
atgcgaactggacatttccgatttggcgacctaaaccggacggaggccgacgccgattgcagggctagtccaatgcacgtgaactttttatcaag

SEQ ID NO: 178468 - DNA, 108 bp, Arabidopsis thaliana landsberg
gacccacgggcccagatcgcaggatcggtacagcatgtttcctagggcgcaactccttgcgaacaatgctgcgtgcagttcggttcgcgggcgctgaatgcactgcag

SEQ ID NO: 178469 - DNA, 54 bp, Arabidopsis thaliana landsberg
atggaggatgaactcgaggagaaggttcaaaaagtcgagaagataaacagaaag

SEQ ID NO: 178470 - DNA, 118 bp, Arabidopsis thaliana landsberg
gaatgtctatgatacacgtgtgggaactcacgtgtcaaagttgactgtgtatgccctttttggagatactaattggtggaatctggaatccaaaggcaaaacaaagctaaagttttga

SEQ ID NO: 178471 - DNA, 335 bp, Arabidopsis thaliana landsberg
ggcgtgttcggcttgttaacattcacattcgcattagtatcggtagtcggggtcttgtttagtgagcctcgtgttcatggtttctctttcaaacaggtaattctattctctcttgaattcttttaccaacatgagattatttactcattgttgtatcatttctgttaacccagaactttaccaatgcaatgaaagcgatgtggaggacaatcaagtgctcagatgtgtggcagccaagtctatatatgttcattacccgtgctcttggtttagacattaaagaagggctcccctattgggtcactgatgcaaaagatggtcctttgcttgctcag

SEQ ID NO: 178472 - DNA, 143 bp, Arabidopsis thaliana landsberg
actgtaaccttgctgacggagagtacgtcctcgtgctagagcaaggagctgctcaggaggtggtcccggatccagcaccagagcctacaccagaggacctgcctgccactgctttggaaggcaagccccggttttatgcataa

SEQ ID NO: 178473 - DNA, 1017 bp, Arabidopsis thaliana landsberg
gtaccagattggtcttcggtatactggtggtgctcggatgttgttaatgctctctttaaaatttggtatcatcccagtagttgtgccagttggtattcgggattttgacattgacggtgaactatgggttaaattaagattgattccgtcagcgccttgggttggagcagcatcatgggcgtttgtttcacttccaaagatcaaatttgagcttgcaccattccgattgtttaatctaatgggtattagttaatcataattgtctgttgctttctcattatctccaatgaaaattataatcatgtacattagtaatagctttaatcattttcttctttttgcatgaatgctatggatgacaacatcaggaattcctgttatatcaatgtaggtctcctcaatgtattcgtattagcttcttctctctgttgattgtttactctcatccgacgtattgataaatcagtttccttcctccatcctatgcttcatctctttcaggttcttgaccaaactactgacagaagatttgcctcgattatttgtacgcccaaagaaaattgtcttggatttccagaagggaaaagctgttgggcctgtttcagaagacttaaaatctggagaaatgcaggaagggaacaaggattttgtaggggaactgtctgttactcttgtaaatgcccagaaacttccatacatgttctctggtaagtcatatactcactcctcatctctcttcttcttcagttcattgttctctagcagtctgtgttgttgtattatttatatatacccttaagtatctttgaattcttagagcaataagaactgctatactaatgcttatatcacatatagcgaatgcttcatcacttaaaaattgcaagttccttccttcagcacatgttctttgataatttgtaacaggtagaacggatccatatgttattttacgaataggtgatcaagttatccgcagtaagaagaacagtcaaactactgtgattggggctcctg

SEQ ID NO: 178474 - DNA, 324 bp, Arabidopsis thaliana landsberg
atggtcaattccgaagaaattgcagatgggtttgagccaaaacctgtttctcgatcttattctggtgattcatctcatgatcgttctctttccgatctcaatcacgcagcggaggacttgagtgataagcttaagaatgtgggtttgaatgaagttacgaaagagcagagtgagaagatgatgagtgtctctgagagtaatggaggtttagattcgaatgcagtagtcaccatcaatcaggaagaagaagaagaagaagaagacagagatggttatggttatggtgatggttggagcgagaacgagagtgagaatgtgtatcca

SEQ ID NO: 178475 - DNA, 323 bp, Arabidopsis thaliana landsberg
atgttggcaccacatcaacaacaagaagcagacaacacggatgtggttgacccgtggacgctcctcgaagatgggacaagttcaggtctatcaagcagcaacgcttcaaatagcagcgacatggccaaccttcgagccacctgttggctgaaaggtgcagtcagggtcagacggactgatctaacttacgttggttcagtagacgacgacagctgaattactctactgtttcatagttttttgatgatcatgagagctctggaaaagaaaggagcaaaaagcttggatcttcgggtgccttagactgtactatcatttattga

SEQ ID NO: 178476 - DNA, 104 bp, Arabidopsis thaliana landsberg
aatcgaatgaatcatcatcatcggtaacgtttacagatttaatttccggtctaattggtacaattcttccgtcggacccgtcgttgaccgccgatgatttttaa

SEQ ID NO: 178477 - DNA, 905 bp, Arabidopsis thaliana landsberg
aagaaaaggttgagaaattacctactgcgctgaatactgaaactaaagacagctactcatcagctattccatttgtaaacaaaggtattgttcaatgcatttacagaagctctttcacgcatcttgtaagctgctcaaaagtattttatgcaccctgtctgttgtattctgaatcccgggaactacgcttggcataaaaatcctccttttcctggcttttctatgacagaggaaagcaaagaggattcatccgataataaagatacagaagaagaagaggagaaacaagtggaagaagttactgtaagtaatacgaatcgagggaagataccaacgattgaagaaaaaaagggggaacatgaagttattgcaagtgagccaaaatatcggaagacgccaactagagaagattttaaattagaaaaggtgaaacatgaggttgctgttggtgagggcgaagctacagagacaacacatattaaagagactaattcagatccaaagagtaatattcttgcaacagacgaagagaggactgatggtacttcaacagctcgcatcacgaatcaaggtagagaatctttgtttcacagatcccagttttatgatgcgtgaaagtatcttacgagtgttcattattctgaaactggacatactttgtatctcggtgaaactattagttgaaaatctctaccccgtattgctgttattttagtatgattccctcctatttgaaataacatgttgttttatatttttttcccctagcttgcaattatgcgaaagggaaatgggttgtggacaatcaccgtcctttgtattcaggatctcaatgcaaacagtggcttgctttaatgtgggcatgcaagttgatgcaacgtacagactttgcctttgaaagttaa

SEQ ID NO: 178478 - DNA, 784 bp, Arabidopsis thaliana landsberg
ggttacttcttgctgcctgatgaagcaaaatcacggcataacattcgcactgcaaatgtcagcatatcggcacggcatccctgctttggcaacaggtaatattcacgttattggccctcaatttggaaacagtgattttaattgctagagctgtatccttatgataagcttctaaaattggattactttttcaggtggcagcaacttcttataaacagagttgttggatatgatactattataatgaatagcttacagaactctgctggtcaaggtaggtagtaggtctttgtcttgttcataatgtccatgcaagttttgctatttgtgggtctcatcctttgaagcctgtaattcctcaactatgggtttgtcttttcttttgtattttgtgcggaaactgtttctttctgaaatgttaggctaccactaaaaagaggttgtctatttagcttattgtaactttaaactaagttatcctcggggaattctagtcgaatttcagtgtgcagcaatatattggttcatgcaagactttgcaaaatgtaaaataaccaatgtcgttgttggtagctgttacatgatatttccatctgtcgttgtcgctgctcatgtccctttgattgtttcttactttctatatgctattgtgaaagcgtcagtttgcactccatatgactgccaacttcctccattacaggttatctatacaactaccagacaagagaattttacaatctcagttactcccaagaacttcctgacggttctgcgcatttcggag

SEQ ID NO: 178479 - DNA, 1173 bp, Arabidopsis thaliana landsberg
atgaggaacgtccatggacatgttaagtttcagaatcattatggtcgtgtgtacgtgcaacttggtggaaactgtaatatgtggagatcagatgtaacatctgaagatggtgggcttttgtctgttgatgtttttgttgataccgtcgagcagaactggcatgcaaatttaaatgttgccaacttctttgtcccggtaaggtgtcaggtggaatagatgacttatgtttgtcatcagttgcatggttgacttatctcatttctgcatatctgcagatttttgaaagaattctagagattccaatcgagtggtctaagggaagagctactggtgaggtgcttctctaatgtccactatttgtcttcttagtgaattaaagtttattattttcaatgaccgttaacaagctacggtttatgttttcaacctttccattttttttctactgtaatttattatattcctatgtgctgttaaatatgcccaattagttagtcaatccagtctcagcacgttggctagagaacactttgttgttggaatctatatgtatgatagattgtgacagatctttgaagtagagtttgggagttctttcttctcttttacaagtagaggggtctgagcaaatttctgaaataaacatggcttgcccttggatttttttttctcactgtcgtctattgcattgcaggttcatctatgtatgtctagaggagaaagttttccaaacctacatggccaacttgacgtaacaggactaggcttccatataaatgatgcaccttcttcgttttctgtaagtcttgggtttaaatatctcctgaaacgctgccttatgtctttataatagtttcctttgcgttagaagatctataatatatgtctttctatagaggttttaaggctttccatgtagatgttcagatgtaatacttctcgtgtcgttatctttagctacaaacacaggatgtcagctcatgtttttttttgatgactcaggctaccttttccttcatattatctttgcaggatgtctcagccagcctttctttccgcggccagcgcattttcctgcataacgctaatggttggtttggaaaggttcctttggaggcttctggagatttcggtatacatccagatgagggggagtttcatctgatgtgtcag

SEQ ID NO: 178480 - DNA, 720 bp, Arabidopsis thaliana landsberg
tgattgcaacacttgcaatgcaagatttcatggaggcagcagcagttgtgttcctattcaccatatccgactggctcgaaacaagagctagctacaaggtttgtgtcctaatattattaggctaataatcaccatctataacaattgtgaaatctcttgctattttaataaatgattttgaagttgaaactagaatggtttattaacgtaatgattattgcaaatgtaatatctcaggcgacctcggtaatgcagtctctgatgagcttagctccacaaaaggctataatagcagagactggtgaagaagttgaagtagatgaggttaaggttgatacagttgtagcagttaaagctggtgaaaccataccaattgatggaattgtggtggatggaaactgtgaggtagacgagaaaaccttaacgggcgaagcatttcctgtgcctaaacagagagattctaccgtttgggctggaaccattaatctaaatggtatgtaatcctattttaagagcttcaagctttatacatttttgttgtatctttcattcttttggtctttcttggtgttttttttgcaggttacatatgtgtgaaaacaacttctttagcgggtgattgtgtggttgcgaaaatggctaagctagtagaagaagctcagagcagtaaaaccaaatctcagagactaatagacaaatgttctcagtactatactccag

SEQ ID NO: 178481 - DNA, 454 bp, Arabidopsis thaliana landsberg
atgaaaagtaacactcctacggaggattcaacaaaatggatgttagagagtgtagagatcgattcgatgggtgaaagctcctcaaaagaacccgaaattaacctcaacaagaacgaaggtggtctgaagaagaacgcgtcaagaaatctcggcgtgggatcgataatccgaacattgagcgtttcaaactggagaaagagcgggaatctaggttctccgagcacaaggaagagtggaaacctggggcctccgaccaatgccgtgcccaagaagacaggtccacaaagagtggagaggacaacatctagcgcggctaggggacttcagagcttacggttccttgatcggacagtcaccggacgagaacgagatgcatggagatcgattgagaaccggttcaatcagttctctgttgatggcaagttgcctaaagagaaattcggcgtctcgattg

SEQ ID NO: 178482 - DNA, 758 bp, Arabidopsis thaliana landsberg
atgttgaagacggtggagccggagattaaaccggaaacggaagaagtcatcgtagtcgaagatgacgtgtttccaaagtttagtgacgtcatggaatttccttcgtggttaaaccaaacagaggaagaattatttcatccttataatctcactgatcattactcatcatctcctcataatcctccattatcctggtaattattttgtatttatttttcattacttagaattaaagttattttgatcggtgttgtttttcctccggaatcaccggtggcgaaaattgcggcggctcttgcataaattcagtgattgagtttgagacagaacacagaaaaaaacagaatcgttcttttgtttggttttgataattaaatcggagttattggattaaaaatatgtgaaagcttgtggtatgagaaggatccacataggtttattgcatgatctgaagctgtccatttttttcttttagtatatggtccaatgataaataatatcgccgacatctataaaacactatccttaccccatttttctgaactgtcccaaaaccgtcttgacgtcacccgatataaattatatttttgttatgttatcattgcacttgcattattcaaatttggttgttacttgttaggtaaattatatatctcttttgtgtgttctaatgaaacatttttgatgtgcgatattctttttacagtatggagattggagaaattgaaggcatggatggatacgactggcttgcttga

SEQ ID NO: 178483 - DNA, 119 bp, Arabidopsis thaliana landsberg
gccgcatagcgctcatgacctacgagcccttggaaaacgcattaatggctcacgcgtcctcggcctatggtgtacttctggcctatcggactagtcctgagtgtgcagacctcccatag

SEQ ID NO: 178484 - DNA, 138 bp, Arabidopsis thaliana landsberg
atgatctcaaaacagaacattacaaattatcacgttagtgaagcctgcaccgttctgaaggtttgcatatttgctggtgccttgataataaagactggtgatgcgatctccaatggtcttgtcgatgacggtaatgag

SEQ ID NO: 178485 - DNA, 80 bp, Arabidopsis thaliana landsberg
caataaagatcaatgctttattcgaaaaacagttctatagaattcgaaaggccttagaagaagaactcacgacatcgtga

SEQ ID NO: 178486 - DNA, 96 bp, Arabidopsis thaliana landsberg
atgagtaactgggcttccgaggaggaggaggaagacggcggcgacagcataaaccggctaagagacacggcgggagaagctgcactgccgtattca

SEQ ID NO: 178487 - DNA, 227 bp, Arabidopsis thaliana landsberg
ccggttcaaaagaatcgacaagaagagattaaatttacctttaatgttgccaaatgcgataaaatatttgacgagttactaaaaaatggcaacattaaactaactcatactattcctcctcctgatgaattaaaaaggcgtgcttattgtaagtggcataattctttttctcatgccaccaatgattgtattgtttttcgtcgacagatacaaccggccataaatga

SEQ ID NO: 178488 - DNA, 883 bp, Arabidopsis thaliana landsberg
  unsure (1)..(883): unsure at all n locations
atgagtacggacgtctttgaattggacgaggccaagatctccaaggtaagagacggtgagatgagcagattccatgggaacaatgagctgaacaagttgcatcgtctctgaacgcatcagatccatcggcggacaacagccaccgccaccgccactttccgccatcgttcgttcgtcgatgagcttttttttttggaatcaaacgagaggagaggagagatatttagaaattatttgtctgacgataatgtcagagagaccaccacgaagccaagacggaggagagatagtagctgtaaattattttgccacatcgcgtattttttatccatatttaccctcttgggctccaaatttcaacgtacttcgtattgggctttaatggggtttcaaaactggttcggtcaatagtacatcagcgttagtatgagactctcattaattgngttgaaatagtgatatgcttttcaaaatggacccaatattggcccatgagtgacacccccaaataacttagttccaagattcaggtctctctttcttttttcttggacaaggcatataataatatcccggtcgaaatttcaagaaagcatataacaattggagatgtaaatcgtaaatgtgtatataacgtaaacacaaacgtattttcaaaaaaattagtcacaatttggaccacaaaagctctcatacgattttttctttttcttattttcctttgaagacagaaataaaagctaaagtgggattgtacgtattaatatacactgagatctacgggatttggacggacatgattgaaagaagcaataaacatgtcaggaaatggtccacgaacccattgttggatttaagacaaagacaaagacaaacgatataa

SEQ ID NO: 178489 - DNA, 197 bp, Arabidopsis thaliana landsberg
acgacgacgacgaccaccggagactttcgtggatgggccaatcaacctccgccgccggaaattccatcctcaatcgacgacgaagcaaatcgtttacactgaaattcccgattgaatcaatcgaatctgagatttcacaacctgactacacatcgagtttacctgacgagtgcttagatttggtgtccagttcttaa

SEQ ID NO: 178490 - DNA, 326 bp, Arabidopsis thaliana landsberg
catgctgttagttcagccgtcgatgtaatgcaagctatgtcatcttccatattctcactgacgtggaaggtaaaaaaatgatcttgtctctctcagatttttcgaagctctgttgagtctattgaaccttttgggtctgatatgttatctgtcttgagttattctatgcacaacccttatctttaatggttactttaaactcatttatgtctatttaggtggatgagatgaattctgtaatggtggaagccgtgaatgtaactgctaaagaaaaggttttgcttgaaagatgtcaaggttgcttatcaagagtagcagctatgcag

SEQ ID NO: 178491 - DNA, 1023 bp, Arabidopsis thaliana landsberg
  unsure (1)..(1023): unsure at all n locations
atggttggtggtgtatctgcaagtactgaaagcagtgtttttggattcaatgctgtttcatcagcttctgctactagctctcaatctcaggcctcaaatctttttggtgctggaaatgctcagacgggtaatactgggannnnnnnnnnnnnnnnnnnnnnnnnnnnnnnnnnnnnnnnnnnntcatctccatcagctccttcatttggtttgtctgggaactcttctcttgcatcaaacagttctccatttggattttctaagtcggaacctgctgtatttacttctgtgtcaactcctcaattgagttcgacaaactcctctgcaagctctagtagtacaatgagctctcccctatttgggacaagctggcaagctcccaactcttctccaaactctggtccagtcttcagttcctcgttcaccacatcttcaactcctaccaccttttcctttggaggatcttctgctgctactgtttcgagcactactactcccatttttggtgcatctaccaacaacaccccgtcaccttcacctatctttggtttcgggtcaacccctcctaccactccccagcagccggtatttggtaactcagggactccatcacagtctctgtttggtaactcaactcctgggtttgcatttggtgcacctaataatggaaatggtatcaacaataaccaacaagtgagcatggaagacagtatggcagaagacacagaccaagctaatagagcatctatggtagccccaatgtttggacaagcagcagtctcgatgcctcaaccaaactttgccttcggtggaggagcagcaacgcagcctccatcaatggcaaaccccttccagtttggaggccaaccaatggcaagcacgttacagaacgcatcacctttccaggcatcacagagtctagagttccaaggaggtgggagcttttcactaggcagcactggaggtggcgataagtcaggccgcagaatcttcaaagcaaagaaatccaccaggaagaaataa

SEQ ID NO: 178492 - DNA, 343 bp, Arabidopsis thaliana landsberg
atgcaagtacgatttaacatccaaccaccaagcccgtcgcaagcttcagctacggccgccactgaagcccgcagccaagaagagactgattgggcagatctcaaaaccagtgcttcgatgctcaatcaccaggttcatcttgcaaatcctgcagtccttgatcctgttactgctgcgttctcgaattcttctcactttctaggtcaccacacagcagcttcatcgcgcccagctagccagtcatcagacattatggatctgccaacaggacgtctgtcagaaccccctcgtgaccgaccaagactcctctcgccacttttggacgatggaattgacggactag

SEQ ID NO: 178493 - DNA, 533 bp, Arabidopsis thaliana landsberg
atgaagtgagcaaaccaacaacaagtgaaactacaaagattttgcttttgatgtaagcctagagcgcaaaaattcaaaaatatcatctatactagtaaatgaactgcttcgaaccccataacttttaagatcttgaaatagttttctccaaccactagcactgatgaaatgcaaatatatatataaaagtggtaattgtcactaaattgaagaataaaacaatacctgatagctcgagcttggttaaaagaccagcttaacttaattggtccatctggaataggtccagaaacaggtgcaacagaattactgtaatgaagaactccagtagtagtgagtatctttgatgtaaacctactagagacgacaacgtaataatcttttgcaggctgatcggctgttataaggaccgagtaagattgaccaacgtgaacatcaagcgaagagaaaagattctgaatagtgtatctcccttcgacctcaaccaatttcatcgtatggttttggattcggaagttgagggagttttgtaa

SEQ ID NO: 178494 - DNA, 1092 bp, Arabidopsis thaliana landsberg
atgacattttacattgtcatttatttctccgaaccactaagccttggttctgaccaaaagcggtctttcaatgtttactatgaggacaagcaagtgggttcagatctaattgtgccacctttcggggcagtgactcaagcttctttgagggatgtggtgaagactgagcttgcctatctgacttttgaagctacaccagactcgactttggacccactcatcaacgctctcgagctctatgtcattagtaatagtggtggaagtggaaacgggacgaattcaacaagcacgagcggtggtggcagccctagtcctggtggtggtagtggcagcccccctagcactggcggtggtagtggcagcccccctagcactggcggtggtggtggcagcccaagcaagggcggtggtggaggcaaatccggtaattattcttttcattatcttatatatatgttgtaaaatacggttaattttaataattttggtttgagataaataatgaatagaagaggctactaattctgacaataataagaaaacggtttgttttgtagaaaagatatcaatctatatattaatatataaatctatatatataagtaactctactctagtggttctttaaaatatatggatactgaattgaaagggaggaactcgtgtgggtatattaattaggatgcaagatttagcttctagttattgacgatcaactgccttttatcaacatgcaagatcataactaggcttaaaggttagaagaatgggaagtgtttaaccaaaaactttcattgtaaaacatagccgactaggaggcggtttagtccgactttgagccgtcatttttctagatagattggtcaaaaacatgctctccaaattactagctccgtaagaaaattgacttaaactgaaaactaaaattataagtcacttttcttcgtttgaacgatattttaggaggaagcaataatggagatggaggaaccaacaaagctagtgaagatgaaaaatctgcaggcatatcagttctcaatattttttttaattaagatgtttttttccatattaggacttttagaagaatag

SEQ ID NO: 178495 - DNA, 919 bp, Arabidopsis thaliana landsberg
atgaaaattcgaatacaatccgtttcaattcaggtgttttgaaccataaaaaacaatcaacggttatgatgttgatatagaaacttactcattgacttggaatttcaaagagtttagtcatgtatcatgtatcttagttttgaatttcattgcatttcaataagggtttttcccttgggtttagtaatctatcttggcttttagggtatagtttttaattccattgcatttcctatatgtttttagtattctatcttggctagtgtactagtgtagggtaccgaagtggtgtactgttctcgtgttctcactttgtctcacgaagctcgtcagctcgtccgtctcaagtagctcatcagctcgcccttctcaagaagctcatcagctctcccttcttaagaaactcgttagctcgctcctcttcgtcaagcttctcaactcgttctcttcaccaagtccctcagctcgtcttcaagctctccagctcgtcatcaagctctccagctcgtcttcaagctctccaactcgtcttgaagctcttccgctcgcctttaagctcttcaagctactcagctcgtcctcaagctcctcagctcgtcttcaagctcctcagcccgtcttcaagctcctcagctcgtcttcaagctcctcagctcgtcttcaagctcttcccatcaccgcgaccatctcctcgtctagctatcagctcatccctcgactgcgaaactcatctacctcctcgcctagcggcagttcgtccattgactgcatagtccacctatctcgtcgtccagctcgtctagaccttcagcaaacaactcggtttgtccaactcgtctctctaccacggttcatccagctcatcgcacatctgccggctcgtcacctacctgccgacctacctccaacgatggcctag

SEQ ID NO: 178496 - DNA, 163 bp, Arabidopsis thaliana landsberg
atgaaccctaatagtaaagtagcggctagtagttcctgtagcgaggatctagaggttgataaagatggtaaaattgaggtccctctggttgtccccatgggtattattgtagtccgcgttaggaaaatccgtgaaacctctgtcgtagttgtcgaccggccac

SEQ ID NO: 178497 - DNA, 137 bp, Arabidopsis thaliana landsberg
tacttataggaatcattgtcgaaaatgagtttgaaattaacaatttattcgatactgggggacaagaaatgcacgtcgtagccacgaacatcatctttaactttttgcccataaactttcacatcatcctcttataa

SEQ ID NO: 178498 - DNA, 100 bp, Arabidopsis thaliana landsberg
atgggtcattttgactacccagggaaattcggagctgtgttcgcctcaattcctgcacccatctttgcagctatgtattgtatcttctttgcttatgccg

SEQ ID NO: 178499 - DNA, 373 bp, Arabidopsis thaliana landsberg
gtagtaatgttctgcaagtatgttgcacaccgaatccgaacattacaacaagcaaaattggtcaaaagttccttcctaggcaagaaggagatctaaccataatgtacgatgtgaccagagcatatcagtcgagttactcagcgcaggtcactatcgagaatcataacctgcttggtcggcttgacaattgggatctaagttttatgtggatgaaagatgagtttctcttctcaaccaaaggagcttatccaagtgttgtcgattcgtcggattgcatcactggtcctcaagcaaaatactataaagatcttgacttctctaatgtgatgagctgtgcaagacggccacacatcatagacctacccctgactaa

SEQ ID NO: 178500 - DNA, 237 bp, Arabidopsis thaliana landsberg
acaataataccctttgtgacctatgtcgatgtcgcattgcatgagttgaaatttggccgcaaaaaaagcaaatttgattttccacgaaacgaacctttaagagccatccacttcaagatttttcaaggttattgttggagttgttttgtcgagaagcaaatgaaatatcttgaaagagatgagtcagcaactggtcaaattgcaaaccaacgttggttaacgagcaaaccggaatga

SEQ ID NO: 178501 - DNA, 309 bp, Arabidopsis thaliana landsberg
atggaggaatacaagaggacaaaggaagaagaagccctgagtcagaagaaagaagaagaggaactcttgaaactccacaaacaagaagctcttcaaatgcttaagaagaaggagaaaactgataatctgatcaaggtaataactctctctcactcacacttaactcaccaaggtctatttcaactcagagactcacaggatcataattatttgtctcttgcagaaggagaaggcgaccaagaagaagaagaacgaaaacgttgaccctaacaaaccaaagaagcctgcttcttcatactttctcttcag

SEQ ID NO: 178502 - DNA, 885 bp, Arabidopsis thaliana landsberg
atgtgcaacgaaattcttggaaattattctaaaaaagaagatcaattgatgactgcaacctttggcacccgtctgaaacgaaggctaaaccgagtgatggatgctataggttttgaatatcctgattatgagcggttggacaagggtgctgaaggccaataaagataaagagtagcaagtgctctgaataaggacgatgaagatcagtcaaagaagaaaaaacaggagtctgaggcgaaaacagttgcttcgaagaaaagaaaggcttcgactccgaagcaaaaatcaattgatgaaaaagaaaggacttctgcgacatcctctgctactaaaatagaggaaatcttaaaggtaatgactgaaactttgcctgtcaaactaagtccactggggctacatctgacgaagctttttcagaaggaaaaggagccacataaacgaaggtacctaggccaaagaggcaaagaattgttactgtgacagaagtcattgaagcaacaccaccaggagcttcagctccgaaggtgccggctattgaaagcatgacagctactgaagttgtaccttcggagcttccgcagaagaggccaaagccgaagatgccaaatccgaagatattaatttagaaagcatggctgctgatatagacaaaatgctactaaacatggccgcggaagaacgtgtcgcagccaccgaagagactacggttgcaaaacccgagaaggaagaaatgactgaagatacttcagaagatgaagcttttgactttcaaaacttagttggccaagagctgacaaaagctgaaaaagaagaactaaaagaatatgctatatcttgcgggtatcggccgagagcgcttctcttcggtggcattgatgacgaaag

SEQ ID NO: 178503 - DNA, 154 bp, Arabidopsis thaliana landsberg
atacgctaaagaacactcatactttttttgtaccatgcgatcgatggtcaaaagagacgatcctgctttggttgaattaggtcgaatgtatataaagatacgagaaccggagatctcaagcccacttgtcgaaattgatctgactgtcggttga

SEQ ID NO: 178504 - DNA, 314 bp, Arabidopsis thaliana landsberg
ctgaggactctgcttctaaactggattatgtaattgaaccgaactctgtgattgaaccagattttgtgaatgaaccgaatactccttctgaaccggtttctgtttctacaccggtcgaagtatcccctatttttgatactccatctactccgaacaagggctctgtctccggtgataatacagtgtttaccaacgtttgtcctattgtcacaactctggatcgtaatccccaacccttggttggtgttgaaagttctgttgttgaaatcacacctccacgtcaaggaaagcgacccattaaacaatctatttga

SEQ ID NO: 178505 - DNA, 137 bp, Arabidopsis thaliana landsberg
agaagcaattatcaaaacgacaacaccaaaactcaaaacgtgaagatgttttggtaatgggccaaaaagtcagtgaagcccaattaaaactcaacaaaatcacagtccagcaaatgacaacggtcagctgcaaatga

SEQ ID NO: 178506 - DNA, 57 bp, Arabidopsis thaliana landsberg
atggccaagatcctcagtcgttatgaattagaacaggctgatgatcttaaaaccttg

SEQ ID NO: 178507 - DNA, 1557 bp, Arabidopsis thaliana landsberg
atgacattggtggaggctatagttcaactttatacaacacagagaaatgctcgggttcttgtctgtgctccctccaatagtgcagctgatcacattttagagaaactcctttgtttagagggagttcgcatcaaggacaatgagattttcaggctgaatgcagctactcgttcatatgaagaaattaagcctgagattatccgcttttgcttctttgatgagttaattttcaagtgcccccctctcaaagctttgactcgttacaaactcgttgtgtcaacatatatgagtgcatcgcttcttaacgcggaaggtgtaaaccgtggtcacttcactcatattctcttagatgaggctggtcaagcttcagagcctgaaaacatgattgctgtatcaaatctctgcttgacagaaactgtggttgtgcttgctggagatccaaggcaattgggtccggttatatactcaagagatgctgagtcactcggcttggggaagtcatacttggaaagattgtttgagtgtgattattactgcgaaggggatgagaattatgtaacaaagcttggtcagaactacagatgccacccagagattcttgatctcccgtcaaagctcttctatgatggagaactggtagcttccaaagaagacacagactctgttcttgcctcgttaaacttccttccaaacaaagaatttccgatggttttctatgggatccaaggatgcgatgagagggaaggtaacaatccgtcctggttcaaccgtatagagatcagcaaagttatagagacaatcaagagattaacagcgaatgactgtgtgcaagaagaggatatcggagttataactccttacaggcagcaagtaatgaagatcaaggaggttcttgacaggttagatatgactgaagtcaaagttggtagtgtagagcaattccaaggtcaagagaaacaggtcatcatcatttcaactgtaagatctactatcaaacacaacgagttcgatagagcctattgtctgggcttcctaagcaatccaaggaggtttaatgtcgccataacccgtgcaatctctctgctagtgatcatcggaaacccacatatcatatgcaaggtaccacttacttagttgttctggacaaagacataatgcgttgacatcattcccaatctctcaactaataaaacgtattatatgaaacaggacatgaactggaacaagcttttgtggcgatgtgtggataacaatgcttaccaaggatgcggtttaccagagcaggaggagtttgtggaggaaccattcaagcaagaaggaagcagcaatgggcctcaataccctccagaagctgagtggaacaacagtaaagagctcaacaatggtggtgcgaatgagaatggtgaatggtctgatgggtggaacaacaatggcggcacaaaggaaaaaaatgaatggtctgatggatggaacagcaatggtggtgggacaaagaagaaagatgaatggtctgatgggtgggacaacaatggcggcacaaacgggatcaatcaataa

SEQ ID NO: 178508 - DNA, 1274 bp, Arabidopsis thaliana landsberg
atgaagcctatcgtgtgtgacaagggacatggaatggtccaggtacgttaaaaagaaacacactttttttttggttaatcgttaaggcttcgattgttttactagacactatttatgcgtttatattaaaataaaccacattttgacctatactctggagtatttctcgtaaaatgttttgttaagtgccaattaatcggtgaaacattttgaaggcgggatttgctggagacgatacaccaagggttgtgtttccatgtgtcgttggtcgtccaaaagatggattgaatccgaacgagtcttatgtgggagaagaaggtcatgccaacagagatattctcacacttaaagacccaatggagcatggtatcgttaacaattgggatgacatggagaagatttggcactatactttctacaacgagctacgtgtggatcctgaagaacaccctgtacttctcactgaagctccttataaccctaaagccaatcgtgagaaaatgactcagatcatgtttgagagctttgatgttcctgctatgtacgtctccatgcaatctgttctttatctctattccagtggtcgtaccacaggtaagcaaccaaaatccaaaatatcataattaagaaaaattaatattctgttagtttataagcttgaggtctcataatttatcagtggatcttgttctcagtagaacatcaaatgcaaacagagaatggtgttatattctaaaatgtgaatttttggtcactaatacacgcaaatgcatgaattgcgtatttgcgtgtgaaacaatccatgacttaattactatgttaagtttctacgtgtttaggtgttgtgttggatttaggagagagggtgagccacacagttccagtatacgaaggttacgcactcccacacggtatactgcgtctagacctaggaggccgtgacctaactgactacctcatagaaatcatgaccgaacgtggctacacatacaccacatccgccgagcgggaaatagtccgagacatcaaagagaagctttgttacgtagctctcgactacgagcaagaaatggagaagacaacaaagggttggacaatcgataaaacctacgtgcttcccgatggtcaagagatcacgatagaagccgagagattcatgtgccccgaggttcttttccagccgtctgtgatcggaaaggaatcttctggtattcacgaggcgactcgcaattccatcttgaagtgtcctgttgatacgaggagggatatgtatg

SEQ ID NO: 178509 - DNA, 1681 bp, Arabidopsis thaliana landsberg
cacgttttcaagatggaacaggaagagtacacaaaagaagcaatagattggagttacattgaatttgtggacaatcaagatgttctcgatctcatagaaaaggtcatttctgaaccgagaaaggacaatgttaacaaaataactccacataccggttggattttgttatctcactttatttccccttttattttccatctgcagaagcctggtggaattgttgctctcctcgatgaagcttggtaaagttaaagatcaaactagttccatatgaagcatgaggtgattatgttcttgatttgaactaacgaggtgtaatttttcagcatgtttccaaagtcaacccacgaaacatttgcaaataagctgtatcagacttttaagacacacaagcggttcatcaaaccaaaactctctcgaacagatttcgctgttgcccattatgctggagaagtaggttctctctcctttgaagaaaaatggaccttgtaaaacacagaagtttctcatgtcttctaaatctccaggttctatatcagtctgaactatttctggataaaaacaaggattatgtgatccctgaacaccaagatttgttgggggcttccaaatgtccctttgttgtgggtcttttccctccactcccagaagaaacatctaaatcgtcaaagttttcatccattggttctcgctttaaggtagggaagcttgttcatatgttcagcaccaattgtgtaaaggaagaatgtctaactactcgggaagactaaaattttcttttttgattaaaaaactaatattttcttaattacgagtaactgtaactagtaactattggcctggttgatgcagctgcaactccagcaactgatggaaacattaaattgcaccgagcctcattacatcagatgtgtgaagcctaacaatcttctaaagcctgccatatttgagaatgtgaacatcatgcagcaactgcgatgtggtgtaagtttacaaataatttcaactattgggttgttctagacataatgggttctaaaaaaaaatatgttaccaatttcctgcgattaatggctggaacgtatgtactaacgttaaacccttatgttatctttctagggtgttttagaggcgatcagaattagttgtgcagggtatccaactcgtaaacctttctttgagttcataaaccgttttggacttctatcttcctgctgctttaaaagggaagtaagtaaaagatcattctccctagctgattttatactgttttgtgagagtctaaatcagtagttacagattttctgacttctcctgaacagcttcgatgagaaagtcgcatgtcaaaagatcttggataacatgggactcaaaggataccaggtaacggtttctcaagtgtcaagcgaaccaattgtgtagtattagtgctgcaatgggatatggttcaatcatagcagagttgtgattaacccaaatgcaaaacatattttggtaatgcagattggtaaaacaaaggtcttcttgagggctggtcagatggctgaactcgacgctagaagggctgaggttctaagtagtgctgcaaaaaaaattcagcgacgtatacgtactcatcaagctcagaaacggttcattgttctgagaaaagccaccatttctcttcaagctatatgtagag

SEQ ID NO: 178510 - DNA, 174 bp, Arabidopsis thaliana landsberg
  unsure (1)..(174): unsure at all n locations
atgtccgagcagggccacgaagctactgctgcggcgaacggnnnnnnnnnnnnnnnnngggcagtctcccgtgaggaggggaaacttggactcaatgacgcaaagccacacgttggcgtccaacggatcctctgccttggtgaacaagggtggttgcgtgctcaggaactcctg

SEQ ID NO: 178511 - DNA, 170 bp, Arabidopsis thaliana landsberg
tgtcgatgagaagcgtctcaactttgaggactatctgaacctggccaaccccatgaacttcccgatgggtttcgtcaatcgatcgggttacaacgaggagaaagagtacgacgaggagtttcagtacaacatctacaactgctacaagtcggatggcattgtttttgctt

SEQ ID NO: 178512 - DNA, 74 bp, Arabidopsis thaliana landsberg
atggatctatctagcaattataaacctaatattacgtcaatagaaccttttcacacagatatggaagaagacag

SEQ ID NO: 178513 - DNA, 201 bp, Arabidopsis thaliana landsberg
atggatcggttgtattttgtcattcccgcgttagcagcaatcgattctgtggtttatttgatattagcaaagtggtaccaacccataagtcatgatgaagatagtatcaagggcggttctggtggtagtctaaagaagaccgtttgtgagttggaacaagtttgattttttttctttttctctttagattataagttttag

SEQ ID NO: 178514 - DNA, 117 bp, Arabidopsis thaliana landsberg
gtgcaattccatgcatccttcaaacgatcggtatattttttataccggaatctccaagatggctggttggcatttccttttaatcatttcgactatgaattcgacctcaatccgtaa

SEQ ID NO: 178515 - DNA, 181 bp, Arabidopsis thaliana landsberg
atgacttactatcttgcaatgtatagtctagccatcgaggtggcttggaacaccaccaatgagaggccattgcgcatctgcttcagattgaatatcggaaaacacatgaccttgtactatcaagaacacagcccgataaggtttggagagttcatgagaacaaccatttccatacacacga

SEQ ID NO: 178516 - DNA, 1255 bp, Arabidopsis thaliana landsberg
atgcaagaaaacaagtcaaggaagcgacagagagactcggaggcgagtacactcctcatcttcaccagcgatgtactcatttggttgttcagatatcctttttctcatttctgttgatctttattcaattttggttttgactacagaaacaaacatgatcacgtccttctaaagcatttctttagataatttgtttcgtatcattttgttacattttatggtgccttttgggatgcttaacggaaacttacagctcatgtggacgtaagtttgagcacactttgaaacatggggcaagaaatggtctctttgttgttacgattggctggtttgtagatagcgtcaagaggaactgtaagttttcaatgctgtttaaaatatttgctcaaggatttataggttagccagagttagtatcatagatttgaccattcagttttgctggttactgcctcagtttcatagcggtacaaatttgtgaaagctttgctagcaaattcatggacccttgactttgtgttgactctttcaactttattgttagaggaataaaaccttctagtcagcagtcctacactggcttctcctagtttgctaaagatattctgtgatctattatcagcatgatattgaaatagtctaaatagtttcagttcgtttgtagtgtatcaaactcaatcagaacaaatttactttggaaaagagagctcatggatattctaactaagttaaaaggttatgtgtgtctgaagttgatatttttttctgtaattttgtagtcaggatgagcgaatcactttacaatgttaaacaacttagacaaaattgcgaaaagggggatgagctgagccgggtttttgacctcgaaactatttgtcgtcctcgacaaattcaagctgtacattttggcacatcaacgaagaaccaccaagtatcttcttctggaacagagtctggcactagtgtagacatgagtcttgctgaccattgcatgtatgttgattcagacatttcagatgaactccgccttaaggtaatttatcacattgggtgcttttaactttttggccaggctgtacagtcttttctatgagcttctttagatagaatgtggtctgtttaggtgttaaaggttgctggagagcaaggagcaaaggtcatcgattcatggtttattggttgcaatgcaagttttgtcgtgtgtgaaggtgcttctattcagagataccttggccatgccaaaaccattgtctca

SEQ ID NO: 178517 - DNA, 2581 bp, Arabidopsis thaliana landsberg
  unsure (1)..(2581): unsure at all n locations
gtttagagaatacgcgatacaaatactacctaatttacactattggagtctcttttacgtttaaaataactgtcgtttgggacaaaatcacattatattatgtgcttgagaggattacgggttttgacccaaaacgtaagtggtaaccttcaggattacggtttttgttaggtcttcgcagcgaacgcgttttgcttaacggttactaattactcgattgaccgttgatccatcagatacaccaaccggacggtcctgaatcgtccacgttttgcggttaatgttaggcctactagattaaagtgaggcccaatacggcccattaattcaaaattcaaattttaaaccccaactttctttctactacgctccgtcttctccatctctgcgaaattcttaccgttgtttctctccttcgtcaatggcgaattcaaacacatacctaaccacaccgactaaaaccccatcttcaaggagaaaccaacagagtcaatctaagatgcaatctcactccaaggatccgataaacgcagaatctaggtcacgnnnnnnnnnnnnnnnnnnnnntcaagcagcagccgtggctttcggagagaaacttccgataccggagattgtagccattggtggtcaatcagacggcaaaagctctcttctcgaagcacttttagggttccgattcaatgtccgtgaagttgtaatgggcactcgacgccctttgattctccagatggttcatgatttatcagcgttagaaccacggtgtcgattccaggtaaatcaaacctagacgattttgtaattcgttacttctgcttttgatttagatttctaggattttttttgttgaattggcgattttgattactgatttggtaagtttgattggtaggatgaagattctgaagaatatggaagtccaattgtttcggctacagcagtagcagatgtaattaggtctagaacagaggcacttttgaagaagacgaaaactgcagtctcgccaaagccgattgtgatgagagctgagtatgctcattgtccaaatctgactatcattgatactcctggttttgttctcaaggtagtagctttttctcgttttttgtcaatctgtgtcaaagtttgtcaattgcatagtttctaattcttgtgtgtgagcaggctaagaaaggagagcctgaaactacccctgatgaaattctgtcaatggttaagtcactggctagtcctccacatcgtattctcttgttccttcagcagagtagtgtggagtggtgctcatccttgtggttagatgctgttcgtgagattgattcaagctttcggaggactattgttgttgtgtccaagtttgataatcgccttaaggtacaaaaatctttaactacaatcaattagttttcatttagttcacatatactgcagtttgtcctctatccggggtactcttaaatgctgtgacaatcaagagtggagatgaactactttgtttggatttagtcttaatttgtttatccaacacttgcaggaatttagtgatcgcggtgaagttgatcgttatctgagtgctagcggataccttggggagaacactcgtccttatttcgtggcattaccaaaagacaggagcactatctcaaatgatgaatttcgccgacaaatatctcaggtggacactgaagttataaggcatttacgggagggagttaagggaggatttgatgaagaaaaattccggtcctgtattggttttgggtctttaagagatttcttagagtctgagctgcagaagagatacaaagaagctgcaccagcaacactagctttgcttgaagaacgctgctctgaggtaaccgatgatatgctgagaatggatatgaaaatccaagctacttctgatgttgctcatctcagaaaagcggcaatgctatacactgcttctattagcaatcatgtggtgagttgtttgtaacagacagttattgttgcaccatttttaagactaacaatgatacatactttgaaatgtttacattaacctgctgtatgttttgctcttgtttcaaaagggagctttgattgatggagctgcaaatccagcacctgaacaatgggggaaaacaactgaagaagaacgtggcgaaagtggcattggaagctggccaggtgtaagtgtggatatcaagccacccaatgccgttcttaaactctatggaggagctgcttttgaaagagtgattcatgaattccgttgtgcagcctactcaatcgagtgccctccagtgtcaagagagaaggtacacttcaccttttctcagtaaatagcattttctactttttcatagaaatgaaaaagctaaacaagtagcctgaattgagcaggtagcaaacattctgcttgctcatgctgggcgtggaggtggtagaggagtaacagaagcttcagcagaaattgctcgaaccgctgcacggtcatggcttgctcctcttcttgacacagcctgcgacagacttgcctttgtattaggaagtctctttgaaattgctctagaaagaaacctgaaccaaaactcagaat

SEQ ID NO: 178518 - DNA, 315 bp, Arabidopsis thaliana landsberg
cgggagtactgcctcaaggcggaccgtccgaaagcgggtggcgggccggtgcacaacgcgcggaaccggtgggcctggcagcggcgggaagcggtgggcgagccggccggtgacgccgacgcggccgagacggagcacggggaaccgggcggcgactggccggtcagcacggcgaagcagcgggccggggagctgctggagcgggcgcgccgtcagcatgccgccgccctcgccgcgttcacggccgagcgcgacctctacgcccgggtcgccgacgagttccgggtgatggccgaggggcgtcacgggacctga

SEQ ID NO: 178519 - DNA, 230 bp, Arabidopsis thaliana landsberg
atggccgagtgggctgccgcaagggccctggccggatcgctgccgatcgtcgctccggggaaatcgccaaatgccacgccatgcaccagcaatgcttcggtcgaggcggtcgaggcatggacctcgcctatttcgtcggaaaatcccgctccaatgttacgcaggtcggatatgccataaagcgatactgccgcttgtaccgacgacgacatgtcaagcccatcagcccg

SEQ ID NO: 178520 - DNA, 211 bp, Arabidopsis thaliana landsberg
atggaaataatctcacttgtaacggaactgaatcgcgtcaacgtgaaaccaaaaaatcttcaactaaaccggaacagtgtacgtaactaaacctgttaaactaaaccgtacatttcaatagttactaagagagaagcgcaagggcagaatcatcattttgcaggcgaaaagacaaatgctgaaaaccacatttgactttgacaatccataa

SEQ ID NO: 178521 - DNA, 253 bp, Arabidopsis thaliana landsberg
atggacaaattgaagatagcagaatggggagagaagctgaagactggtggagctcagatgagcagaatggtgagtgagaaagtgaaagatatgcttcaagctccaaccttggaatccaaaatggtggatgaagctactttagagactttagaggagcctaattggggaatgaacatgaggatttgtgctcagattaacaacgatgagtttaacggcactgagattgttagagctatcaagaggaagatctcag

SEQ ID NO: 178522 - DNA, 930 bp, Arabidopsis thaliana landsberg
atgtcacaagattatcatcatcaccaaggaatcttttccttctctaatggattccaccgatcatcatcaaccactcatcaagaggcagtagatgaatccgccgtcgtctccggtgctcaaattccggtttatgaaaccgccggaatgttgtctgaaatgtttgcttaccctggcggaggtggcggcggttccggtggagagattcttgatcagtctactaaacagttgctagagcaacaaaaccgtcacaacaacaacaataactcaactcttcatatgttattaccaaatcatcatcaaggttttgctttcaccgacgaaaacactatgcagccgcagcaacaacaacactttacatggccatcttcctcctccgatcatcatcaaaaccgagatatgatcggaaccgtccacgtggaaggaggaaagggtttgtctttatctctctcatcttcattagccgcagctaaagccgaggaatatagaagcatttattgtgcagccgttgatggaacttcttcttcttctaacgcatccgctcatcatcatcaattcaatcagttcaagaatcttcttcttgagaattcttcttctcaacatcatcaccatcaagttgttggacattttggttcatcatcatcatctcccatggcggcttcttcatccattggagggatctacacgttgaggaattcgaaatatacgaaaccggctcaagagttgttggaagagttttgtagtgttggaagaggacatttcaagaagaacaaacttagtaggaacaactcaaaccctaatactaccggtggaggaggaggcggagggtcctcgtcatcggccggaacagctaatgatagtcctcctttgtctccggctgatcggattgaacatcaaagaagaaaagtcaagctactatctatgcttgaagag

SEQ ID NO: 178523 - DNA, 67 bp, Arabidopsis thaliana landsberg
attgttgaagaagaagaagaaggaagacagagagagcgtgaaaagtgcaatgatggagaatgtgtga

SEQ ID NO: 178524 - DNA, 1691 bp, Arabidopsis thaliana landsberg
atgatttctccacctttcgccgaaaaatttccagcaagcgccatcattgatctctccttcaacaatctaacaggaccaatccctaacacaccaccattgcttaaccaaaagaccgagtctttttctggtaacataggcttatgtggtcagccattaaagaccctttgttcaaccccttctactctatcagacccaccaaatatctctgaaactacttcacctgcaatagcagtcatgcccacaactccaacaccaacaaactcttcaacagaatcaacaaatcaaacagccaaaagcaaactaaaaccaagcacaatcatcggcattacacttgcagatatagctggtctagctatcatagccatgttcatcctctacatataccagctcaagaaacgtagaagctaccaagaatacagcactttcaacgtcttacaaaaatgtctggagaaaaacgatacattatccgtcaagaaatcgaaacacaacgtcgccgacgccttggagttcacgaaatctccgcctgcaaaaatgggatgcggttcatggataagcagaaggtacgaagaaacaacgtcggtgtcatccgagagtgacatagagaaccaaaaacccgttgaggcatttgatcgaacaggtggtgggcgagtaaaacacaatactgaaactcaactagtgacagtggatggagaaactcagctggagctagatactctactaaaggcatcagcttacgtacttggaaccaacagaagcgacggaattgtgtataaagcggtgttagagaacggtgcggcttttgcagtgcggcggattggggcggagagttgtccggcggcgaaatttaaggaattcgaaaaggaagttcagggtatcgctaaacttcgtcacccaaatctcgttagggttcgtggcttcgtttgggggaaagaagagaagcttctcatctccgactatgtcccaaatggaaacctacctctatcctccatctccggtaagtttctacaaacggcgtacgttacttaatatttgctagaatacgcactactagtcggcgcatgttagcccattgctcttaacaaacaaactattttacgaatcttgatattttgacattaattttgtttgatatgaaaacagcaaaatcaagctcgttttctcataaacctctctcctttgaggcacggctcaagttagcaagaggaatagctagaggaattgcttatatccacgacaagaagcatgtgcacggcaacatcaaggccaataacattctcttggactccgagtttgagcctgtaattacagatatgggccttgatcgtattatgacttcggcccatttactcacggacgggccattgtcgagcttacaagaccaaccaccagagtggtcgacaagccagaagccaaaccccaaatgggatgtatattcatttggtgttatactcttggaacttctcacaggcatagttttttcggtcgatcgagatttggttcgcgattctgagactgatgagaaaagttggttcttgaagttggtcgatggggaaattagggttgaggtggctcaccgcgaggatgaggcggtcgcatgcttgaagttaggctatgaatgtgtctcctccttgcctcaaaagcgaccgtctatgaaggaagtggtgcaagtgctagagaaaatgtttgtttag

SEQ ID NO: 178525 - DNA, 1122 bp, Arabidopsis thaliana landsberg
agattccaaaaacaacagagtccacgttgttgccttatgcagacgaggctacgagaagcaagcttgtaagacatgtctcgaacatgtgattgaagacacaaaatccaagtgtcctcgccaaaaagagtctttctcgtgggtcactgatgaattcgacgacgtttcttgctctctacgttacaccaaccactcaactcttggcaaactcgagctcttaccaaatactattaaccctaaccctaacagtatagattccaaattcaacaacatgaccatgttcagccaagaatggattgcaatggttaaccggacactcgaggctgcttccaccgctgagaactcctcagtccttaagtactatagcgccacaagaacagagttcacacaaatttcagatgtttacgcgttgatgcaatgcgtgcctgatctatcgccaggcaactgcaagagatgtcttagagagtgtgtgaatgactttcaaaagcagttttggggaagacaaggaggtggggttagtcggcctagctgttatttccggtgggatctttatccgtactacagagcttttgacaatgttgtaagagttcctgctcctcctcctcaagcttcttctactattatcgattacgggagagacgagaaaagttttcaaggaagcaacatagcaattattgtggtcccttcagtcatcaatctcatcatatttgtggttctaatattctcatggaagagaaagcagtcacacaccataatcaatggtaaagtcttttaaaataagcaacatatatattccttatcttactaagagtttggttttaaacttgacatgttttatttgatgacgtgcagatgtttttgattcaaataatggtcaatctatgttacgttttgatcttcgaatgattgtaactgcaaccaataacttctctcttgaaaataagcttggccaaggtggatttggaactgtctacaaggtaaaaaaactagtaagaagagtcctaacaaaatcttaagatgggtcagtgatctttaactatagcatgagaattcgttttcagggaatattaccgagcgggcaagagatagcggtaaagagattaacaaaaggttcaggacaaggag

SEQ ID NO: 178526 - DNA, 291 bp, Arabidopsis thaliana landsberg
atgagcctaggaaaagtggaagaggcttggaatgcattccgcaatatggaagagagaggaacttcaccagattttaaaacatatagtaagttcataaactgcttgtgccaagcaggcaaatcagaagatgccctgaagcttctgtctgagatgctggataagggtattgctccaagcactatcaatttccgaacagttttctacgggttaaacagagaaggcaagcatgatcttgcccggattgctctacagaagaaatcggctttagtagcacagcgaacggtatcttag

SEQ ID NO: 178527 - DNA, 2512 bp, Arabidopsis thaliana landsberg
atgaaaaggcgacagtgtgagaaagttgtgattcgtatccacaatattggcacaccattgatttctgggtcttctggtttgcctttagagttatttcacattcaatcagatcggccgtacacgattggtcgaagtagtagtgatgggttttgcgattttgttattgatcatagctctatcagtagaaaacactgtcagattctatttgatagccaaagtcacaaactttatatttttgacggcgtgattcacttgccttccggtagttttagtcaagtttatgatgagtttaggagaagattagttggtgttgaggatttggggaatttgaagtttagggcttctttgaatggggtttatgtaaatcgtgttagagttaggaaatctaaagttcaggaggtttctataggtgatgaggtattgtttttttgcgggaaggaagggttgtgttgtaaagatggtcgagttgggtttgtggttcaggagattgtgtttgaaggaagagatgcttcgattgtatcggtctcttcaggacattctcgaggaaccttttcaagtgggaagagaagcaaaagggtttttgctccgatggaaaacgagattaattctccagtttctgggttttatccacctaaagctgttggtgttgttgagagagtgaattctcttgtaagctattgtagacatatattgaagagtgatgatcctctatcttgccttaggctatctattatatcacattctggaaaggaatgtctatcttgttgtacatccaaaatgtttaggtcaaaagtaggtatagtggccgatgatagaggagttaagagtgctgagataaatcatgatatgggtcatggtttgtctggtctaaggttgagtattgaacggccaaactcaaatttacatgtagatagaagactaggtgtctctgacttgattagcgaaatagaaaacgagtttgctgcttgtacttttatcagtgataagactaggactatggttccttttgatggggaaaaagttaatactcccgatattacttgcatcaataaagagaaaagttatcaaagttctctccaagcacctgggaagaacttttatctaaatcgtctacagtatattgaacaaagctcaactggttgtcaacgggaggtttccttgccagaacttcttcaccctgtggaaagcattcacaaatctttcttgcaacatttacaagtgatattttatggtatgttgaaaagagtttgtttttgtattttccctagtagtctaaacacaacaatagataccatatctacaattgttccccaggcttgttcaagagtctgacgaatttgtattagcaggtttcttacctgttgtgatacacctagacacttgcctgtgactatcgcatgtcacaatgctgagagatgttggagttcaaaccctgatgcaagaactgctgtgcctttgccaaattacccaaatgtgactatggtgtacgtaatactgatcatatatctgttaaaaggaatggtgaatggttttatacttgtttgttattaaaacttcattacttcctgtttgtcttaggtatccaccatttcctgaggaaattgcatttgggaaggaccgcacgaaccgtggcattgcttgtcatcaccccaagctgtttattttgcaaagaaaagatagcattcgtgtaattatcacatctgcaaacttagtagcaagacaggttagagtgtaggccttagtatataggaatatatatatatatatatatatatatactatgaatcacagatgagtcttggctattatgagggttcagctattttcagagagttttatcatatttaattttctaatggagatttatcattccagtggaatgacgtgaccaacacagtttggtggcaagactttccacgaagagcagaccctgatcttttatcccttttcggccattgccaaagagaaaccaatcatggtttaaagccagacttttgtgctcagctggctggatttgccgcatcacttttgactgatgttccaagtcaggcccattggattcttgagttcacgaagtacaactttgaacactcagcaggtcaccttgttgcttcagtgcctggaatccattcttataagccgtcttatctcacagagtctggttgctcaaataccgtgagtagcttcaccttccatcttctatgcatgcattctctgattagtatcaatatcttgaactcatcttttattggttcacttagttgttttttcttaaagaatattgaaagtttaattgtgtcctgtatattagaaattttggtctatgcatccctttcttgactaattgtatgattattgtttcacagattttcagtgaagaatttctgggatctgttgaagcatcttgtgtaggtctcagttaccttttccgctctgccaatgattccacaggagcacaactgaaacgactggcttcatatatccgcagaacccgggaaaattctctcggaat

SEQ ID NO: 178528 - DNA, 335 bp, Arabidopsis thaliana landsberg
agtatcggcttcccgaagctcgacgcaggcatcagccgctaccgacgacaacacattgtcggcagcttgttctattccaattttaaggtaaatatcttgtgtctaacctttactatttttaaaaacataaatattttctaacgaaggttatttgtccacagagtatgcttttgagcaaggccttaaaaatgcaacaggacttagaggataaaaggcacgaaattataattgagaacttagaaaacaagataaaagagcaatcagctgacatcgaaaagaaagacttcgagcttcgaacaaccgaaggcttattagcggatgccgaacccaaaata

SEQ ID NO: 178529 - DNA, 62 bp, Arabidopsis thaliana landsberg
atgatgatgaagagaggatccaagagaagcgaaaaaaggctgatggttttgatcttcattga

SEQ ID NO: 178530 - DNA, 1783 bp, Arabidopsis thaliana landsberg
atggctcgaacaaagaacgcatgtgtgccgttggcggcggcgtccgcggcggaggtggtggtttcacagacaatcaatgacgaagtagtagtagcgtcggctgctgaagtggattctgaagcaacaaattcaatctctaacgacgatagagcggtatgaactttaaactttacacaattagaaaagtataactatgtatgaatttggtatatctttgttgatattataacttagaaattttaaaaagtatatatatgtataaattagtatatctatgcataaattgagtatatctattttgaatctaacttagaaattttgaaactaaaaactaggtatatctatgttcgaatataacttacatattttagagactaaacaatatatctatgtataaattaggtatatctatgctgatttctacctttaaattatatgaaactaaaaagtatatctatatttaaactaggtatatctatgttcgaatataacttagatattttagagactaaaaggtatatctatttttaaattaggtatatctatgctgatttttaccattaaattatacgaaaataaaatgtatatctatattgaaactaggtatatctaaacttgaatttaacttataaattttcaaaactaaaatgtatatctatgtataaactaggtatatctatattcgaatttaacttataaattttcaaaactaaaaggtatatctatgtataatctaggtatatctatcttgatttctaatttatctatgttgctttctaaggtatatctatgttgattgcaggattctgatgaggaaaccaaagctcttcaaccgttgttcaatgaagatgtagcacaccggagctttgtggctaataaagctctgtctactgtggtaaaagctccaagaaaagccgcagtggaaaagaaaggcaagggaaaggctgctgcagctctgactagtccaagtgatgaaggtttgactagtccaagtgatgaaggtttgactgaggttgtaaacgaaatgaagaatttgatggagaatggatttaagtccatgaacaagaggatgaaagatttcagtaagaagtatgaagagcaagataaaagactgaaactgatggaagctgcaatcaaatcaattcaatcaggcattagaactgaagacgcttgtggttcaaaggagattgatgataaagaaaacgagctggaggaagggagtgatgcagagactgagatagacaaagaggtggctcaaggtgataaggagagagaggttggagaaacagagactgagatagacaaagaggtggttcaatgtgacagtgataaggaggtggctgaaagtgagattggggtggctgaaagtgagaaggacaaagaggtgcctcaagatgatgagatggatggaggtaaggtggctgagagtgatggagagatggatggagagaaggacaaagaggtgcctgaagatgatgagatggatggagagaaggagaaagaggtggctgagccaagtgagattgggatgcctgaaagtgagaaggacatagaggtggctgatagtgagaaggagaaagaggtgcctcaagatgctaaggtggctgagccaagtaagaagcgaggaaaggcacatgaggatggagatgatcctagtgaagaggtagttaaaaagcctaaggtggtcaagaagctggcagagtcgaggacggatgctaagccggtgtatcggagtcctatacagacgaggtataggaggaaaaagacaaaaaagaatgtttaa

SEQ ID NO: 178531 - DNA, 1058 bp, Arabidopsis thaliana landsberg
atgtataagaacgaagaaattcaaaatcttattcttggccttggtcttggagttaaggtaatatatcctttttcatatcctgctgtttgttggtatgttcggaaaactcagtttgacataaaacttatttcagggagaagattttaacaaggagaatctgcgttaccataaaattatcatcttaacagatgcagatgttgatggtgcacatatccggacacttctgttgacctttttcttcagatatcaggtactagtttagtttgataaaacattagttgaagtagccttgattgctgattgagttatgtgaaatttaatgaaatttactttctacagagagccttgtttgacgcgggttgcatatacgttggtgttccacctcttttcaaggtaagctcttagcatctataatcttatgcttcagattgaacggaatttttttctaaagctagtctctctgtgaaaacgatcaggttgagagggggaaacaggcgcactactgctacgatgatgcagctcttaaaaaaatcactgcttcgttccctggaaacgcatcctacaacattcagaggttcaaaggtaaaacatcctacttctcacatcatgaatgtgttcttttggaaaggataaataactatgaaaagtaatgtatagtagttgttatgtgttagctattaagatactcttgagtgtgtgcataacgaaatatagattagtctcaactattggatatgtaatgtttcttgcttttgcatctgcaggtttgggtgagatgatgcctgcgcagctatgggaaacaacgatgaatccagatacaaggatattgaagcaactagttgttgacgacgcagcagaaacgaatatggtcttctcatctctgatgggtgctcgggtaagccaatgaattgccagactcggactcatgataatagtcaataaactggcataactcatcgtgacaatgttatgttctgtgtatgtttcaggtcgatgtcaggaaggaactcatcaaaagtgctgcgactaggatgaatctggagaatctcgacatataa

SEQ ID NO: 178532 - DNA, 552 bp, Arabidopsis thaliana landsberg
atggattccaaagtcaagacaatgataaagctcatcgaagctgatgcagattcgtttgcaagaagggcagacatgtacttcaagaaacgtccagagctaatgaaactggtggaagagctatacagagcttatcgtgctttagctgagaggtatgatcatacaactgtggagcttcggcgtgcgcataaagtcatggttgaggcgtttcctaaccagatgtcttttgacatgattgaggattctgcatcatcttcttctgagcctcgtacagaagcagatacagaagctctacaaaaggatggtactaaaagtaaaaggagttttagtcagacgaataaattagatggaacttctgattctcacgaagcagattctgaagttgaaaccttaaagagaacattgcttgagcttcagactgaaaaggaagctttgaatctccaatatcagttaatcttgagcaaagtatccagatttgaaaaggaactcaacgatgctcaaaaggatgttaaaggatttgatgaacgtgcttgcaaagctgacattgagattaaa

SEQ ID NO: 178533 - DNA, 121 bp, Arabidopsis thaliana landsberg
atgcacgcgctggagctgggcgagcagcgcttcgatctggtgctgatgctgcacgcgctgacctacgccgaacaccccgccaaggcggtggccgaggccgttcgcttgctgcgccccggcg

SEQ ID NO: 178534 - DNA, 806 bp, Arabidopsis thaliana landsberg
atgaaagtgatcactgaagacgtccaaagtcagcaatatgcgattatgaaatcaggtaaaattatatttgtactagatgactacccacgctacgcgtgagtttgttttaaaaattgttaaaaaaaaattacattgattgttctttatgctaatttattttactatttgtttatttttgtattattaataaaattagatccataatatgtagtgataatttttatggttagattcatttgtgatttgaaatatcaatttatatattttgtctataaagctgattatttataagattttaatattttttcactaaatgaatacatataacaacaataatgatattttgatacaattctgtgtaactatgttatgtttgtggtttaaaattttcctaactcgattataaataaatcaattccttgttttatgtacttcaacaacattgtgatagactcatgattaaagtttggattgacatcaactgaaaaagatctgaagactattcgtacaaaaaaataaaaaaatagcaaaaattgaatgtcattgaagttaatacttttggatcttttgtcattgcatatatcaatatttgataaatgatcgtgtctttgatgatttgaaaattgttcaacttgattataaataagaaggtgggggaaatgagtaattacgtctgcttttgtttatttttagacgatggaagatacttagtgtttgtgtgtgtatcaggaggaaggagaccatctctggacgtggaaaactcgaagatgatttgcaagaaatttgtgagcctcaactatgactag

SEQ ID NO: 178535 - DNA, 723 bp, Arabidopsis thaliana landsberg
atgaatcttgaatttggaactcttgatatcacaggagataactatttggcattggtactgaatgctgaaatttatctacattcaaaagatctccttgataccatcaaagatgggaatcaaactcaaagtaaagaaaaattagaagctatgatttttctgcgataccatctccataaggatctcaagaatgagtatttcagtgtgaaagatccgcagatcatttggaacaatctaaagcacagttatgatcatgagaagactatgatattatctaaggtccgatatgattggactcatctgagactccaggactttaaatatgtaagttagtacaactcagccttattcaaaataactttaaattggaattatgtggagagaaaatgacggatgcagataagttggagtagacattctctactttttaatgctaataacattgtcttgcagacacagtacggtgaaaagggattcgtgaagtattcccaacttatttcttgtctacttgtagctgagaaaaacaatgagttacttttgaaaaaccatggactatgcccatcaggttttgctctgttctctgaaacgaatgtgacatgctatggtcaaaaaagtgattacaaccgtggtcgtggccgtgtatacactagaggactaggcagtggagttcattttaagaactcaaactctcataagaagtgggaaaacaatgggacctcaaagaag

SEQ ID NO: 178536 - DNA, 1178 bp, Arabidopsis thaliana landsberg
ggtgctgttggtaagagaaggtctaggttccaaggaattcaatttcctgtaacaacaaacattgctcgtaaagcttctactgctgctccactcgatttccgcggtagagcttttaatggtggaaggatgactagtgccaatcagtcaaggtctagaatgctggataactctctgacctgtttgttaatctgaagtccttatagtatcttcgattgtgtctgattcaagaagcttcttttctaagctcctggtcactagatgactgcatagctatacagatttatgtagttgagtttatgatgatgcttgaaggagtcagttcatattttgggattggagatttgggttagaagaaaacaattcagaacgttaaggttgagcataaactttgctgatgagtggctagggtgtttttctcaagactgggttggcctttgatatgaccttgggtggttatggctaggttgagcataaactttgcttttggttgaagttggtgtttttagttattgtcagagtaacaagtcaagcaatctgatactgtgcttggcctttgattttacctcagtggattcatgaaactcatttgcattcattcagtctcctaggtgttatgtttcatcttcttgctacatcctgaagattatagcttcctctctgaggttgtgacactgtcttggtaaatacctgttactgggaaaagagtcagactcaggatcttcgtcaatatacattaattgttacttcgttgtacttcgggtcatctctcgagctactctcttagtcactgataagttgctttgtcggaacaaatgccatcttttggtctgttgaccaggagatctgtcaagagcatgcactttttctgtctagtttaattggaatttggagttgtgtcagtgtcttggcgcttttaacactggaagtgaagtgttgcatccttataatgccatccttctttgttacttggataactggatttcgcttagatccttctatgtatgaagaggttcagcttttgttgctaacaactcgataacagatcattttatctgttgatgccagtaccgtctgtacgtcttttctcggttcctcagcacttcttctttgtttttttgtgcaggcttattgctccaccagttcaaaatatatctgtacaggctagagtcaacgcaaag

SEQ ID NO: 178537 - DNA, 1722 bp, Arabidopsis thaliana landsberg
  unsure (1)..(1722): unsure at all n locations
atgccggtgctggcgacgagtctcgtttcgcttaaagtggaggagccataccttcctccgcgaaattgggaatctttaccgtctcaaagcggccgatttcttcctccaactcgttcttctgcttcttcttcttcatcttcttcctttgtctctgtaagtttcgaacttgcattttgcttttgtgtgagtgtatctgtttctgtgtggcttagatcggataccctaattggggatttgggaaacttcaattgcagtgagttattttattgattgagtttgattagggctcaatctagggtttgttgagaatgatgtactgtctttagtgcttagatgagatatgtagatagtcctttcatagtctagttctgcgttatttagagaaaaatgttttgtaattgaacctacttctcatttcttacatcttgttgtttgtgataggaatcgagcttggtcaggttggcgctgaatgctctgcaaggagttgagtcttctaaaattagtatagaacagctctcttctgcattttgttctgagccagctgacaggaccttccacaaaattccgagcntgtggcatcggttgtcaagcactgatgcgttgggacagattcttagagatataggctgcttcggttctttggtatttcttctccataagttcgttgaccatttcacaagattgaatttggatgtggaatcagctgttgagggacaggggagctgtaaaattggtgaaaatgaagaagtcaataacaaaagctgctatactcttgttaatcaggcttttgctattgctgtgaggagggtcctagaaggctatatatctgggcttgatacattatgtgcatcgatagaactgaggcgttcatcaaacattgttgatgggtctgaccatggttcttctcggttaggcagccttacaaacgtcgttcatccaaagataacattattggaagtttttctgcatactagagagttaagaacacagattgaagctctggcaaacatatgtgatttgtatgatatagccctttcttactgtgcctctccttgggaatgtctcattactgaagcaaccacgcgatttcatgggttctacagaggaagtgaccttcttacttacttatattcacaactacaggtcaggttaagttatgttcctcatttagtattcgtcctttttctctttcatgaggcgcatagttatcgtttaatgtagcctagaggcaccttcggttttagttgtttcccattcttcggttttacttcattaaattttgcatctctgtactctctactctctgaattctgtatatcagtaactgctggatttacatattttatagagatttgaaagaatatcggtcatggcatttaaattgttctatgcactttctaatgtggaccactttatatggtgattatagttgcaagttatgcttaacgtaagtaatatacataacctggcgagtctgaaattcacactcgcttaagctacttttctgaaccaggagttatgcttaaagtaagtaatatacacttgatttggtctgactattttcccgacatattctgttgtaggttgctgatcctactcacagtgctatgctgaagtttttgttcctcaaaacatgtgagccatattgtgagtttataagatcttggatgtttaaagccgaacttagcgatcctcacaaggagttcattgtggaatgtcgca

SEQ ID NO: 178538 - DNA, 700 bp, Arabidopsis thaliana landsberg
atgctctgttcgcaaaatgtttggaatgatcgcagcattgaaagtcttgggaaggataacacgacaggcattgtaacacaagttgtcttggacactgcgttgttgagagagacaactaatggactcagaatcaaaacataccaggtaaacaactaaaagcttgatcaaatctttaataaaacttcgatttggtttgatccgcatcaattttttctcttacgagcagggaggttctggttacgttcagggtattcgattcacaaacgtagagatgcaagatgttgcaaaccctatactcatcgatcagttctactgtgattcttcaactacatgttaaaaccaggtttccttataatatacaatacaaacttgtgattgtgattcttatatcgaaccaatactcagttatgttctcttcctttttttggtataaatgcagacctccccggttaaaatcagccatataatgtaccggaacataaccaagagtgcgaaagccatcaaatttgcgtgcagcgacacagtcccttgcagccacattgtcctcaacaatgtgaatcttgaaggcaaagacgctcaagtcgaagcgtactgtaattcagctgaaggatttgggtatggagtctactcgcacgacgacaaaggcttggaccagactcacaagtcagaggaagccgagactggccacgatgagctttga

SEQ ID NO: 178539 - DNA, 438 bp, Arabidopsis thaliana landsberg
atggtcgtcgattggtcggcgctggccgaacaggtcgtgggcgacgtgctcacgtctgccttcgattccgccggccagcgctgttcggccctgcgcgtgctgtgcgtgcaggaagactgcgccgatcacgtcctgggcatgttgcgcggcgcgatgcaggaactcggcgtggggaaccccgacatgctttccaccgacgtcggcccggtcatcgatacccaggcccagtccgtcatcgagaagcatatcgccgccatgcgcgaagcgggccaccgcgtggaccagctcggcctggacgccatgtgccagcacggctcgttcgtggcgcccaccatcatcgagctcgacaacatatcggccctgaagcgcgaagtgttcggaccggtcctgcatgtggtccgctacaagcgcgaccatctcgatgcgctggtcgacgcg

SEQ ID NO: 178540 - DNA, 419 bp, Arabidopsis thaliana landsberg
ctcctgaaacacagacattaagtcttcataacatcatcaccactgacaagagaccttccagattcagagacaatgatcaatcatgttgttgccaaagaaaggagaaagctcttgaagatacaacattttgtcaaccaccaccaccacaaatgatccaacaagatttggatttcctgagtaagtctgtgcctgcggttccttcaactcccaacccggtgttgcggctgatgggaaaggatttgatggttattaaccaaagagaagagccttcactcagcgaatcaagtccagacccagcctctcagtttgtggatctttataagacacagcaagcgtctccgtctgttaatcatgttcatcctcctcacagcggaaatggttatttggacaccaatacaagcttctacaacatcccatga

SEQ ID NO: 178541 - DNA, 523 bp, Arabidopsis thaliana landsberg
atggatgctagattaagggaagtatcaacagtttataagggtgcttgtcccggggcttacatcgataaagcaagacagtatgcagggcaaggggaattaatacaagacaatattttaaagctagagcaacgctaccaggtccgattggatgatggcaagcgttctttttattttacaaaggagagtgatccaaacgtgagtgtattagatcaattacgtgctgaacttaaagaaaacaagattgaaaagtcccgagtgtacgatattttaagccaagaaggtgaggcatttcgtcagccagaggatattgcattacgcaatgaattgggtgattcagccaccgtagacagtgtttaaacacttaaaaaagaggctgaacaagggcgtcaatatgttgcagatcacatcgacgaagcagtgaaagctcgcgtacgcgctcatggtgatgcttttgacgaagagaaatacaaagctatgctagttcgttctgatgacttggaatatatcaaagatgaaatcaaac

SEQ ID NO: 178542 - DNA, 132 bp, Arabidopsis thaliana landsberg
gccccatggagatcctcatatgataaagttcggtgcacacatggtacttgttcttaggcttctatttactgatgaaatcaacgactctttcaaggagaagctcaataatgttggtgatcttattcttcatat

SEQ ID NO: 178543 - DNA, 1002 bp, Arabidopsis thaliana landsberg
cttggcagtcaaaatggttttgcctcaaactattccggaggatatgaacaatttgctactagacctggattatctccctacacgagtcctggttagtatatatcatagctccctataggcgtttttcgcaattaaaattggtttaaccaactagtatttcatcaaactgtcggttcctctgcttttcttaacttttcaccattgtcctcttgtagtggcgaggactcaagtttctgctcctcccggattttctgctcccaacaggttacctcctcccggtttctcttcacatcaaagaggcgacctgtcttctgatattgcatcaggtattatatgttacattcccaaaaaaaggatagtttcaactttccataagctgaaactcctgtaacacatactttgcaatttgcaggaactcgtttacttgactcagccaatttgttgaggaacgcatatcatgtaccacctccaagtggaaatttgaatgctgcaggagatattgagtttattgatcctgcaattttagctgttggaaggggaagacttcataatgggatggaaacagcagactttgatttgagatcagggttctcttctcaactgaattcatttgataatgatgcaagactccaattgttggcgcagaggtctctggctgcacaacaagtcaatggatttcacgatcccaggaacgtaaacaacttctcttcttcgttctctgacccatatgggattagctcgaggccaacggatcaaacacaaggaactggcttgtctcctttcacacagctgcctagacaagcttcagcaaatccattgttgtcaaatggacactgggataataagtggaatgaaccacaaagtggtaacaatcttgggattacccagcttctaaggaatgaacggatgggttttaatgacaacgtttacagcggttttgaagagcctaaattccggaggcccggtcctggagatccgtataacagaacatacgggatttga

SEQ ID NO: 178544 - DNA, 169 bp, Arabidopsis thaliana landsberg
atggtggccgcggcgagggtggtgtcgggggtgaaggcggagggtctgctgcggggcgcgtgccggcgctggcccggcggccgcgctgcattgtggggctcagcacgcagacggagacggtgctgctcgtccgcaagaaggccaccgtcaatgacgtccaggcgctctg

SEQ ID NO: 178545 - DNA, 986 bp, Arabidopsis thaliana landsberg
atggagtctccgagaaaccatggaggctctgaagaggaggaatacagcagttgtgagtcagggtggactatgtacatagaagacgccttccatggaaatgaccaatcatctgttgttgtcgatgatgatgatgatgatacacaggttaaagaggctgatgatggttatgagaacgatgatggcgatactagtgatgatggtggtgatgaagagagtgatgattccatggcttctgatgcatcctcggggcctagcaatcagcttccaaagcacatcaacaaacatgcagctaggaagaatggttctaaacaagtctaccttcaaaaacgccaacacacagagaaaacaatcagcaacgaaggagaaaaatcagacctcaaagctagaacaagaacaagtgcagctagtcgtgtccagagtagagggaaggtgagcaaaaccaaataaaactcatggcgaatgagagaagaagatatgggggttcacaaagaatccaaatcctgtagtgaagagagacgtttcaggggtctcaccaatcgtgttgtttgcctttaataagccatgtgtaggtagttgcattgttttcttttgccggaatatgtttttttgtagaagctgacccaaataagttatctgcacggttctccgttggaaccctgttatataatatgtaccttgttcttcagagacttccttctaacacaaaacagagcatatcctgatctgcatgttcaacacaggagccatcaagattcaagagagtgattcttggaagaaaaaccaacagttcctgaatcattctcaacagcaaccagataataaccaatctttagcaattgaaaagcaaaacattagttataaaatactaataatctttttccgagaaaaaagaaacgctcatggtagaggacaaagtggttgatgacaaaacaggagtttctaaggttgccaatatggtgtctatgatgtgtggcccaagtagctaa

SEQ ID NO: 178546 - DNA, 610 bp, Arabidopsis thaliana landsberg
atgaaggtaaaagcaggattgacattgctcatggccgaagataaagtcggcgagctatattttatcccattgtagcctaagatttgaaacgcacttctgttctttttatgaagtacaaatacaacaaatttaagtaagaaatttcttccataaaacaattttttttgaatacacacttatatgcaattcaagaaccaactaataattggttttgaaacctagctaggaagatatatgcattgcaaatgctactagatatagtgtttccaaaataaaagtaacttacgcaattagaccaagaatccccatgttgcatagaattgaaaatgtcaacggagggagagatcttgatctgtagagataagtctatgtaagaaaaattacttaatacttcacataaaacttgaaacagaatcgtgagaatgaagaacctgaaggagaagaatgtaagaggaagaagaagaagagatccaaaagtgtaagagtatacgagaaccacaaatgggctaagtcctttggacgtcgctgctttgaccagagtgtttactcctacgttagaaaactctgtcaccaccatcgccgtcaagatccagccatctctgttacataa

SEQ ID NO: 178547 - DNA, 580 bp, Arabidopsis thaliana landsberg
atggcggatcatcctcgttctactgagcagcaagaagctgatgctgcagcttccaaaggctgtgggatgtttgactttctcaagaagaaacccgaagatgtacattcttccgagaatgcccgtgtaaccaaggagcccaaggaagaggagaagccttctctcgctgaaagactccacctttctgacagctctgtaagcttaattgtatactcttgttcttatgcatgagaaatgttaataacacttgttgatggaggatgtgatatatatgtatatgcagtcaagtgatgaggaagcgggtgaaaatggggaaaagaaggagaagaagaagaagaagaagaagaatgaagttgctgaagatcaatgtgaaacagaggagaagattcctgcgggtataggccatgaggatgggaaggagaaagggtttatggagaagataaaggataagcttcccggaggtcacaatggaaagcctgaagctgaacctcataatgacaaggccaaggagaaagggtttatggaaaagatcaaagagaagcttcctggtcataccaatgatgagaagaagaaggaaacctag

SEQ ID NO: 178548 - DNA, 35 bp, Arabidopsis thaliana landsberg
atgcgggtgcggcagaccagcgaggcacagctccg

SEQ ID NO: 178549 - DNA, 262 bp, Arabidopsis thaliana landsberg
atgagtgtggaggcggtgagaaatggtggattctatgctggttttgtggattgacatttcttgacggttcatggtctggctcagtgttgggagactcttaatagaagtggttgtgttgagtgtttgagtaaagcttcagtgaggattggttcttgtttggttaatgaagaaggtcgagttcttagtgctggttgctatatgaggttttctactcacaagttttataacaattctggaaattctacatcagatggtaatggtg

SEQ ID NO: 178550 - DNA, 22 bp, Arabidopsis thaliana landsberg
atgaccacaaacttcaacgtac

SEQ ID NO: 178551 - DNA, 437 bp, Arabidopsis thaliana landsberg
atgcctcccaagaaagcaaccagcgtgaccaagaaggccgccgccccggctcacgcttcctaccgtggtatgtttcttctgatcctgcacgcgtcccaaatcgcgtaaaaataaattctatatcgctcgtgtcgcgaacgtctgctgattccgttcatatagatatgatcaaggacgctattgtcaacgtgagtagatcaccgccgccgcccgacttgttgtgatctcgggtcgcgcccgaccgtgacacgtccggtccaaggcttgcatctagccaccacatccataaggatgacttttatttattcttttgcattgctaactggcctttctgtcaaaagttgaaagagcgcaatggttccaggtatgtgtttgctgtgcgcaacatctcgacggcccgctctttggacccctcccggggcttggacaacgcgtga

SEQ ID NO: 178552 - DNA, 1745 bp, Arabidopsis thaliana landsberg
gcaatgtcgacaaaacagtagacatttggtcaatgagccttgaaaaacaaagtgctgggaaatcttatgctgagtgtgttcaagtgagtatagaattctatatcttgcataaatattaaattgtacttctctgcttaaacttttttttgcatttatttttctgtgaaataggatcttatggagaagactcttgtccttgctttgacaacttgcaacaagagagtcagtgcgtctctacgtaaactctttgaaagttatgctgagatattggctagtcaaggacttcttgcaacagctatgaagttcttaaaacttctggagtctggtgatttctcacctgaactttcaatcttgcgtgatcggatttctctgtatgcagaacctggtatgtgttcagctgtgttgtgattaatctgctatcgaagaaagctatcattctgatattagctaaatttgttgttaatattgtttcttgcagaagctgctaacacttctgcttcaacaaacactcagcctaaaatttccaatccatatcaagaggtatgttgtttgacttggaacaaactctgctatctacttggtttttacttaaacatttattcttctctgtttacaaggaaggatcgtttcttccttggttcgtttctttaaccgtcttcagtgttagtctctctctctatctcctatcttcttttaatttcgttgactttgatgtctgaatgatcagggtctgtttaaaggttgtacctttgcttaggtcctctgttatttagattttgattcactctagagatttttggaacatatgttaagattttgtggatttttttttgttgtgtagggactgaatcaaggatcgaaggagaaagttcgtagctttggaaaggcatcactgaacattgcagaatacttttcattgatgaaagaagatgatgttcaagtcaaagtgcctctcaaggattgtgactcatcatctgtgagaagtccacatgttcatgtgcgtcattgatttgcttgttagctagttctctgaatttatcattgtttcatttctctaaccattgtggtgtctgttttgtgttcagatatcccttcagttttctcctaaagaatcgttgcctgaaagacagaggtctgctcttcctgttctatggtctcctctttccgcagaggctgagaaagctgagtctgttgttaaagtaggcctgagaaagatgaagaccttcaacaattgcatgtctagtacacaggcatcggaaaaggagagtgagaaagatggaagcagtggaagcggaagtgacggcaaaagtcccgagagaaatcttgattctgactctagttatccttttgatacagattctttagatgaaggtgatgctgcagatgaatcagaagagaacagagaggatgaaagtagcttagctgatccagttaattacaaaacacttcgttctgctaattgggctagaggctcatttcatactgttacaaaccccgaagacgaggatttgatatattacagtcaccgcagtccattagcagagacaggacattgcggtgatgaggtttccaatgatgtagtaagcttggagcagcaaaaggacaaatgtctaagaagagaatgttatcttggaagaagagaaaactcagttttagatctcctaaacagaaaggcgaacctcttcttaaaaaggattgtcttgaagaaggaggtgatgatatcgattttgaccgcagacaactaa

SEQ ID NO: 178553 - DNA, 176 bp, Arabidopsis thaliana landsberg
gggaatgctttttgcaaaacgttgtcaacaataaattttcggtgagtatgggcagtgcagatgcctcgaccgttagagagcgaactttaggtctggtttctacctttgattatatccccggtaaagtgttccagagacagtttcatgaccaagataattctcttcgtgaaaactga

SEQ ID NO: 178554 - DNA, 53 bp, Arabidopsis thaliana landsberg
ggaccatagtcaccatctccgatcaaattgcatatatccgagcattccactaa

SEQ ID NO: 178555 - DNA, 670 bp, Arabidopsis thaliana landsberg
atgattatcgcattttgttctggtgaagctcgtgtgttggcaaatgaagttgttaagttgattccattagacaggggccagcatgtaagactcagagcatatgtgaaagagccaaggtttgtaagtgctttccgtgtgcatgcacattttctaggccagatatcatggatgaaacattttctactgtgaatttttcctgacttgtaaatgctttctctttgtcttttctggttctaaatcggccaaaactatcatgttggagcgactaaagctgttatggtataatttatttaccaaagtcataaccaaatttggtgttgattgattctattttaggtttggttggcgtggtcaatcacgtgatagtgtcggtactgttttatgtgttgatgaggatgggatcttacgagttgggtttcctggagcatctcgaggctggaaagctgatcctgctgaaatggaacgtgtggaagaattcaaagtcggggattgggtccgtatccgtcagaatctgacttcagccaaacatggttttggatctgttgtccccggcagtatggggattgtttattgtgtacggccagatagcagtctccttgtggagttaagttatcttccaaatccctggcattgtgaacccgaggaagttgaacctgttgctccctttagg

SEQ ID NO: 178556 - DNA, 333 bp, Arabidopsis thaliana landsberg
atgcagagaggagatgagacatttaaacctttccacttgctcaatgaactgagtgatctccttatgcttccaaaagaaatgcttgtggacagtttcaccagagatgaggtatgtatgcttcatgatttagaactgcttatcaaccctacaaagctgtgatctcttatattgcttggtttcttcatctagcttcttgtttacttttttgggtttccacaggtctgcccatcaattggtctgagtttgataaaaaggatagtatgcaatttcacccccgatgaattctgcccgtattctgttccaggaactgtgcttgaggaactcaacgctaag

SEQ ID NO: 178557 - DNA, 3571 bp, Arabidopsis thaliana landsberg
  unsure (1)..(3571): unsure at all n locations
atgaatgaaaagagagaaaaagtaatggttgtaaattatggtaagtttggattgcttaggttgggttgatggtgtagtagtaaaaaaactttaaaaagtgtttactctttctaaagtgctttattgcgtaattgagtttcaaaaaagtgtccaattacctaatattctcaaaaacatttatcatgttaatgacatttctgtaattaacgtaaatgagaaggatatatatggttgatttttcttttcttttttatagttacttaattttcaaattattaatgttataaaactaaaaactattcttttagacatatatattaatatagccttaaattttaagtgacattgaagaaaattacgatggaattgaaaatgcttacaacgatattaagtagcttaaaaatatgaaattctaaaatgtgcaattcataaatttaagattcctagatgtagtccataattatatttttatctgtttggttttttataataaattagaaaaaatggataaaaaatgtaaccttagctaaaaagaaaaagaaagaaagacccaataaccaacgaaatccatttacccgtccataggtcttgggttcggcccatcagtttcccgccacattgttcccgccaaaactcatagtcgacataaagccctgcccccactctctctcttcgtttagaactttttgataagagagaaagagatagagaaattcgtaacggagacgaagcaacgatgtcaggatgggacgaaggagcagtttactacagcgaccagccgcagttcccggaggccggagacgccgcaaccatcagtccccacgccgtcttaaccaaatttaaggaattcattcgaaacttcgagatcgaacagaattgtttcccctacagagaagctctcctcgataaccctaagcgacttgttgtccacctcgaagatctcctctcctttgattccgatctcccctccttaatccgatctgctcctgccgattatctccctgtggtatgacttaaaaaaaaattagggttcatataagctttgtattgagtgagtcaatctttgaattgtagtttgagaaagcagctggtgaagtgttgactggattgaaaatgagggaggctaatgagggaggggtaatggaggaacctctgactagagatgtgcagattttgctcacttcaagagaggatccagtatcaatgagattacttggggtatgtctgtttttttgtttttagtatcaatgagattacttggggtatgtctataatgtactctttactcttgataggcacagtacatctcaaagttggtgaaaatctctgggattagtattgcagcttcgagagtgaaagcaaaggcgacttatgtgtttttggtatgtaagaattgtaaaaagacaagggaagttccatgtcgtccgggtcttggtggggcaattgttcctcgatcatgtgataatattccacaggtgagttcttttgattcgtttgtgatttgagtttgtagttatccttggtgttgattagaccaaattggaatttgtttagcctggagaggagccttgccctcttgatccttggatggtggttcctgataggagccagtatgttgatcaacagaccttaaagctacaggagaatccggaggtatagatttacattgtaatgttttcgctttttttgcacttgtatatattaaatgcttctgagttttgaaggatgttcctactggagagcttccaagaaatatgcttctctcagttgatcggcatcttgtacaaacaattgtacctggaaccagactgacagtaatgggtatctacagcattttccaagcttcgtcatcatctaactcgtaagctttgtagttttatgtcaaatgagagtgtagattgttttctgggagagttacaccacaacaatgatggacatcttttcctactttctgatgtaggcataaaggagcagttgcaattcgccagccttatatccgagttgttggactggaagacacaaatgaggccagttcccgtggccctgccaacttcactcctgatgaagttagtatcgcatcatttggttttttttgttttctcatttgatagcctatgtcatccatggtttcacaatgaactattgaagttaacatggctgaattattgttactggaaaccaaatgccttaggtagctgttggctctatgaaattctttgtgtaactcccaaatgaatgtgatggtgttttctggaaatattctctgtgctactagtttactatgaaacatttaggcctgcttggaagcctagttgtacaattccatttatcagttttgtcttccataatattacttttaggannnnnnnnnnnnnnnnnnnnnnnnnnnnnnnnnnnnnnnnnnnnnnnnnnnnnncaagatcgctccttctatatttggccatgaggatgtgaagagagcagctgcgtgtcttctctttggaggatccaggaaggtaggaaactgtgatagcagtttttattttctgtgcactttgtatacgtttttgatatatttatatacatttctatctttgattcagagcctgcccgatggagtgaaactaagaggtgatattaatgttttgcttttgggagacccatcaactgcaaaatcacaggtttgtaatgtggtctcagtatcaatggtttataataagtgtgttattctttttatattttcttacgtctctcttatttgcttgatattcgtcttacatccttctgttcaagtgttagattacaatccttacaaaatgtctgtgttatttccaacacctgtagcttacatgtttaaagcttaattgcttattttttttctctctagtttcttaagtttgtggagaagacggctccaattgctgtttatacatctggaaagggttcatcggctgctgggctcacagcttcggtgattcgagatagcagcactgtatgtcctatcttcaagtgtttttctatgatatgtttaaaagtagttgctatgacagattctcagttatttatacatatgttcattgcagcgagagttctatcttgaaggtggtgctatggttttggctgatggaggtgttgtgtgtattgatgaatttgacaagatgagaccggaagataggtaattcaaatctgaatcatagtgttgacgaatctaatttttctctatgagtagaattgatggaatgttttttttttctttatagggttgctattcatgaggcaatggagcagcagacaatctccattgcaaaagctgggataacaactgtccttaattctagaacctcggtgcttgctgctgctaacccgccatctggtcgatatgatgaccttaaggtttgaaatctggtactctcctttggcaatatcatggttttcccgattcttgtttgcaatattcttaagagatgggtgtgtttttttttctttggatttgcagactgctcaggacaatatcgatctgcagacaacaattctttctagatttgatcttatcttcattgtcaaggacatcaggaagtattcccaagacaag

SEQ ID NO: 178558 - DNA, 283 bp, Arabidopsis thaliana landsberg
atggatctattaaaactctattcgacttcttacatgaagcattccaactgtacacggccggtacgtcagctagttgctttacttgcaagttgcaactaatttttgtctccggattacgactttgcgactcatttgcatctataaaatctaattttttaattgttttgtcactgaaaagtcaataaagtcgacctttttgtttttcttgtaggccggacgatggtttcacaccacaacgaccgaaacgcccatgcataatacccacgtgttattacaaagactg

SEQ ID NO: 178559 - DNA, 552 bp, Arabidopsis thaliana landsberg
atgtcgcgcgcgatccgcatcatggtatcgatgcagctcatccgggaaaacgtcgcgcgcttgttgcgccctccgccggtgcgtgatgtggatgtggttttctataccggatgcaatcctatccgaacgccacatgtcctgttcaacgtcatgaccatgcttgacgtgttggatatcaactacgaggtgctcggcgggccgtcatcgtgttgcggcattattcagagcaaatgggaaggcgacgtcaagaagggcggtcgggtttcggagcaaacgctcagcaggttcggcggttacaagccggacaaggtgctcagttggtgtccgtcatgccaactgcatctcggtgaaacgatcaagggctatcgcgaggtcagtttcgattttcaccacatcaccaagtttctcatggagcacgaggaccagcttgcagcgcgtttcaaaacgccagtgaacaagcgcgttctggtccatacccaccgtggcatgtccgaaattggcaataacgtcgtgcggctgttgcgccgaatcccgggactggagattgtcgac

SEQ ID NO: 178560 - DNA, 2583 bp, Arabidopsis thaliana landsberg
atggaggttgggtggttcgatgaacctgggaactcgagcggtgcaatgggagcgaggctctctgctgatgcatccttgatccggactcttgtgggagactcgctttgtctatcggttaaaaacgttgcgtctttggtgacaggactaatcatagctttcacggcgagctgggaagtggcgattatcatcttagtaattattccgtttattggaatcaatggatatattcaaattaagttcatgaaaggcttcagtgcagacgcaaaggttggtcctctacgaactgagtactaaaaattattgtctcaaatgtatctgtacgaaaacgtatccttaccaacataagtattatcttgacctaaatgggtaatttatgttgccctaactcgaaagtttatcagaactgaacatgcctactttaaaaaaaatgagttttctagggttagggtttgttactcgttacagaagtaacttaaaatattataaaaaatgatgtttgcaggcaaagtacgaggaggcgagtcaggtggcgaacgatgcagtggggagtataagaacggttgcgtctttctgtgcggaggaaaaagtgatggagatgtataagaaacgatgtgaagatacgattaaatctgggattaagcaaggtttaatcagcggagtagggtttggtatctcctttttcgttctttactctgtctacgctagttgtttctacgtgggagctagactggttaaagccggaaggacaaacttcaacgatgtttttcaggtttattttcttggaaatctctgtaatggatcttgaggagaacatactgtagttaatgatttttgtgcaggttttcttggccttgacgttaacagcagttgggatttctcaggcgagctcttttgctcctgattcgagtaaaggtaagggtgctgctgtttcgattttcagaattattgataggatatcgaagatagattcgagagacgaatcgggaatggtgttggagaatgtaaaaggagatatcgagctttgccacataagcttcacttaccaaactagacctgatgttcaagtctttcgtgacctctgtttgagcattcgtgccggacaggtaaccatctccaacatttttacatgaagtcgtgtgtgtttgcgtagaagctccaaaaaaacatttttagaactctgccgattttatactattttgttatagatttcaatatatttggtacgattttgaactgatttgggctttaattatatgcacacttctttatttcttatgttgtttccagactgttgctttggttggagaaagtgggtcaggaaaatctacggtgatttcactgttacagaggttttatgatccggattcaggtcatataactctagacggagttgagctcaagaagctgcgactaaaatggctaagacaacagatggggcttgtaggacaagagcctgtactattcaacgacacgatacgagccaacattgcttatggaaaaggcggcgaggaagcaaccgaggctgagattatagctgcttccgagctagctaatgcccacaggttcatctctagtatacaaaaggtaatcaaaacaagacttttattcacttttgaaaaacagagagattacttactacgcaagcaaaataatctttcttatttcaatttagggttatgatacggtggtgggagagagagggatacaattgtcaggaggacagaagcagcgcgtggcgattgcacgcgccatcgtgaaagaaccgaagattctgttactcgacgaagcgacgagcgcgttggacgcagaatcggagcgggtggttcaagacgcgcttgatcgggtgatggtgaaccggaccaccatcgtggtggctcacaggctttcaacgatcaagaatgctgacgtcatcgccgtcgtcaagaacggtgtgattgcagagaaagggacgcacgagacgttgatcaatatcgaaggtggagtttatgcctcgctcgttcaactccacatcaatgcttctaattgatccaaacattttttgttattagtcattgctttttagctacgcaactgtcatttttcacatatcacatgtgataatctaaaaagggacgagaactccggcttgttcaatgcttaaacacactattaacataatacaataaggaataatggtggcatacacgacgacacaagactgacgatattttcatattttataactaatgatcagttttgttcttaaaataatatagatcacttcaattgggccattaaacattaaatagaatcattttaagaaaatatcaaatgaaagagacataagaaatgaatcaatcatgtttgtagttagaaaaaaggaaaacaaaaaagatagaaatggaagaaaagacaaagaccgtaccgttctacaaattgttttccttctcagattctaccgatgtgttgttgatgatcgttggttcgatcggagctataggaaacggtgttggttttcctttaatgacattattgtttggtgatctcattgattctattggtcagaaccagagcaacaaagacattgttgagatagtctccaag

SEQ ID NO: 178561 - DNA, 1192 bp, Arabidopsis thaliana landsberg
ccaagggcaatatcggcattgaaaactcgaaatgaagtagaagaagaaggagcctcgaatccacatgtaaaggttggttgtttccatttttgtttgctcggatttaatgaaattaagagcctttgctttctttcctttttaaaatttggttacttggcctctctctggtctaattcatttttataggttgtggtgaggattaaaccaacaaaggagtattgctggaaagtgaagaaagtttccaaagtttcatattctgttagagatcgccattttacatttgattctgttcttgactcaaatctaaatcaggttcatctctctctctcacaaataatttggataagtttctattagggtgaagagaactaagttatcttctctttggttgtgttgttgccaggacgatgtatttcagcaaattggtgttcctttggttagggatgctttatcaggttacaacactagtgtgctatcatatggacaggtactgaataattatgtttttggagcttttgaaaccaaattttatagtcaccagacgatgttgaagttatgttctttaattggatcctttagaatggaagtgggaagacctacacaatgtggggtcctgctggttcgatgcttgaggatccatctcctaaaggcgagcaaggactcgcgcctcgaatctttcagatgctgttttctgaaatccagagagtaagttatgcttttgaatatataactcaagctttttgtttgattatgagagctatgatggatggttcatctaataagcatcaaacatttgccaattatttaggagaagatcaagtctggaggaaaagaagtaaattatcagtgccgttgttcttttcttgaggtgcctttgccaaaccatatgaaggattttatagacaaatcatgcttctaaaatttcctgagttagattgcttaatcttttcctgcagatatacaatggacaaatcagtgatttgatcgatcaaacccagagaaaccttaaggttaacttcactaatcaacagttttcttcccatatgttaatttttgttgagtgtaaacttatttgattgcttattgtgtcatatggcagataaaggatgacgcaaagaatggtatctatgtcgagaacttgactgaggaatacgtagatagctacgaggatgtagctcagatactgatgaag

SEQ ID NO: 178562 - DNA, 3068 bp, Arabidopsis thaliana landsberg
  unsure (1)..(3068): unsure at all n locations
atgatgattttgcgtggagatgttgaacaagatgagtttcaatacgctagtagtcactgtttgtcttcttactacagtgtctttgttgttcgcctcgctataatggttagatttccatcagcttctcttcacttttttctttgaaaattccgatcaaagtttctgtttttgcatgtttagtttatgatccaacttgaaaaccaatccatttgatgagaaaggtggaagctttatgagtttagaaatggtgtgtttgtgtgtgtatgtgtgcaggttatgttagcaattttgatagggcttttaacggttctaacatggcatttcacaaggatttatacaaagcagtcgcttcaaacattagcgtatggccttagatacgagcttcttcagcgtccagtcttacggatgtggagcgttttaaacaccacatcagagctaacaacagctcaagtcaagttatctgaatatgtcatcaaaaaatatgacaagccaacaactcaagaagaacttgtggaggttttgttttctgttttcctgtctatcctttgtttggtttgagatcctttatttgataatttttgttaactttatcagatgtatcaagcaatgaaggatgtgacatgggctctgtttgcgagtgccaaagctctaaatgccataaccataaactacagaaatggatttgtccaagcttttcacagagatccagcaagtagcagcacattctacatcttctccgatctaaaaaactattccatcagtggaacagggcctgaagatgtaagtgggtggaacaacaagtcaatacacgggaacatgtctgccatttggtatcagcaacagcttgatccagtaacaggggaaaatttgggaaagccctttaaaattccacccgatgatctgatcaacatcgcaagaatctcacaagtgcctgatggtgaagcttcttggcatgtgacagtgagcaaatacatggactctccgcttctctcagcggctttgcctgtctttgatgcatcaaacaagagtattgtggctgttgtgggggtgacaactgcactttacagcgtaggacagttgatgagagatcttgtagaagtccacggtggacatatttatttgacatctcaagaaggatacttgcttgctacctccacagatggtcctcttttgaaaaatacatcaaacgggcctcagctaatgaaagccactgattcagaagagtgggttataaagtcaggagctcagtggttagagaaaacttatggaagtaagcgccctcacgttgttcatgctgagaatgtaaagcttggtgaccaacgatattacattgattcattctatcttaatctcaagagacttccaattgtaagttgtccctatcaagattctaagctagatttagatgcccagtaggatcacgttgtttaattttctgtttacgtattttgcaggtaggtgttgtcattattcccaggaagttcattatgggaaaagtggatgaaagggccttcaagactttgattattctgatttctgcttctgtctgcatcttctttattggatgtgtctgcattttaatactcacaaatggagtttcaaaggagatgaagctaagagcagaactgataaggcaactggatgcaagaagaagagctgaagcttcaagcaactacaaaagccagtttttggcaaatatgaggttggtcatcactgtatattcaagagacaagttcttacgattgtttaacattcttaatgcttaatactgaaatgagggttttgaaattttctgcattctagtcatgagttgaggacaccaatggctgctgtaattggattactagatattcttatatcggatgattgtctttcaaatgagcaatacgcaacagtcactcagatcagaaagtgctctacagctccccttccccttctcaataatatactggacttgagcaaggtgagaaattataagaaaaaaaatcttatttagttttgatataggaagaaaaaatcttcaagctttagtattacatctgatgaccttaagttaggcaatgagtaaacattttagctgtttcagctgtgcttttctcgaaactagtatgtatgtgtacagcctaaaaagatcaatcactctaatttcttccttttccacctcataggttgagtcagnnnnnnnnnnnnnnnnnnnnnnnnagtttgatttggggcgagaacttgaaggacttgttgacatgttctcggtgcagtgtattaatcacaatgtagagacagttctagacctctctggtatgactcggtattatattgtagacagccaataatgaattttctttgcaatgaatttttgcgttatgaaatctcatatattttgctctttttgtagatgatatgccagcattagtcagaggagactcagcaagacttgttcaaatatttgcaaatcttataagcaattctataaagtttacaacaagtaagttttttgaccatatctactttctcttctttttnnnnnnnnnnnnnnnnnnnnnnncataaaaagatggttgctttgcagcgggtcacattattcttcgtggatggtgcgagaacataaattctctacatgatgagatgagcgtatctgttgacagaaggaaaccatgggctccaatgaagacaaaacaggtgcaacacagaaatcacttgcagaagtcttgtaagaacgcgaacaaaatggttctttggtttgaggttgatgatactggatgtggtatgacacttgagttccctaattatatgtcatttcgctatccgcttcatcgatctcccagattctgaaaatctctttattgtgtaaatcttatcttcaggaatagatccaagcaaatgggactctgtttttgagagctttgagcaagctgatccttctaccactcggacgtaagtgatcatgattaactgcacgcagtgaatgtttaagcaaaactttgccgttagttgaatcttatatctcactagtcttatttttcttcaggcacggaggaactggacttggactatgtattgtgcgaaacttg

SEQ ID NO: 178563 - DNA, 55 bp, Arabidopsis thaliana landsberg
atgcctaatgggacaccatctctgctcgaccgtgccgtctctaaagcacatcaag

SEQ ID NO: 178564 - DNA, 267 bp, Arabidopsis thaliana landsberg
gtgacagtgatcattggagaccctattcattttaatgacattctcagcactgaaggagcccaacacgtctcaaggaaacacctgtatgacgccgattcgtacacaattggacaaagactgtacgatttaaaagcacaagttgatagagtatatatagaacaacaatctatgatgtcacacaatgccaaaacaccctcggaccgtgctgctgagatctttcatagagtcgattgggactcatttgggatgggagcacaattttcataa

SEQ ID NO: 178565 - DNA, 364 bp, Arabidopsis thaliana landsberg
gcttataaaatctctatggtgagcagttttttggcgcgattcacttcgttgctcttctttgttcatagatttctcacatttgtttgttgttattagggagaagcaccagcagtattagtggatcatccggagaacggacactccaatggtgtctgtgtgaaatctgaaccagagaacactgagataacagtcgatgtcggcgatcgaatagtaagtccacttaatgttttgatccaaatctgtttaagctggctgataattatctgactgaggtttatcttttgcagtttttgatcggtggaaatcatgaaaggaacaatttttccattggggttcagatttatgacaaaatcagtaacaactg

SEQ ID NO: 178566 - DNA, 1004 bp, Arabidopsis thaliana landsberg
atggttggaggaggaagtgctcagaagctaactacaaacgacgctcttgcatatcttaaagccgtgaaggacaaatttcaggatcaacgtggaaaatatgacgagtttctcgaggttatgaagaattttaaatctcaaaggtatagtttttttcttctccttgttatgtttaggttaaaaacttggtatctgagaactgattgcttaattgtgtttttcattgtagagttgatacagctggtgtgataactagggtaaaagaacttttcaaaggacaccaagagttgattttggggtttaatactttcttgcctaagggttttgagatcacacttcaacctgaggatggacaacctccactgaagaaacgtgttgagtttgaggaagctattagctttgttaacaagattaaggtatatatatgtttatgtgctaaactgtctcaaggaaattactgcttttccctttcttactctcttcgatattcattgatttgcagacaaggtttcagggagatgatcgtgtatacaaatcatttttagacattttaaacatgtacagaagggatagcaagtccatcactgaggtctaccaggaggtaggctcattgatgctgttatgtgtatcttttttttgttgctattctgtacttaggttttacatgtctatctcaggttgcgatcctatttcgggatcattcagatctgctcgtggagtttactcactttctacctgatacttcagcaacggcctctattccatctgttaaaacttcagttcgtgagagaggggtttctctggctgataaggttcttctcagacttttattttcctagaaatacaatgttctatatgtctaatcttttattgaacatcatttgattggaaattgttgcagaaggaccggatcattactccacatcctgaccatgactatggtactgaacatattgaccaggaccgggagagacctattaagaaagaaaataaagaacacatgagag

SEQ ID NO: 178567 - DNA, 505 bp, Arabidopsis thaliana landsberg
atgcatcaggtaataatatcataatgcttacttatattggtaagctctgagtccaaaagtagggaagctgttaaacccacaattttcacctgcagtaaagaaccattggaagaaaccccaaaagaagctgaaggagaagaatttccccaagactcggacttgtttcctgatacagagagcacaagtcaataagcagagaactcaaaatgtatgttaagctacgaaagcgaaagtctcatacttggctagctttgccccttgaggagtatgaaagctgttgataagatgagcagttgcagtgccacttgggtatggtagtttgaagtctattatcattatctgcaaacacaaattggtaactgtaagattgcatcagctgctcaaagtctctttggtgtttccacaggagaagaagaggcagaatcaaaacctttctaagaggaacaacagagaagaggccaagaaagctgacaacaaagagaaaagctatcatccaacccaatga

SEQ ID NO: 178568 - DNA, 137 bp, Arabidopsis thaliana landsberg
gtaatttgaaagtctgtctaagtagagaagtgagaaagggtaccatcatatggtcgttgtcgttcgccattgttacaactcacgaggattataacatcttcgccgacaaaaaatacggagaagaggctgtacactga

SEQ ID NO: 178569 - DNA, 339 bp, Arabidopsis thaliana landsberg
atggattcccaggtaacgcttgctccccctcaatagcgcgctaccatcaaatttcgggcaagtggacacgccgctctcaagtcgcaggcgttggcaaccgatacactgtcagggcagacccggcattgcgtgcaggcctggactcgatagtgtattgccaacgatagtggcaaaatgctggtatgcgcatggattaaggaaactccattgaagctggaattgcgggacagcttatcgatcaagttgctcagggtcgtgctactttcggcgctggcggtcggcgtcgtgctcagctgcgcgcagatcgtctacgacacctacatgacccgcatgccgtga

SEQ ID NO: 178570 - DNA, 441 bp, Arabidopsis thaliana landsberg
gtaaatctcaagcgtgctcgtatcatagtagaatctcatgttgtgcactcagttgtaccaggtaagcatatttcttccctttatccagcttattattcaacgttcaagtaagactcataatactctctttacaggatatgttgactgcaacaagcgagaaaacattttgctgtggcagaggttcatgaaacctcgaatcatctttggtgtatcccttgaagagttgtctggtctggagaaatctgtttctaaggtaatcttctcctttcatcttaactgcatccatatgtactcttgagagaatcttctgtttgtaagtccaagttcttgaaactttgattttttcaggtcaaggcactccttaagatgtacacaaaggagaaatatattcttacgttgaataagttgaacaaggatactgagttttctgtgtcctttaag

SEQ ID NO: 178571 - DNA, 351 bp, Arabidopsis thaliana landsberg
atgaccaagaatggtgctcagcagactgcagcagctgggtacggtgggcaagtagctccaaccggtggatacaaatatccaacctcacagcctgcttatggtatatctcagacccataactatggatacaacacaagctctcaagatcctaactaacgatatggtgcggaaccaggaagccaagccgcttattcacaagcagcacctactcaaacaggatatgagcaacagcctgcaactcaagctgcagtgtatgcgactgctccagggaccgcaccagtgaaaacccaatcaccccagtccgcgtatgctcaatacgatgcaagccaggtttacgcaactccacgttaa

SEQ ID NO: 178572 - DNA, 134 bp, Arabidopsis thaliana landsberg
actttgaaaacggaacttatgcagaagaagatgatgacgcggtgtcggaagatggagtagaaagtgactctgacgcggatgaggacgcagtgtcagaaaatgatgaagaagacgagtcagattctgctgagtaa

SEQ ID NO: 178573 - DNA, 1622 bp, Arabidopsis thaliana landsberg
caaatcagagataaagcgtcaagaatatgtaccagtgaagctccaatttgtgtcttcttcgttcggatgaagaatcgaattgaagatagtagagcagagcaggatttgagatcaaaaccaaaaacaaggtaacaaaaggaaacgaatagaaccggaacaacaaaaaaaaaaaaaacaaggcagataaaaataaaaagctaaagggaaacaatcaaagagagttgtcaaaatctatcggaaattacagaacacggagaaaatcgaggaatcttgccgaagaagaacaattttgttgtgccggagacgaagattgtcaaatttttacggtatactagcgtcgtcgggtcggttcggttgcggatcaggtttagtctttccgggtcgggtttttatatagccactaattgggcccattatctttcggacttgccttttcttagtggatctgaagaatgcaaaaaaaaaaaaacaacgtcgacaaatgaaataacaagcatagtaaataattaaatatataagatttcgaatgtttacggttgtgttgacgtcaaaaaagaaaacatttatatgataagtattggggttaaatatatagtctatataagttttggttgaatcaatgtttagtttagacaaatcttgtattgtatatcgttacatgtaatttagcttaggtcatgaatttaatgtagttgcttctatcgccaaccctttttgccaagaaatccggcaaaaataaaaagtgcttaacatgtagtatagcaatcacaacaatctctagaaactaattgagtgattggttgagataaatctaataagtgaaagaaattaaccatagaaacaagctattggtgatgaacggagcagctatctaaaatatgactacactataaatcgacacaagattcgagaaacacaatcattatccaacatatatatatatatatgaattcgaaattcgtatgtacagattatgttctacgcgaaagtgtcaaatgttccgtaagaaatcgggttttaatccgtataatagatatcaaggtaagattatactgttgcggtgattattatatcggtgaggatagaatattgtggctgtgactttgtaacgttaaaagtttaagacaagagaggaaagtttatgagcaagtagggtaggatatatagatgaaataaacgtgagaaatgaatatgtggatgcaatttcagtttgttgtgtggggcttgtttaatactatacagtatacttatatcgtcattgatttatatagtacacctataatagagctatcaacatcacactataaatatttaccctaccatgcattagttgattcctctatctgcgattagtggaaaattttggtattttattgcgatgtatatgaatagggtacaatgttgtcatggtagtattagtttattaccaatcacatatccagcttaggaaaggattataaagctatgcatgcatacttggactaacagatagtccagtttgtttgtttatcatttataaggattaatttgcagatacacaatggatgaggatctatcggcagatggcactttgcggagatgaaagaggacgtgtatgggacgacgatgatggcagtgtctga

SEQ ID NO: 178574 - DNA, 548 bp, Arabidopsis thaliana landsberg
atggtgaatgttctgaccacaaaagtgaaggcatgggaaaaagaaagaggggtccccttcttatgcgataaggtaatcctaactatgcatttacttaatcctcttttatgttcgacgtatataatttatgccttgtattccagcaaccgttattacaaacactagaagatgacattgttatccgtgctcaaagagaagaggaaaagcgtcaattccgagtatgtcttataaaacagaaacatacatttgtagacgatcagtgtgttgttgagctctaacaaaacaaaaaaaattcccctcttttgcataaacaggagcagaaacgactacaaggtcagcttgctacagagaaagaagcaaagtatggttccaagtctgcaaagaagaagccattgggacagagtcttaacacagacaatgtgactaaaactcccattggtcggcgcattggaaatacacctggacgttctgttacttctggtggcaaagattatagaggcaatgcggtgataccattgaactatgttgctcttcagaaagacgattga

SEQ ID NO: 178575 - DNA, 43 bp, Arabidopsis thaliana landsberg
atgaacttggatttggtcggcgatgtgaagtccacgaactcac

SEQ ID NO: 178576 - DNA, 1058 bp, Arabidopsis thaliana landsberg
atgactctttgtgaaaaattgcaggttcggatccgggaaatacccgttttggacaagttgcagtatctttatcgtctattatcagctgtcctaccagtcataaagcagatccatcttgaacaatgtatggaagttgaactagagaagaggcttcgtggtgagacgagtttttgtttacagtgactattgatgaattatatatactcgtaacattttttgcggttaacactagtttgttctactctatagaagttgagattgatcttgtcagggcaagattgaaagcagatgagcagatgtgctggtacttgtgatctatcttacatgcctttcttcttttgacttagtactgcaactatttcttgttggcactttgtattatcgtacatgactgaagttttgtttcttgcagcaacgtgtgtcggataccagttgttgactactaccgtcactgtccgaactgctcatatgacctttgcctgagatgctgtcaagatctacgggaagagtcttcagtgacgattagtgggactaaccaaaacgtacaagatagaaaaggagctcccaaactaaaactaaacttttcatacaagtttcctgagtgggaagccaacggtgatgggagcatcccttgccctcctaaggagtatggaggctgcggttcacattctttgaatcttgcccgcattttcaagatgaattgggttgcaaagcttgtgaaaaatgctgaggagattgttagtggctgcaaattatctgatcttctgaaccctgatatgtgtgattcaagattctgcaaatttgctgagagagaagagagcggtgacaactacgtgtacagcccgtcgcttgaaacgattaaaactgatggagtagctaagtttgagcaacaatgggcagagggtcggcttgttactgtgaaaatggtacttgatgactcatcttgctctagatgggatcctgagactatttggagggatatagacgagctttcggacgagaaactgagagaacatgatccattcttgaaggccattaattgcttggatggtttagag

SEQ ID NO: 178577 - DNA, 85 bp, Arabidopsis thaliana landsberg
atttggtgaacacatcaagctcgtgtatccatgtggtcagctttgtcttcttcatacttccatattcggcatggagcaggaaaat

SEQ ID NO: 178578 - DNA, 790 bp, Arabidopsis thaliana landsberg
atgatcaaagactgcaaaaaattttcaaaacgatgcgagaaatgtcaaaggcacgcgccaacaatccatcaaccggccgagctcttatcatcaatcgcctcgccatatcccttcatgcgatggtcaatggatataattggacctatgcatccctcgaagcaaaaaaaattagtcctcgtcctgaccgactatttttctaaatggatagaagccgaatcttacgccagcataaaggacgctcaagtcgagaactttgtgtggaaacatatcttatgtcgccacaggataccttatgagattgtcacggataacggctcgcagtttatatcaacccgcttccaaggcttctgtgacttagcaagtcaacaccacgatatcccaaggaaacggccaagccgaagccgctaacaaaacaatcctcgacggattgaagaaacggctcgatgctaaaaagggctcgtgggccgacgaacacgaaggtgtactttggtcgcatcggacaactcctcgccgagccacaggagaaaccccttttgctttagtctacgggacgaaatgcataattccagccgagatgatagtgtcgagcctacgacggagtctatcccccgagaacacccttgataacactcaaaggctcctcgacgaactcgatctgattgatgaacgaagagattcagccctggttcgtatacaaaattatctgaatgaaacggctcgtcactacaaccctaacgttcggcaacgaagatttcacgaaggagatcgggttctccgcaaagtattttaa

SEQ ID NO: 178579 - DNA, 364 bp, Arabidopsis thaliana landsberg
atgggggggaggggccaggacgacaattacgcaaacggcgtaacggttgagacctcagttaccggtactcggttcgaggtagagagtgaatcagatgatctcactcttgatggcggtactgacaccagcgagactcatactcttgctacggtagttccagttatctctgacacaagctttgatgtggaccgaaatgaggacggcgatgccggaaccatttcgtacaccttcactgttgaagctgacggagatgaggatgttgtattcgatatcgatgatatcgactacaccgttactggtactgacaccagcatcgcagatgcagcactcagcatgctctcaggagacgctgaggaggactcag

SEQ ID NO: 178580 - DNA, 149 bp, Arabidopsis thaliana landsberg
cttctctgccgtcttttggcggctatcctgactacttctactatgcacctcggggggcgttggacagcggcttcactatattccactatgcccttgcagcgcgggggttcaacactggcgggccggactaccagtataacttaacctga

SEQ ID NO: 178581 - DNA, 104 bp, Arabidopsis thaliana landsberg
atggagaatacgactacagttaaagtgaccaacacgagtaacatagagattcggatctacgacaagttcccaagagaagaaactgtgttcttcaaaaaacatta

SEQ ID NO: 178582 - DNA, 748 bp, Arabidopsis thaliana landsberg
gaagcttatgaggaattcaagcatgttcttcttgcactcatctatgataaagatgaccaaacctctccagtagcaaacgaggtatgccatgtttctgcagcttttttgtttattttgttttttcttagaatgttatctgatcttgcggacacagaatgtcctatgtttattttttgaactgctgctatacatcatgcagaatttgtattttggattataaggaattgcgctttctgttcttcagtgggcagagaaaagaaggtatgaaatggctggactgatgtcatctgtcttacgagcttctttgcaagcatatgatccagtattttctatgacactaagatatctgataaggtaaggctaagttcgtttttcaactctcttgttattggttgtgttctttttcgcttactctgattaatcccttgttctacctttaccagcatacacaaaggattttgctttcaccaaggaatttcttccgcagtttctgatctaacccacagattgctcctggaggaacgtgatgcaccagccacgcctattgaaagcatgtatgaagtaccaccgtttgatgaggtaacatggcacttagcttcttgatcatcttgtaatttaaatgtgattgtatctataacacgcattgtactgaatttttatatcaaatttcaggtggatatacaggctcttgctcatgcggttgagctcactagacaaggtgctgttgatagtatgaaatttgccaaag

SEQ ID NO: 178583 - DNA, 91 bp, Arabidopsis thaliana landsberg
gttcctctcgtgtggagcttgggcagggaagctattttgtatggttatgatcctcgattacttgctttggcggttacttcagttactgcag

SEQ ID NO: 178584 - DNA, 194 bp, Arabidopsis thaliana landsberg
gaccatcaaagcctcttttatcatcttcatcaaaaaccaaaacgaaaaaactaagtttaatagataggaactcaaaagaaaaagttagaacctcacctgaaagtatggaggatgagtggtggttttcggttttcgcggcttcttcgccgccggagtcttctttaagatcttgtcttctgccattagaggattag

SEQ ID NO: 178585 - DNA, 460 bp, Arabidopsis thaliana landsberg
aagacggttgtattcgagtgggaaagttttgacgtaagaaccaaagagaaagctatgaaagttgtatgtgagtttccaggtacatcaacacaattcaattcctacgtttaactttaaccaaataaaccgataatggcaagaagtcataataatttattttttcttattaaggctaaaaataattaatcaataatgtttcttgttgttaggagttactgtgatagacgtgaaggaaaaaggtaaactaaaagtgacgggacaatttgataagtttataatgacgaagaaactgaagaagatatgtgattatgttgacataaccgcggttggaccggagggacaaccggctcaaaatcgcaatccggttaagaaacctgaaccaaaagtgattagggggcgaccttaccctcctcagaaaaaaactccaggcaaaaactcggatgagtgtatcatcctgtga

SEQ ID NO: 178586 - DNA, 366 bp, Arabidopsis thaliana landsberg
atgaccgacgccagtgcttccacgttgtccactgctttacccgcgacgcgggcgctggatcgacgcgacgcgcgcaccctgctgctttccgcactgggcggcgcgctggagttctacgacttcgtggtgttcatattcctggcgctgccgctgagcgagctgttctttccgaaggacaccgcgccctggctggcccaggtgcaggtgtacggcatcttcgccgccggctacctggcgaggccgttgggcggcatcgtgatggcgcacttcggcgaccgctcgggacgcaagcgcatgttcacgctcagcgtgttcctgatggcattgcccacgttggcgatcggcctgttgccgggctatgcgcag

SEQ ID NO: 178587 - DNA, 569 bp, Arabidopsis thaliana landsberg
atggcatctagaaccaagtgagtacttttagtctttcttctactttcattacaagtggatatgatatgattcttgattttgacagttggatctgtttcttgtgatgaattgttgagttgatcattttaatcctaatttgattggaatgtagttgatttagtctagtaaatgtaactgaattgatttgagtctagtaaatgttttgacttttgggaacttagttgatttagtcaggtgaaaagttatgatttttagcaacttaattactcttgttttggtaaaataatgttagatccacaaatttaaaacttttttttattgatgtttagtgtaacattgtcttgattcatgtttaccgtagaactggtttgatggagactcctcgtagtaaaccatcaccaccacctcctagactgagtaaactctctgcttctaaatccgatagcaattcggcttccccggtgccaaatactcgtctttcgcttgaccgttctcctccaaccgttaactcaaagcctactcctgaccgtcgaccttctaggattcctacacccgaggcaagatactga

SEQ ID NO: 178588 - DNA, 506 bp, Arabidopsis thaliana landsberg
atgcgttcttaccaggactttaagatcccagtcgagtggatgcttgactcgggaatgatatgcaaggtattgctttctttcgatgagatttgttttctctctaagtaactaatcggttacactctgtttgtcctctgtttaacattgctgtaattctgtaaatagatcaaaagagcatcgatcaaatttgcgaaaacctacatgaatagagtagcgaatgagctgcaatcagctcgtaacttggatagagagtccactcaagaagcattgcttcttgaaggcgtccgatttgcttacagaacgcaccaggtaatcttaatagttactagcatttactcggatcgaacacggtgcaatcgatgcttgatatgttgatcttttacatgtttattcagtttgcgggagggctcgatccagagactttgtgtgcattagaagagattaagcaacgtgttccgagtcatctccggctggcacggggaaatatggctggaactctgtcgtag

SEQ ID NO: 178589 - DNA, 283 bp, Arabidopsis thaliana landsberg
ggcactggaaatttggcgtaggccactgccctgcttatcattgccaaccgtttatctcccacaacaagagtctctttatgcgtcgcctgctgaccggcatcctcactaccaccctgctgctgctcaacaccctggtgttgatctgcccgctgctggtcttcgccctgctcaaactggtgctgccggggcgtgggcgtgactatgcctcatgggcggtgatgtgggtggccgagacctggtcggagatcgacaaggctatctttgccctgtgcattcctaccca

SEQ ID NO: 178590 - DNA, 191 bp, Arabidopsis thaliana landsberg
ggagaaaacacttacgtgtagaaacgaaaatagaagaaggatgcgaaagcaaaattggtctaagaggaaaatcgaagaggtttactctggagaaattcatcagagagtatgaggagggagagtttcagggagaagaagaagacacactagctagccttcaagcgtttttttatccacttcgtttggtttga

SEQ ID NO: 178591 - DNA, 111 bp, Arabidopsis thaliana landsberg
actagccatcggaaaggaactactttagaatttttttggcgtcgaaaactcctttcactgaacgtgacaacaacagttcgggatgatgatgttgagactatgtttgattaa

SEQ ID NO: 178592 - DNA, 1491 bp, Arabidopsis thaliana landsberg
atgttgtatttacagacttccagatgcacatgaacacataaccaggcctcctcccggtgtcatcttccctaagaaggtaagtgacaccactttgtcttgtctgtgactggtcacctctatggaattttaatggtttagctagtcattgctcaagaagaacttattctgagtgacctctatggataattcgtcttggtagcttaagttggttggtttctcttgtctgttcagactgtggacataggggacttgaaacccccacctgctctgtggcatgaagacaatggaaggagaccgatgcataataatcatgggatgcataataatcacgggatgcataataatcacgggatgcataataatcaggggaggtaataaaatcatcaaaccaaggaaaaatgagtgtttgaattgctaattgatacgagactatggttaggctgattaggccacggttaggacggcctaattaattagctctggcgctatgagtttctttcaatcatgggttttggaagtcttacttttagcattaggtttgatgttactttttacacaatgtattgtggcctaattctctaagagagagttgggttgaagggaagcttttgcttaaatcattcttatcttttacgtttatataaggttcatatcatcttcttctgtttttttccgtaattccttatgtcagctaaagcgggtgttaaaagaccccgaacatcgtatgacgaacagcagcctacagtccatgttacttataagcacttaacgaggttagaaaaaagagtcatgactcaactacatgtaattttaagttgcatgaaatgctcaagcatttctgttattatgtgattcctagctttaccacattgttttaattgttagtgtactgcatctttcagagctagtaagcagaagctggaaagtttattacagcaatggtcagaatggtaggcagaacaaaattccttgtccgaggtatctatgatttgaactcttctgtagtgctttatatagccaatacaataaaccttgtggtttgcaaaagtgaatcaatttcaagttgtgattgaaagaacaattgtagacgaaatttcgcaattctgcaagaaatgataaggacacttgtttgctgactatttcatgttattaactaagctagaaacttttcgtttggaatatgatcaggatcaagaacaagtactagaagctggtgatgagacatactttcctgctttgcgtgtgggattgcagaagacatcatctgtagtgagtgaaactgttctttcaagcatatacaatcttgaaattttcaggtttttcgtaatcctttctgatagatacgttcttacttgtgcagtcattttggtttgactaccaaactggtcacagttcttcgaagaagtctgttccagtggaaagtagcactactcctctttataaccgtggatttacaattggtttagattcaggttcaaataacgtggaagg

SEQ ID NO: 178593 - DNA, 146 bp, Arabidopsis thaliana landsberg
atgagaaaattggctatcaacataacatctgaaaatctgaaacaagcattggaaaaatacgcattcattttcctaactcaagaaaattcagaaggctactaccgagagtgcacagaatattcagtgagactaaagaagcatgtcat

SEQ ID NO: 178594 - DNA, 618 bp, Arabidopsis thaliana landsberg
actttttcagccctcctgatattccgacgagcaaggactctttcccagcgaccgacgactctttttcggtgacttatgaatcttttcaggcgatcgacggtgattatccagggtaagaagatgatactattctatttagcaagtgcaacaggccaaaaatttacttttaagttcaaataagacaaagcaatcaaaatggatataacattaataaacagtgtttcaatatataggcaggaggtttaaaattatataaagaaacatacattaatactattggtgtgaattttcaatttaggacaatcttggcttagtgaattattcgctctctcctctttattgatgatatgtttaccacaggccactcctagagtttaggagaagtaacccttcttgcttgcttttactccaaccttggcctatgtaaaatattctctgtacaggtcagaaaccgagagaaggcatatggaggatgagttaaacaaggaggtagaagaatacctgaagatggttgagcatgaaaagccttctccgaagatgcctatgatgttttctccgaggctgcaactgatatattttcctaccacatctccaacatttaatcagtttctagattaa

SEQ ID NO: 178595 - DNA, 2707 bp, Arabidopsis thaliana landsberg
atgcaggatactttccccaaaccgaaatctaatgatgggaaaaagagtgcgaatggcaaatctggtggtaggggtgctaaaggtggaggtggccctggtgattctgatgtttacaaaattgtaaaggtatgtatattaattatggttgtcctatgttgctgcttgtggcgccgatcacacgtcatacttctgctcttgaagttttactttattgctctgaggtggtaccaagagtgtagtatcaaggcacaagttatatattgactcttatttgttgttgcagatgatcatggagagaaaatttgaaccagtcattatcttcagcttcagtagaagagagtgtgaacagcatgcattgtcaatgtcaaaactcgattttaatacagatgaagagaaagaagttgtggaacaggtgtttaataatgcaatgcagtgcttgaatgaagaggatagatccttacctgccattgaactgatgttgccactgctccaacgtggtattgctgtccatcattctggtcttcttcctgtcatcaaggaattagtggagcttctttttcaggaaggacttgtgaaagcgctttttgccacagaaaccgtaagtgttttggaattagcttgtctttttcagctgttaaacgctcttttgtgctaattaatgattgttcctcaaatgctgctcttgtaacagtttgctatgggtttgaatatgcccgccaaaactgtagtgtttactgctgttaagaagtgggatggtgacagccatcgttacattgggtctggtgaatatatccaggtgggtggtagtttgttgacgtaagtggtgaatttgatgtaatatcacaaaatgatattgtagtaattgtctgtttatattgaatgcttgtagatgagcggcagggctggacgtcgtggaaaggacgagcgtggcatctgcattattatgattgatgaacaggtaattttataagtaatttgattggagataattacatcaattaccggcaaccaactagtaattcccatccaggaagatccgatatatctctactgagtatagttatatgacataggaatatacggcatcctttattattttcaaattatatgcattaaaggatagcatcttttatactgtcttcgaagaggatcctttattatctctactgagtatagttatatgacataggataattttcatttgttcttcaacagatggagatgaatacactcagggacatgatgttgggaaaaccagcccctttgcttagtacttttaggctgagttactacacaattttgaatctattgagtcgtgccgaaggacaatttactgctgagcatgttataaggcactcgttccatcaattccagcatgaaaaggtagctgttggatggtccttttactctctaaattttatctacaaattttttatgctaatttacgctggtgttccaacctcaggctttaccggatattgggaataaggtgtccaaacttgaagaggaagctgccattcttaacgcttctggagaggtgctctcaggaaattataatatgacgtctgtaagattatttgggtctgttctcacttctttaattattcgcaggcggaggttgctgaataccataatctacaatttgacattgctaaacatgaaaagaaacttatgtcagaaataattaggcctgaaagggtgctttgttttcttgatactggtcggctggtaagtatacattaagttcagattcttgatcaaagcctagagatataagtcattgtttccattctgcaacctgcaagtggtagattggtttctttgttattactccttatgttgggaaaaaatatcacgttctaaagctatagtatacttcactctaaatgatttactgattataatctcatataagttctcatctatgatcagagaagaaaagttagtaaccaagctctacaatatgttttcctctctagctatggtcataggttgtacccagatcgttacatgttaatcaccttcgtataatgtttaaaagttgaatgctcatgggttgttccatcatgcttttcctctaggttatgacaaaaaattctttgatggtttgttactttggtcaaaaattaaagctaattatacagtggaaatgtattgtatatttgtatatgactgtaagtatttgaaacaacaggagcttcacagtaactttatgggacaagtgttttatgtgtaggttaaaataagagaaggtggaacggattggggctggggagttgtcgttaatgttgtaaaaaattcttcagttggaactggttccgcctcttcacatggtggcggatatatagtggatactctacttcattgctctactggttttagtgaaaatggcgcaaagccaaagccatgtcctccccgtgctggggaaaagggtgaaatgcatgtggtgagcacattttcattgtcactggacttacatgttattatatttgcatgagtgctggagttttgagaattttgcttttgcgtttttcaggttcctgttcagctacccttaatttctgctttgagcagactaaggatatcagttccttctgatcttcggccagtggaagcaagacagagtatactacttgcattacaggagttgtcaagtcgcttccctctagggttcccaaaactccatccagtcaaggtttctttttaa

SEQ ID NO: 178596 - DNA, 741 bp, Arabidopsis thaliana landsberg
gttgattctattataaagacccccaaaggtaaacaggtaaaagagaacagcaattctttgggccagttgaagaaggtcaaaatactgaacgaaaacctaaaggtacaatcaaatcagtacagcatgtataaaatttagtttatggtcattctgaggtgttgcctgttcttttggtctaaaccaggtattcaaggaaaagaaatcggcgagagagaactttgtttgtggagcctgtggtcaggtataattacttattagactagattttgaatctaaacttacttcgtagagaaaagtgtttaatattatcttcatggccagcatgggcacatgagaaccaataaacactgcccaagatacagggaaaatacagaatcacaacccgaaggcatagatatggataagtctgccggaaaaccgagttcttcagaaccatcaggtctgcccaagctgaaacctattaagaacagcaaagctgcgccaaaaagtgcaatgaaaacttctgtagatgaagctctgaagggagataagttaagttccaaaactgggggtctccctctgaagtttagatatggtatccccgctggagatttgtcagataaacctgtttctgaagctccaggaagttctgagcaagcggtggtgtctgacatacacactgggattaagtccacatctaggatcagcaaactcaagatttcaagtaaggcaaaacctaaagaatcaaagggtgacatctga

SEQ ID NO: 178597 - DNA, 61 bp, Arabidopsis thaliana landsberg
atgacagtaccatgcatataccaaccaccctacgatcaaacagcaaggctaaaacataact

SEQ ID NO: 178598 - DNA, 371 bp, Arabidopsis thaliana landsberg
gtgctggtcttcctatggatcagaatcagtatgagccgattcagccctatatccctactgcttttagtgataatattcaataccaagctcctgtggattttaatcatcagatccaacatggaatctatgataatttcagtttggatccaaatcatcagtatccgtttcaagatgatccattcatggagatgttgatggaatatccttatgaacaagtgggttatgctggagagcatgcacacatccctttcatgaacggaaaccactacaactaccaccaaccaccacccgttggtcttactaccaccggtcacatgccttccaacaacgccaccaccaccaccaccaccaccaacaccaccgatgtgtga

SEQ ID NO: 178599 - DNA, 94 bp, Arabidopsis thaliana landsberg
gttaggcctaaagctctttgtacaggcccaaagcccatctctaacttttggacagaagaatccaacaagagagaaacatttctttggcagttga

SEQ ID NO: 178600 - DNA, 329 bp, Arabidopsis thaliana landsberg
gccatattaccggggagcagcagttctttgacctgaaaccccgtatagagaagctggtggaaatacagaaaaaagcagtgaaccagttcctgaatgatgcgcggaaaaaaattgccgagggtaatgatgatcccaaagacggcggactggcgcttttccgagcgcaccgcggtttaccgaagaacagcgcactgatcaagttcctgagtgaaccgggcatgcgtgtgaatctgcagaaaacagagaaccattacctcgccgaccagcagaaggaaatgcataaagctgatgaagaactctatttctacatcgatgaaaaaaataattca

SEQ ID NO: 178601 - DNA, 144 bp, Arabidopsis thaliana landsberg
agaccattccttttcactctccctcataatgacgatgttcaagctattggagcctcacctcttattgatatcgaacattcgatcgtgttcttcaacttttgtcttcgtcgtctggttcgatttggtatagaagttgacccttga

SEQ ID NO: 178602 - DNA, 1309 bp, Arabidopsis thaliana landsberg
atggattttgcgttgaaaaatgcgaccagcctgttggaaaaagcattcaatactgctcacaggctcgagctggaacaatctatactgaagaaagagatggaagctgctaagataaaagccgtcgagtctgctgagagctttagagaagcaaaagagagaggggaaagatcactgaaggatattcactcgtgggaagggcaaaaaattatgctgcaggaagagctcaagggtcaaagggaaaaggtgacagtgctacagaaagaagttaccaaagcaaaaaatcgccagaatcaaatcgaggttagccacttttgtagacatacgttaggtcttcttgtcttatgacgattatcgataggtacccgcaattcaccatatgtctcatctgctaacgtcccttcctttcatattcgtatctctggtaacgattttattcttttggatacatatatatcaccttgtacattgctatatctaaggaatgcgataaagtaaaggaagaaaaaatgtcagtatcaggtgtttttagtctactgcatccttctgctttaaagtagctctagaaatgaagtgtagtaatatcaagagtgttgttgattgcaattgatgttttttatctatctaggtttggtcgatgttgtatcaggtgtttttagtctactgcatccttctgctttaaagtagctctagaactgaagtgtagtaatatcaagagtgttgttaattgcaattgatgttttttgtatctatctaggtttggtcgatgttgtaagtttgagaaagggttgtttttagttataggagttgatgaagacatctaacgaaaattcctctgcaggctgctttgaagcaagaaagaacagccaaagggaaactcagtgctcaggcttcattgataaggaaagaaacaaaggaacttgaagcgcttggaaaagtggaagaagagcggatcaaagggaaagcagaaaccgacgtgaaatattacatagataacatcaagagacttgaaagagagatctcagagctgaaacttaaatcagactactcgagaatcattgcactgaagaaaggcagcagtgagtcaaaggcaacaaaaagagagagtcttgggatgccgaaagtgaaaagagaaagagaatgtgtgatgtgtttatctgaagagatgagtgtgattttcttgccttgtgctcaccaagttctttgctttaaatgcaatcagcttcacgagaaagaaggaatgatggattgtccgtcttgtcgtggaacaatccataggaggattcaagctcgtttcgctcgctccgggtga

SEQ ID NO: 178603 - DNA, 228 bp, Arabidopsis thaliana landsberg
ctacataaatcatattcaagggttagagagtgcacggacaacctgaaagactgtgaacaagaactccaggttagtttctaaattttcttattctagtgattgtcattgcataaagattaggcctaatcgaaacaagtgtctattcttttctcgcagttgcttgttaattcagcagctagagaaggcgtggcaggtgctgatgaaggattgggacacgggtatccgtaa

SEQ ID NO: 178604 - DNA, 3672 bp, Arabidopsis thaliana landsberg
atgacagctcctttaaaggcactatatagagggaagattgggatgatcataaagtgaggatatttttggatattttagttttgggtttggttttgatttttctttgttggacccaaaagcctttacattttaaggcttatttccatctattactgtcaaattgacaaataaaatatgtaattggtgtgaaaaaaaaaaattatgtaacttttttttttgtacattaaaaattatctaacttttaatgtatatacactataacaattaatatcatgttaaaaaaaaggtcaaaaagttcttggctagtaaaaactaaaaagataagtttaatccactctgaatttgactcgaattccagtttataaaatataaagactctgaaaaaaaaaatccaatttcaactgaataattatttatttagttattcagattaggacactccatatattatctgaaccgtatcacagaaaatatacaaaaagaataaagaaaataaagtttaagaaaatccaaaccaaataaaaaaggagaattaaaaaaaatggaaaagaagaaagaccctaaaaaaggctttaaaaatcttaagagtcaccgatccaattcctttcttcactgcaatttttgtgatttacaacatatattaattcttgcctcctccttcactccagctccaaacacaaatctccgacgaaaaacttctctcaagctttctcttttctaatggcgacacctactcaggaagctattgacaccttcatgaccatcaccggctcttccaatgccgtcgccgttcgtaagctcgaggtgattcaattacacttccctgggttttttccgtcttccttctattgtttagatgttattttgtttttgattgaagtatttttggaagtttctcgaatcgctcaagtggttgttcgttggatcatcgaattatatctcctctacgcttttgttatatcgttgttaagctcatcttgatgcgtttaggtcgcaattggagttaattgtgttgaattttagtttatccgattatctgattgagtttttatgtggacttcttacagaattctcatgcttattggttttgttaattgttcattgatatctaaacgagtttatacctgctcattgtgaaattagttgtgaaaagttttgttcttttttggattttggtctggatttttggtattttagagatattcatgtggggtttaagttagttattgaagtcaatgaaaaattttttcagaactcatcttgtgtacaattttagtttgggtttagagaactttttattgtgtcctttgtgcattcttatcttttagtcatcattctattgtctcagcatcattataacttgtaagttttttttttgtgtgtggctggtgttcctcgtgtttgccaaaacttacatgctatcattattgcaggagtatcgtgggaatctcaatagagctgtgaatgcatactttactcatggagatcaaaattcatatgatgcaatggatatagatgatggtgtgactccagtcctctctgaagctagaacaacggacccgttcccgcttcgtgatccaaactttgggagaagtctatttgataatgatcctcttatgtcgcgtcccccatttgttagtcatccaagggaggccagggagatacctatagaggttaaagacagcaatgggccatcaggtcaatctaatgatgctcctactattgaggatgtgaccgagacagctcaagctcacggtccagctgcccaagaggcggtcattatagatgaagtaagtgatgatgataatcagtctgctccaaccggacaaagtaggcatgctgtacctgttggttctgcagaaaataatatgcaacattacaatgatatagaagaacaaatgattcgagctgctattgaggcctccaaaatggagactggtgatgacgtaacaaaatctgtcacagtgcagtcagctgagcgagaagtgttgcgcagtgaaggttggaaggcttcatcctcagaaagagaagcttctgaaatggtttctattccagtacagcagggttcccgagcctcaaatggaaggttagtttgttctgttttgtagtctatcagtttgtcttctgtgtttcctagacaatgtcccaagaaattgtttttatatgtgtagatttgcagcacctagctcactgtctgaggatgatgatgatgatgatgacgatgaccctgattatgttgaggaggaagaggaaccccttgttagccacagaccaagacgtgcggtttctggatctcggagctcacttaatgatgatcttccccggagccctgaagcagaagatgcaactattcattcaccgggtgctggcaatggttttccttctgaggtagcaaaagatatatgtttgtttcctatatgagaacgatcagattacctgtataattgtattacttttaagtaggtatcctagagtagttattccattcctgagctaatactcttattacattctggtataagtggggaggcatttcttctgaggaacatgatgaagctatcatgctagaggctgccatgtttggtggcatttctgagaatgaatatggtgttccttatgcacattatccgcaaaggacacagcgtccaccctcaccttcgctgacagctcagaggttgatacgggaacagcaggttaggaacattttttgtttctttcctccccaagttgattggagaatactctttattgatctatccttgtgacaagaatagaagtaatgggtagagagtttcaccccctttaggtcatcgaaggatactgatgatgatgagtttttattcttgttgaaatgtaaactcgtgcaggatgatgagtatcttgcatcgctggaagctgacagggtaaaagctgaggctcgtcgattggaggaagaagctgctagagtggaagctattgaagaagcaaagagaaaggaggaagaagctcgcaggaaggtcgaagaggaacaggtgtgcttctggttatacatgagtcactctaatcccgtgtgtgaactagttaggactagcatcgctactaggtttaaagtatcatagatactaagctgtatgcagtacttggatgagtttcctcaaattcttgaaagttatctcgcgtgtaagccaatttatttttcttactaggagctggagaggcaattagtttcaaaggaagcatctctgcctcaagagccaccagccggggaagagaacgccattacacttcaagtcaggctgccagatggcacccgtcatggccgccggttccttaaatccaacaaactccaagtaaatatcccaaaaccagcttcaattatcctcaaatatatgaaaaactttaataaccactaatcatgtcttcttcttatttgcagtcacttttcgactttatagacatctgtagagttgtgaagcccaacacttataggctggtaagtggtttatgccataaaatgctaaataaaaattttcatttgagacatcttttagttgatttgataaactcttgtgtgatcaaaaacaggtaaggccatatcctcggcgtgcttttggagatggagaatgctcatcgactctaaacgatatcggtttaacgagcaaacaagaagcattgttcttggagctgatctag

SEQ ID NO: 178605 - DNA, 172 bp, Arabidopsis thaliana landsberg
gtcccaaatccgagctccatgtgcgctgatcaaggggcttccggacagagatgaagaaatcgcgatgtcattcatcaaagctcttgcggttcagcaccagaagcattcgttagaaaagaagaaactccagaataagatcaatcaaatgctacgaagggtcaccgtgatatag

SEQ ID NO: 178606 - DNA, 548 bp, Arabidopsis thaliana landsberg
atgttgacgattacatctctgattactatttggcatctaaaaatagagacacttaccatagatgattggaacctgttaatgaatccaagttctgggaggagactggagaatcacgcatttatggaccgccttacaaacgccctcctgggagacctccaggtaaggcaaggatcaaaggtacaaatgaatcaccaacaaagaataagaacaaggttagtaggaaaggaagagtaccacattgtagtttatgtggtgaaccgggccataattcaagaaaatgtcctcatgagataaagatttgtctgactcttgataaacaaggttactatgtgctttatatcttgagcttaattatgtctctatttaggtggtagtctaaggagagcaggaccaagagaagaaaacttactatggaatcacggacgacgactctattagaagctcaagatgaagcagaaatggaagcaacaatgattgctatagaggaatccaagtacaacctcgaaaaacccctcttctatccctttcccatccctaaacgttcatga

SEQ ID NO: 178607 - DNA, 1034 bp, Arabidopsis thaliana landsberg
aaaagttctacaaagagaagaagaatatctgtagaagaagaagaagaagaagacgagaataaaacgaagttgagttcttgggagaaggttttgagtagcgatgagattttgaggttaagggaagtttcaagacgaaagtatttgacggatcgagagaataagaaggtggaggagttaagggatgagatcaaagacgagattatgttgaatgatggtgtgaagatgattaagaaggaagtaattgagtttagatataagagagcattgtatgagttggtgaagaaaacagaggatgatgatgatgttgaagggtataggtttccagatgcttatgatcaagaagggtgtattgatcagaagaagaggtttgatgttgccaaggagaggtattgtgagcgaagaaggagcgggagagttgttacggagcaagaagcttgggaggatcatcaggctcagaaagcgagagtgaggtttggtgcaaaggataagaagcaagttgttgatgggtatgagtttgtgtttgatgatttgacaggctttgttgaggagtctagcgaggcggaaactgggaaacatcgaggttgttattcgaagactgctgcagagaaggctcgggaggggagggagtttcttccgattcatgggtacagggaggaactgctgaaacttattgaagagaatcaggttcttgtcattgttggagagacaggatcgggtaaaactacgcagataccgcagtatcttcaagaagccggttacacaaagcgtggaaagatcggttgtactcagcctcggagagttgctgcaatgagcgttgcttcccgagtggctcaagaggttggtgttaaacttggacatgaggttggatattccattagatttgaagactgtacttcagagaaaacagttatcaagtacatgactgatgggatgctgctacgagagctactcatagaaccgaaactcgatagctatagtgtcatcattattgatgaggcgaacgaaagaacactgtccactgatattttgtttgc

SEQ ID NO: 178608 - DNA, 99 bp, Arabidopsis thaliana landsberg
atgacgcttcacgtgatcattcatgaaaaccgagacctttgtagtatggttttctgcattgacatgaatctggcagatagtcgtggtcgactatatatg

SEQ ID NO: 178609 - DNA, 398 bp, Arabidopsis thaliana landsberg
tcgctggacggcaaggcgcgcgagattgccggcggcagcaagttcgaagtgagccagccgcagctcagcgccgacggcaagtggttctacctgctggccaacaaggtggcgccgtacagctacgacgtctatcgcgtgccttccgacggcggcacgctggctcgcctcacgcaataccagggcgtggacggtttcgccctgtcgcccaacggccagcagttggccgtgttgcattcggcgccgtacatgttcgaccagctggccgtgcagaacgcggccggcggcacgccgcgcgaactgaccaacaccatgaagcccggcttcaccgcgcgccactggatcgaaccgaagttcgtcgaggtgccgtcctcgcatggtgccggcgagatctacgccaa

SEQ ID NO: 178610 - DNA, 459 bp, Arabidopsis thaliana landsberg
ctaacagactttgggctttcaaagattggtcttataaacaacacaattgatttatctggtcatgagtcagatgtatccccaagaacaaatcctcatcattttcagaagaaccaagaagaagaaagaattcggcattcggctgttgggacacctgactacttggcaccagagattcttcttggaactgaacacggtttggatacaacctttaaatcaggctttcatgaagcaccagtaaattgtatttaccttattggtgttgcttgcaggttatgctgcggattggtggtctgttggaattgtcttgtttgaattattaactggaattccaccttttaccgcagcccgcccagaggtgcgtacatattaaaatttacttctggactttcaagcatggtttttcctgtctagaatctaggtctgaagctgtcaacaagttttgaagctattaaagcttag

SEQ ID NO: 178611 - DNA, 138 bp, Arabidopsis thaliana landsberg
atgggacttaaaggatatagcgtcggagaaggaggaggagagatagttgaggttcaaggcggtcacataatccgagccactggacgcaaagaccgtcatagcaaagtgttcacatcaaagggtccacgtgaccggcgc

SEQ ID NO: 178612 - DNA, 247 bp, Arabidopsis thaliana landsberg
atggaagcgaagcaggctgaagcacgctgggagaagatgatgttggccatcgagaagctgacaggaaaggttgatgccatggaggaagagaggacgctgtttcgcaagcaaatggaggagaccgggaaggctgtttctcttcttcgggtggaagccatggcaagggatatggatcgttatgggaatgaagaagcaggagaaagagacagcagaaattctcagaacagaggagaaagaatgtacagag

SEQ ID NO: 178613 - DNA, 262 bp, Arabidopsis thaliana landsberg
caataccctaacgcatatattttccgttttaaaaccagaaaactatgagactgacaccaaaaaaaaacgtaaactcagattcggcggaaagattccccgatcagaacacgtaagccacggaggttaatttcgtacatttcagttagttctcaaaccaccggagaaactgtttgatgggccgacaatagttggagtctccgccgaattcgattattatttaattcagtccgtctccaaatgggcttttcaattgggcttctga

SEQ ID NO: 178614 - DNA, 262 bp, Arabidopsis thaliana landsberg
gcttttaccgtaaggacaacacgacaatcagcgtatgcttgacgagttagatctgatcgatgaacggatagattcggctctagtgcgaatacaaaattaccagaatgaaacggctcgatactacaattcaaatgtccggcaacggaaatttcatgaaggagatcgggttctccgcaaagtatttcaaaatactgccgagccaaacgctgggaagcttggggcaaactgggaaggactgtacttaatctctaaagttgtctga

SEQ ID NO: 178615 - DNA, 155 bp, Arabidopsis thaliana landsberg
atgctcaaaaaacaagccggaaaagatgcagtcttaagtggtaaaccaccacaaacgccatcaccaacacatccgatgagttttgaactgaaaagaaaaacgacaccaaaagcaaccgtgatagatcctaatatacaaaccggacagcgccggag

SEQ ID NO: 178616 - DNA, 269 bp, Arabidopsis thaliana landsberg
atggcctatcgatccgcagtgctcttgcccgccctcctactggccgtcgccgtcgcctcggcctccgccgccgccggggacgggaggtggcgggaggagcaggcgcgggaccgggtgccgcgggtgccggggcaggccttcaacaccagcttcgcgcagtacgccgggtacgtgaccgtcagcgagcagcgcgcgctgcgctcttctactggttctttgaggccgagaaggacccggggtcaagcccctcgtgctctggctcaacggag

SEQ ID NO: 178617 - DNA, 1942 bp, Arabidopsis thaliana landsberg
atgtggtcgaaattgacggcggatccttctactagagggttattgaaacagcctgattttgttaatatgatgaaggagattcagaggaaccctagtaatcttaatctttatttgcaagatcagagagttatgcaagctcttggagttttgttgaatattcaaatcaggactcaacaggctggtgatgatatggagattggtgaggaagagatggctgtgccttctaggaaggagcctgaggtagagaagaaacgaaaacctgagcctgagcctgagccggagtttggagaagagaagcagaagaagcttaaagctcagaaggagaaagagttggggaatgctgcgtataagaagaaggacttcgaaactgcaatccagcattactctacagctatggagattgatgatgaagatatctcttatatcactaatcgtgctgctgttcatctagagatgggaaaggtatagttttcaaagtgttcttttttttttgtgtgctagtctaaagtgatttgctttggttaggttatgagtcttaatgtctatgtgttttgttttagtatgatgagtgtatcaaggattgtgataaggctgttgaaaggggtagagagcttaggtctgattacaagatggtggctaaagctttgactaggaaaggaactgctttagggaagatggctaaagtctcgaaagactatgaacctgtgattcagacttaccagaaagctcttacggagcatcgtaaccctgaaacattgaagagactgaatgaggcagagagagcaaagaaagagttggagcagcaagagtactatgatcctaatatcggtgatgaggagcgtgagaaaggtatatactttgcaattgtatgtgctgtttatgcgaggaaagaatctcttagaattcagtaaatatagctgaactaacatctttgtaacacaggtaatgacttttttaaggagcaaaagtatcctgatgctgtgagacattacactgaagcgatcaagaggaatccaaaagacccgagagtaaggcggattcatcatcatatatgcttcaatgttgtgctcaaaaagagttccgtatttgactgttttaataacttgtttacttttttgctcgtcacataggcatatagcaaccgggctgcatgttacactaaactgggggcaatgcccgaaggattaaaagatgcagagaaatgtatcgagctcgatccaacattcttaaagggatacagtagaaaaggtgcagtccagttcttcatgaaggagtatgacaatgcaatggaaacgtaccagaagggtctcgaacatgatcctaataaccaggaacttcttgatggtgttaaaaggtatttatataaataggtgttaagtcacggggagattattcgcttctgttatctagtaatgtcaatatgcttatgtaacatgttttaaaccatgcagatgtgtacaacagataaacaaggcaaaccgtggcgaccttactcctgaggaattgaaagaaagacaggttagattctattactgctttgaaactgctttgttacgggtttaagagaaacctgtgatcttaaactaaaacttttgggatttgctttcgtccttattgcaggctaagggaatgcaagacccagaaattcagaacattctcacagatcctgtaatgagacaggtaaagaacacacttctatagatgatgttagaattcacaaatctctctatgtttagatcaaacatctcggagcaatcctggaaactgaaattgagctatctccatgttgatatgtctcaccaaaatctaacacttgttctttggacaggtactgtctgatctccaggagaatccagcagcagcacaaaagcacatgcagaacccaatgatcatgaacaaaatccaaaagcttatcagctcaggaatcgtccagatgaaataa

SEQ ID NO: 178618 - DNA, 330 bp, Arabidopsis thaliana landsberg
ggccagcgggcggtcgtgctgaaggatcgcggcgaccgcgacggcctggacagcgtgatgcccagcctgcaggcggccgtggcggacattcccggcgtggcgctgtatctcaagccggtgcaggacgtgacgctggacagccgcgtctcctccaccgagtaccagtactcgctgtccgacgtgaacgccaaggagctttccggctacgccgagcagatgacgcaggccctgcgccagcgtcccgagctggccgatgtggacaacaacttggccgactccggcaacgcgctcaagctcaccatcgaccgcgacaaggccagccgtctcggc

SEQ ID NO: 178619 - DNA, 390 bp, Arabidopsis thaliana landsberg
acttttctctccggaggcggcttgtgaagtgatcgaagcagaaagacattcccatgttttctatgaggctgaacctgatatctggatggttatggtaaggcattgtcttacttttcttttgttatagcacaatgttttctatgaatgatgcatcctatggtgtcttagcaatgtaaataaacaagatctgatctatacattggcaggttgtggagaaaaataaggagacaggagcgatatggaggatcgatgcattaaggagggtgcttaaagaagtgcactcactctttgtgatgtttcacgggtcaattagggcattaatcgaaaaagaaccaacaggagggcttacccgatcactattgtacccgttcatcacagattatttaagca

SEQ ID NO: 178620 - DNA, 153 bp, Arabidopsis thaliana landsberg
acgtttgtttctctctgtaaggcgatgaatcgcgaaaaattatacggagctgacaacgacgatgatgacgatataggtgaaggcctcgaagatttaagactccgagaccaattccggttcagttggagtaatgtcgtcagattcggagagtga

SEQ ID NO: 178621 - DNA, 1450 bp, Arabidopsis thaliana landsberg
ccatttccttgttacaacaagccttgcaaagctcttaccggcgctaatgttaagccggaaaaaaaccctttcgtccgttatgggttttgtcaccggagatgtcttccaccaaggcttcttcaaaagcctttaccggaaaataagctcgccggaagaacctcggtcatggtgaagaatatacctaactgtctcgggttagattttttatctcttctcaacttttttataattttgtttttgggatggatgaattaaaataagagtttgtaagaatttgcagacgaatggatctcttgaggattttggacaatcattgtcggaaacacaacaaaaaatcttcctacgactttctttatctgcctatggattttgggtgagttaatgtttatttttctctatttttggatgaaattaaatgcttcttgcaatagcggtgatgatggacatttaatgtgtaacaggaaacgagccaatttgggttacgccttcgttaacttcacgagctctctcgcagcggagagattccggagagaatttgaaaacttctcttgggacaatatcgggttcaggaagaagatttgcgaaattactgttgctaagtatcaggtttgtgttcttttgattctttggctagtcattgttgttgttatttagagttaatctttgtttctggtctattttgttgcaagactctcttttatctttggttcattatctgttgttgctcatttagggttttattgtgcaatttggtgtttgagtctcttcttgttttggactctcaatttcttgctctttttttatttttctttgtataatttctcaaattttgttttcgtctcttattttttttttgctaaggctctctttaattcttgtataggtaactgttattgcttacttagagttgttaaattgtgcaattttgggtttgagagtctcttcttgttttgcttgttaaagactctttatattcttggtttgtaattgttttgtccttctttttatatgatttagagttgagtagtgcaattttgtgtttgagtctctatatccttgttttgtttgagaaagactcttttattgttggtttagtaactgttgttgcttatattagaattatgaaattgtgcgatttgttaaattttgggccttcttgttgtagttcttggttttgtaatggatgttgcttatttagagtcgaactcttttttcttcatttgatatgacttagagttaaattgtacaattttgtgtttgacttttgtgataggggaaagaagagctgagtcgacgtttcaagaactcaaggtttacttgccacaccgacgattatctcccggtggttctctcgcccccgagcaacggcttcacggcttacactctcacaacacttggttaccgagtcggcgtacttggtggtggttcacgtcttgcttcattgcgttaa

SEQ ID NO: 178622 - DNA, 101 bp, Arabidopsis thaliana landsberg
taataccatatcaacatatacgagaaaacttttcggatttttcaatgaaccttgaggacaaggttttttccagcgatagagctagtattgatgacccataa

SEQ ID NO: 178623 - DNA, 111 bp, Arabidopsis thaliana landsberg
atgatctgcttaaactctgggggtaatgccgacagacctgtgggggttatagggactctgagtgatgcacctcttgcggacgtgaacgaccgttcccacgaaaaggatgaa

SEQ ID NO: 178624 - DNA, 85 bp, Arabidopsis thaliana landsberg
agggatacaactggtctaactgctgactatagggagctcaagcttcggctgcagtccatggaagagcaggctaaactgcgcgacg

SEQ ID NO: 178625 - DNA, 260 bp, Arabidopsis thaliana landsberg
atggccgacctcatgtattcggaccaggccgtgctccaggatcgcctcaatcgccgccaggtgcggctcggcttcttcgccggcacgatccaagttcggcctctggaccttcaccgagactttccgtgcgctccgctactcgatcggctggatcggcgaaaaggaattcgcctcgcagccggacgcaccgattcaggtcaaggccaacggcgcgaccattccgggcgccaatgccgaacttccggcggcactgacgggag

SEQ ID NO: 178626 - DNA, 792 bp, Arabidopsis thaliana landsberg
atgtttgcttgcagtgcttgtcgcagacatagtacgggtttcgtgtacagttgcaacgtagaattttgtgactttcaggtagatgtcaagtgtgctttccttcctgatacatcagtccatgagagccatccaaatcaccccatctacatcaatttgaccaaaggagcatgcatgggttgtagtaatgcgtgttcaagaaagtacttagagtgtgtgatctgcgactcctttttgggagttgaatgtgctactttgccaagtgtagcacactacaagcacgatagccatccactcacactttgctatggagaaaaaggaacaacaagtggtcaatactggtgtgagatttgtgaatcaaaactagatgcgagcgagtggttctatacatgtgactcttgtagagtcactctccatctgaaatgtttattgggaaatgacatgtacattaaaccccaacattttgtcggaaaagaaggagagattgaaattgctcttaacgatggtaacactcgaccgttttgctctgtatgtcatgtacgttgtacggacatttcggtattcaagtaccaagataatgtttactgtgatttgggttgtgttagaaaagttaagatctatgagagcagaggaagtgaactcttcagcagccaaacagcacagctcaagtccctcaagtgagcttcaacagtcaaacaccacccctcaaggcctcaagtgaacttcatcactcttttatcactagactaatacgacttctcgatagagcccgtaagctaaaggacagtcaacgtg

SEQ ID NO: 178627 - DNA, 157 bp, Arabidopsis thaliana landsberg
atgggactacttcaagaaacaaatgcaagatatgcttagacacaatgatgcaaagggagtcgaattaaggaaacccgctgcatcactctacacgttccccatgcccgactgcatgtgtaaagaacccgatccggaacctgaaaccgatccagcttaa

SEQ ID NO: 178628 - DNA, 143 bp, Arabidopsis thaliana landsberg
cgaccaacgtggatcgcatcttcaccaccatcggcgagcgccacggccggctgaacatcctgttcgccaacaccggtggcggcgagttcgcgccgctgggtgcgatcaccgaggcgcagttcgacaagtacttcgacatcagc

SEQ ID NO: 178629 - DNA, 32 bp, Arabidopsis thaliana landsberg
atgaacggtccagtcccctccagccgctcctg

SEQ ID NO: 178630 - DNA, 386 bp, Arabidopsis thaliana landsberg
atggacacggtttgcgtccttaacgacatgatctacaacgccaacccggtgattatcatcatatttctccccttatttgacagcttcctatacccatggttgcgccgacgaggcattatcctcaacgcggtgacacggatctcgctcggtttcgttctagaggccctcgccatggcctacgccgccatcgtgcagaagctaatttatgcccaagggccctgctacgaatttcccctacaatgcgcagcctcacagggtggcgccattccgaatcacatcagcgtggctgtacagatccctgtctacgtgttggaagcgttctccgagatcttcgcgaccccggcaggatacgagatggccttcctcctgtcacctaagagcatgaa

SEQ ID NO: 178631 - DNA, 227 bp, Arabidopsis thaliana landsberg
atgaagtttatgaaacttggaaccaaacctgattcatttcagtctaaaggagacaatgttaggtttgtagaaaacaaatatttacctctatgtatttctctgattatgcttaagcaatgttttttctaaaactgatattatttttattggctcttaggtatgtaacaaatgagttagaaacagagatcatcatcatcatcggcaatgtcaagctctatctgcataag

SEQ ID NO: 178632 - DNA, 1196 bp, Arabidopsis thaliana landsberg
  unsure (1)..(1196): unsure at all n locations
atgggtgtactcacgaacaaagtcgagagagacgagcttaaacctggtgatcacatctacacttatcgagccgtcttcgcttattctcaccacggtaccttcgatttcttccttttgatttcatcatcaannnnnnnnnnnnnnnnnnnnnnnnnnnnttttcctcaatttggatcttctttgtgtaaattttagggtttatgttacctctttccattgcagagatgaagaaacaaaccgtcatttggtttcttattgggttattgtgtcaaaaactctgttttgttattaggtctttttccctcatgccaaagtttttgactttattgaaacggatcttcaaaaagtctcatcttttgttttctctggattcaatcgtactgatgatgacttgtccttctatagtcaatggtggtagcaaatagattttgattgcttttgttgacatttcaactgaagaaagcattttgttttcttctaaattttccacatttgtaggcgtatttgttggtggttgcaaagtggttcatttcaaacctgagcacagcttgatatctcctacactcgcttcttcttcttcttcttcgtcttcttcagtttcagaggttaatgattcttcagaagctccttgtcctacatatcctgactgtggatataaacgaccaaagagtggagtagtactttcttgcctagactgctttctcaagaaaggttctctctaccgttttgattatggagtcagctcatcgattttcctcaccagattccgcggtggcacgtgcacaactgctccatctgacccgcttcaaacagtcatccatagagcaatgcaccttctccaaaacggatttggtaactacaatgtcttccagaataactgcgaagattttgctctctactgcaagacaggattgctcattctggataagaacggggttgggagaagtggtcaagccagttctatcataggtgctcctctagctgcactactctcgtcacctctcacattgttgattccaaatcctgttggtgtagcaactgtcactgctgggatgtattgtatgagtaggtatgctactgatatcggtgttagaaacgatgtgatcaaggttcctgttgaggatttagctctgaaccttggccttaaacctctcaagagaaaaaggaaagcttgtgacaccagcatttccaggtga

SEQ ID NO: 178633 - DNA, 484 bp, Arabidopsis thaliana landsberg
gacccggaactgctggcgctgctgcgcgaggaactgccgctgcagttcgccgaactgcagaacgcgatcgagagcggcaaactggaagcggcgcgcgacgccgcgcacacgctgcgcggcaccgccgcgttctatcacctcgcgcaactgcggcagaccaccaccgccgtcgaggactggctgcgcgatgccgatgcgattcagcccggcccgagcacgcgccgcgccttgtccggcgtgcgcaacgcgctcgacgatgcgctggcggcgatgcgtgacacctgaaccgcgcgttcagcgcacgccgcgttcgaggatcacgtaggcgctgacgaaaccgccgtcgtcgctgagcgagacatgcgccgcaccgatccactcgcgcttcattcgtacctgcatcttgcggtcgaacaccagcaccggccggccgcccgcttcacggacgacgccgacttccttccagccgataccgtcgaaaccg

SEQ ID NO: 178634 - DNA, 102 bp, Arabidopsis thaliana landsberg
gaacgacttttgaacttcttcgccttatatttcgatggtatttggctctgcattccctttggaacgacttttgagcagaaaacttacgatgcgctcctttag

SEQ ID NO: 178635 - DNA, 72 bp, Arabidopsis thaliana landsberg
atggtcttaacttggaagtttctcgcagctgacaaaggcgcagcgaagggcacctcttctatcattcgcaag

SEQ ID NO: 178636 - DNA, 283 bp, Arabidopsis thaliana landsberg
atgcgccatcgggccgattacgcgccagacttcgtggtgtcaattcacacgccattgcatgtgatggattttgatggccccaaactcaataaaaaagtccgctacggactacctgccgtgtataagcctgggtaattttccgggcagcctggaccgctacatgtgggtggagcgccacactccggtactgaccaccgaactcaaaaaacagcctgcccgcgaacgaaagcgtgtttgagcagttgcagaatctgatcggcacgctcacgcaggccgacctcaa

SEQ ID NO: 178637 - DNA, 144 bp, Arabidopsis thaliana landsberg
attatggaagtggatcctgatcatgatcgtaaaagaagtgcttgtgcaagggctcgtgaatggattattgaccgaggtggtgctacctatacaccattggttgaaaaagcttgcctttcggaatgtcataaaattatcagctaa

SEQ ID NO: 178638 - DNA, 770 bp, Arabidopsis thaliana landsberg
atggctgcttcaaccgagttacttaacggaggcagaaaatctcaggtattgcttccttctccttctctttatcttcttccttcattagtttctattttctgacgagtttttgttatgttcatgggtttcagaaaacagtcgtgagcagatgcatcaggaggtggcgacggtgagagatcgaccggggaagaaagagcgagatccggaatcgttcaatcggagtaagaggagaagaagcgagaggttcgcgccgaggaacgagagagatgtggaagaagatagctcggatgagagtcaaggagacgacgattatcatcagaggaagagttcttcgtcgggtcgaatccccaggcatgcggcgtctttgatggtcgccgatgaaatgatcggcgtacctgtcccgagaaaggctcgctcaggtttgagttcagttgattctttctgttttataactcgcattttcgagatctctttatcaccggattattctgtttctggcggttgcagcatgtttaaagaggtcgcatgactgccggacttcgtcgggaagccatagctgcgaagtcgtttcaccgtcttcttcaactctttccgtcaaagagagaaaggtgggtccattcacttcttcatcatcaacatagaaatgatttccgtctaatatcattttgttccgatttgcccagattgtaaacggatccaaatcccggatacccaaaccaccgaaatcctccggcacggttgaggacgacttggagatcgaaatagcagag

SEQ ID NO: 178639 - DNA, 130 bp, Arabidopsis thaliana landsberg
cctccaccgtgcacaccaacaccacccgttgcctcaccaccaatggcaactcctcccactcaaatgcctcctatcgcaacacctcccatcgccaaatcgcccgtcgcaacgccgcctattgcaaccccac

SEQ ID NO: 178640 - DNA, 1249 bp, Arabidopsis thaliana landsberg
aaggaggagaaaaagaaacgaaattcgccggagaacaaagcagttgagttgccaaatcaagtaaatggagtgcaggcaccagcagttacgaactccgaagatggtgattcatatagtgactcagagtcgtctgagagtggagataagagaggttcagatcttgaaattgaggctcctcttgttccaccagtggatttacctccttcatcagggacaattggtatcccagaggaggctgtggcacatctcttatctgtatatgggttcttaaggtcatttagttttcagctttatatctgcccatttgaactcaatgattttgtgggagcgttgtatttctcgggaccaaattctttgttggatgctgttcatgtggccttgttgcgggcattgaagggtcatctagagagactttcctactccaagtctgtcctagcctcaaaatgcttgaggtaagtgcagataaattttattttggaagtttctgttttgctttccggatgttcacaccatatgttctcatttcttgagccttttctggtttcatagtgtataaatcatattacgaactagcagattaggtcattgggttaggtttctgaactacatgaattctagttaatgcaaaatttgtcttctgccagtgaaaatggtcgaaagagcttattttaggatggtttacctctttagctgagaggacttcacagattttgttgctttgctatctgcaggtgcattgattggagcttgctcgatgtgctaacttggcctgtttatttggttcagtactttactgccatggggcatgctagtgggcctcagtggaacatttttaacaaatttgttgtggaaatagaatactactcgttacccattgggatgaaattgaagattctacaaattctctgtgatgacatctttgatgtagctgatctaagagatgaaatagatgctcgcgaagaatctgaaattggatttgatcctgatagagttgccacaggtcttcttgaaaatgtacctagacgggtccaccccagattcgctaaaacctcagcttacaaggaaaaagaggttactgatagctcaacaaacgagtctaaagatttggactcaagatgtactaatggcggttcaaatgaagttagctcagatctagatggaaacagtgatgaatgtaggatttgtggaatggatggaaccttgctttgttgtgatggatgtcctttagcataccactcaagatgcattg

SEQ ID NO: 178641 - DNA, 149 bp, Arabidopsis thaliana landsberg
atggctcatctgaataagattataccaggtctacaaatccgctacctggtagaaatccaaatttcctatcttactctgggaaatactacaagtaccccgatgtccaaactgagaccccacaatcatgcccacccagtaacaggggcaag

SEQ ID NO: 178642 - DNA, 810 bp, Arabidopsis thaliana landsberg
atggttcggtctggtgtaagcacagtctttttggtaagtaaatcagaaggaaatgaatcatcaggagtcaaaatagaagtggagagctttcggttggaaagtaaagccattccatactgcattgataacaaatacgaaatcaacatctcaaaatcaggaagatgaccactcaagtagtagtaagtagaactcaataatatgcagatgaaggaaaggagaaagtgacattaactaaacacaccaacctttagatcattagtaagagaagctaaaccatttccagatgtattcgcagacaaatctgttgagagaaacaatcagagatccaggaaacaaacatattttataagaagcttggaaaatgagataatacttggtgaagaggaacgtcctagagctgaaaaggatccaaaagtgcgaaaaatccttcttgaaattgaagcagccataatctctgattcaataacctagcttctcatctacaaacacgaaaacaatccaatttctcagtgtaatctaatcaaaaggcacacaacatctacactacaatggcgaagattattcggcagatcagaaaactcaaaatctcagtagctatcaaatgctaattcgagcgattaagaaacagaaatgaaaaccagacccacgtacatctcatagagcttcaaccaaaataaactcaatagagcagaagaatactcaccggagtcacaagcggcgatgatagacgacggcggcgactattcaaggaggcaccgatttggtggtgaaggttttaggcttctggaaggagtttcgaggtttcagtga

SEQ ID NO: 178643 - DNA, 1312 bp, Arabidopsis thaliana landsberg
atgcagctttcttcttcgtttccaatttcacctcccaaaatcttcccttccaccaaacaccataaacctccagtgattactcaccagctcgccgcacagatacagagcaaccgtagacatttcgtgagtcccgtcaaagtctctggctatttctcatcgattagccgagctattgaggaagaagaagagtatcggaaagcacgcgctgcagtgaaccgtaaaggtgtcgaattggagagttatgcaattgaagggatctctgtaggtgggcacgagacttgtgttatcgtccctgagctcaaatgtgtctttgatattggaaggtgcccttctcgtgctattcagcagaagtttctttttatcactcatgcccatcttgaccatatcgtgagttgttcaaaatttgagtctttcttcaaaaccctctttagatttcgtgtaaagtttcggccttttgattgaattgtggatgaatcttagtgttgaattgatgatacattttagttcaaaatagagccattgtactatgatttggaaggataagcattagttatgttgaacatacttttagatttggtttgatgtttctgcttattgattgagttatgggatcttttgtatgaatcttgtggctaagtttagtgttttcttcagggagggcttccaatgtatgtagcgagccgtggtttatacaatcttgagccaccgaaaatatttgtgccaccatctattaaagaagatgttgagaaacttcttgagattcacaggactatgggtcaagtagagttgaatgtagaattgataccacttgctgtaggtaatgacatagtgacttgttaaaagccaaccttgtttagatagcgaatctgagttctttgttggtggtggcaggtgaaacatatgagttgcgcaatgacattgttgttagaccatttgcaactcaccatgttataccaagtcaggtactacacatcgtgaatgtggcatgagagcgtcttttttttttactgatcttgagttcttttagggttatgtcatctattcggtcaggaagaagttgcagaagcagtatgctcacctcaaaggaaaacagatagaaaagattaaaaagtctggcgtcgaggtttgttgcttataataagccatatttctgatattgaggtttgataaagtacaataatattgaacttaattacagattacggacacgatattatcccccgagatagccttcactggagatacaacaacagagaatatgcttgaccctcgtaatgctgatgcgttgagggcaaaagttcttagaactgag

SEQ ID NO: 178644 - DNA, 617 bp, Arabidopsis thaliana landsberg
gagatcgtgtaaaatatgttggaccttctaagaaggctgatgcaaagcacaggtagtttactgattcacttgtgtgataattattctctaaccttgctgaagaatattacgctctaatatcttttatgactctgtctcatattatttgacttgatctctgcttgctctgcctattcatattagtagtaatttgagtagttctggtataggattggatgtgtatgaaactgctgccacaattgttatctataggacttattcatttatttgtgaacagtgcaactcgcattacctttgcttaactaaatgacttgtttttgcgtgcttaccattatcatcactatccatggttttctcagcaatttgacatgcctgcaaatgtaacatttgatcttttaggaacacattttgaactcattgctctggaagttataaacttccatggcatgctaaatattatggatgaaggattgtaaatgccctagggtttgtctttaaccaaaatttctatacctacaggccattatctagtggacaacgtggagaggtctatgaggtgaatgggaatcgcgttgcagtcatatttgacattggaggtgatacatcatcagagggag

SEQ ID NO: 178645 - DNA, 194 bp, Arabidopsis thaliana landsberg
tatcttatgacaaccgatgggaagagataaggattgtgcaatcaggagaaaaacgcatatctacggaggcgttgggtcatgatgagatggagctgaccaaacttaccactctacgccgtacacatgtacagcttgcaggagttgatgctacatcaacggcacagaagaatcagggaacaaggctgatctactag

SEQ ID NO: 178646 - DNA, 104 bp, Arabidopsis thaliana landsberg
cttcagaacctttcaaaattcggaagaaaatggaagtcaacaatgtatcttcgtcgtcaccggaatctcttcgattgtctcctcaagcaaatcgacgccaatga

SEQ ID NO: 178647 - DNA, 93 bp, Arabidopsis thaliana landsberg
atgctggaaagtaaagatcctgcgattaagctctttggtatgaaaattcctttcccgacggttgtagaggttgctgatgaagaagaagaaaag

SEQ ID NO: 178648 - DNA, 76 bp, Arabidopsis thaliana landsberg
atggtcattgatttgcgagtgaataagcatcgtgtagcgcacggctatgtacatgaacaatcagcaggaacgatag

SEQ ID NO: 178649 - DNA, 79 bp, Arabidopsis thaliana landsberg
atgtcaacccaggtcaaagttgaagaacgcacaagtgaaactgtgtttttcaatgctgtcttcacatctgcaaaagaaa

SEQ ID NO: 178650 - DNA, 64 bp, Arabidopsis thaliana landsberg
aattatcaccgtcgatctttctgaagatatgtattgtcgtctaggactgaaatcggacggttga

SEQ ID NO: 178651 - DNA, 2692 bp, Arabidopsis thaliana landsberg
tacgacgtgttaaaacagttatggatggtccaaccggctgtagtatatcatctttgaaaccatcgttgataaagtttgagaaaatccggattcacttttccaatatgtcaacacgcttattttctggatggcgggctctaaggaagatccatgtccgtgtaccagccaatggttcttctcttcctcgtcaaagtctggcatatgttcatgccagtacacagtacttaaaacaagtttctggtctcctgaaaaccggtgtcacaagtctacgtaataattcaacatcttatgatattgtacaagggatgtgaaacttattaactactagcctattccgggagaattaactcaacttgacatctgagtttaaaatgataatatggcacttatatgtatttatatcagtatgtgtgggcatagttcgaaagaaattgtatttccatgtttcccagtacactacactcactgtcttatgtacaataacttttataatattgattgacccgttcggttctgtcattcagaaacatactcgtgtaagttaagattgaaaagcttagctgaagataacgccattatgatgcaacccggatctggtgaaagccatgttttgtatgttcctatgttcccaattcttcctttcactctctcaaatctacttggggtagctttccctttttgtgaagtgtgacgaagtatatggaatttcaacagctttcctgatagtcatggagatgatctgattgttgagatcctggatccaatggggaaggattttgggcgtgtacttgtgcaactagctaatatttctgaagattcggtaagtcatttctacttgccttttttatatgttagtacgtttcaagtgattctaatgaagaaaccatacaggctgagaaacttcgctggtggtctgtttttcgtgagccagaacatcaacatgtgggaaaactccagctctatattgactattcagcaagttttgatgataacagccatttgaaggtgtgttaactatctttcactcattatatttggtacctttggtgatctctttttttgcttcgctctctataagtggattggcgtttctttttagtatactgagagacactccagcagtccatttcctttagcaactttaaaactttatctcgtacaacaatagcatcttctcttggtcatagtaattagattgtttgaacctgaaaatattatcttacaatagttgttaattttggacttgttattagcaattttactaaaagaatttctaagaagtaagcacgtagattcagctcatctcacattcaattcgttcaattctaagttctttaattgaaacaagatttatattctaccctttcaaaattgtctctgaaaacatacaaaactcattgtattgtgactagaaaatgttggtgtattgattttgtaactcatctttcctttagtgtgcttctgttgcggaaacagtcgcatatgacctagtcctggaagtggccttgaaaatgcagcgatttcagcaaagaaacttgttgttatatggttcatggaaatggcttttggaagaatttgccacctactatgggatttcagatgtctacaccaagctcagggtatactgaactcattttttaattcttatcatttgagggatatgctataactccattttctctatctttcatgtaatgttgcttttagatacttgtcatatgtaatggatgtcgctacaccgacttccgactgtctccatttggtacatgacttgttaacacctgtcatcatgaagggaaatggcaagagcgccttgagtcatcaagaggtacatatgcatttatctattattaatttttctgtgcggtttctgtttttgtgtggtttccggagttatgtgtttcttgtctcaaattaagcgacagataggatacgaccctaaagttagctagtatactttgatcataatacttgactcagagcaccacattagaatacaatggtgaatcacagacttagacttcacgcagttgctcacatggcaattttcagcatcagacaatacctcatatcaccctagttaatcctgtttgttgttgtttttttttctcttgtggaatcataatagtactttctgcttctgaactgcttatgtagctctactttttatttttgctttcaacagaatcggatcttgaatgaaatcaaggaccagatcgagcagattctaaaactggtctttgagaattacaaatctcttgacgagtcatcattttctggaatgattgatgtggtcaattctgcgtcaggtgttccagcgccagcactcattcctgctgtgaaattgtacacgcttctgcacgatgtcttatcacccgaggatcagactcatctttgtcattatttccaggtatatcatacagcctctcaattgccttgacttactcttgagtcttgatcagtcattttttctcatctatgtggtatcaatgcacttataggcagcagcaaagaagagatctagaaggcacatgggtgagacagatgagtttgttgcaaacaacagcgagcccaatttttgggatatatctgcaatgtcggctgcataccagaaaatgacaatggcctgcaagaatgtaaagaatgagatctatactgatattgagatccaaaatgaagatatacttcccag

SEQ ID NO: 178652 - DNA, 129 bp, Arabidopsis thaliana landsberg
gaagttaggcaatgtaaagactacttggttccggaccgaaacttggtcctccgagacatcatccacatgcatggatcagctacacttggtattaccttgacgtcaatagttgtcgacgtattgaaataa

SEQ ID NO: 178653 - DNA, 110 bp, Arabidopsis thaliana landsberg
aagaaatctcacactggacttcgttgatggcaagagacgtctctcttggaccgtctatcttctgggtggtgattcattggctctccaatgggttttcattgacaaagcta

SEQ ID NO: 178654 - DNA, 134 bp, Arabidopsis thaliana landsberg
gagacaactctcgcattctccgagtttcaaagcgcaggccattctttacggatgtcaaagctgtagttgatctccaagtagcacttattatcatcatcaagaaactgaaacaagattgtcgagtaactttttaa

SEQ ID NO: 178655 - DNA, 489 bp, Arabidopsis thaliana landsberg
  unsure (1)..(489): unsure at all n locations
atgcctcagtattatcctcctatggcaannnnnnnnnnnnnnnnnnnnnnnnnnnnnnnnacatctggaccttcaaaccgaaaggataaaaaagatgatatgtgagttcattttaaatactttcttactcagaaaatgtctcatgattacaactttcttttaactgctcaatttccttcttcaggcctagtttcaagctcatcgatgatgattcagaagaaggttatagatgctcaataaaaatttaaatctgtcacaagctttttcttttatgtcctttgtattccattcaccatttttctaaacccaaaattctttgcagagaaagagccctatgtgacaatggaagaagatgactgtgtcattatcaatgaacatacagtctttgaccacatacgtgaaaaagctaagtgttttccttcattgaaacctttgaatccaacctcctctccagcatcaggaaaatcaattctgaaaaggaaaagctta

SEQ ID NO: 178656 - DNA, 378 bp, Arabidopsis thaliana landsberg
atggtctcgagctctgcgtgggccgcgacctccaacatgggcctgcctgaagcagccctcatggacaaagcctcgacgcagggaccgctccatccgaagtctggacgtgactaccagcccgtggtcaccctcaacggctggacggctcctttccggatgaacaacggcgtcaaggagttccacctcgtcgccgaacccgtcgagcgcgagatggcggagggcatgaccgcttacctttggggctacaacggtcagtcgcccggtccgacgatcgaggcggtggaaggcgaccgtgttcgcatcttcgtcacgaacaagctacccgagcacacgacgatccactggcacggcatgatcctgccctcgggcatggatggc

SEQ ID NO: 178657 - DNA, 102 bp, Arabidopsis thaliana landsberg
atggttcagggccgcccgaacgtcgtgacgctgaagttcttcaagaccgacgagttcccgaagatcgcgcttccgctgacccgtttcatcacgaagaacctc

SEQ ID NO: 178658 - DNA, 325 bp, Arabidopsis thaliana landsberg
agcgaagtggacaacaccacaaagaggctgggttaagtgcaactatgattcatctcaccatgaaggaacaagtgcgtctggtatagggtggataatccgcaattcctacgggactttcatggaatgtggcatgagtaaattccaaggacgggcaatggtagaagaatcggaatgtacggcattgatatgggcacttcggacatcatggaacttaggctacagaaaggtcgagtttgatggagataatctcaacataatccgactaatcaatggcaaagatgtaactccccgactacgacattatcttgatgagatctggcactag

SEQ ID NO: 178659 - DNA, 91 bp, Arabidopsis thaliana landsberg
atgaggtttggctcagcttcaagcaagacaccagagcagagatgtagttaccctcggatatcggaatctccggcatcaaatttattagaaa

SEQ ID NO: 178660 - DNA, 248 bp, Arabidopsis thaliana landsberg
atggacgcgatcgagatcttcttcaccgcctatggcgccttgctggccctgggcgtcgcccagctgctgctgtcggcggtcaagctcatccgggcgcgcgagaccattcgtctcggatgggccacgccgctggtgatgctgctgtcgctgctggagatctgcagcttcctgaccatgtcctcgaggctcatggggcaggccgacctgagccttggcctggtcaccaacggcgtcctggcctgcggcgg

SEQ ID NO: 178661 - DNA, 90 bp, Arabidopsis thaliana landsberg
ataaccggaaataaccaaatcttggcacaacgatacgaacaacgacgattgccaaaaacaaaattaaccaaaacctactcaccattttaa

SEQ ID NO: 178662 - DNA, 237 bp, Arabidopsis thaliana landsberg
atggcgatggagcggattacccagtcctcggccaagatcagcaacattatcggcctcatcgacgacatcgccttccagaccaaccttctcgccctcaacgcctcggtggaggcagcccgcgccggcgatgccggcaagggtttcgcagtcgtcgccgtcgaagtgcgccgcctcgcccagtcggccgccagcgcttcgagcgaagtgaaggtgctgatccagcagtcgggcgccgag

SEQ ID NO: 178663 - DNA, 171 bp, Arabidopsis thaliana landsberg
gtccacattctcactggatcttctcaattccgaattcaaagctttttctcaactccaaatgtcacccttgagagacaagtatccttcatgctcattgatgactcttctaactatagctttgcgttcaacatgttcactattcctacccatggccaagcccttaaaagttag

SEQ ID NO: 178664 - DNA, 1857 bp, Arabidopsis thaliana landsberg
atgaacattcacggggtaagtgggggagttaattttttttaagacaataaatctgttgtaaattgatgtactagttatagacattaatgggtgtgtaacagcatttcctatatagttgttgtttaacgtaggatttctgtttaaagtaaaatcaaaatttacatcaggttttgagatttttagttttaaattttccaaatggtcggctttgtataaaaacaagagaagaaattaaatatacacgaatatgaggacgtgtccagaaaaagaagaatatcgacaataaaaatcacctaatttgcatctaaatattgactttcatagtacgctagagataatcagttcatcttcaccttattctttgcattgtgtaaaagagagattatgcagagtttcctagtttatgagaataagatagtagaaatatttctttttattgttttgcactttagagatactagcttatcgcgttgtatgaatatgattgtcttgcttctatgttttttttttgtttttttttgtttttttttcatttttggctttgattgaataaaggtgagaaatttttattttttttcttaaagtatttccttaaaatattagtatttcggtttagaatagaacaaataggagacgataagagcatgcacataatattcatagagtatcattaacaattttttattattaattttaatgtttatttattatataagatgttttatgatattaaaaataaatagttttcagtggtgagattggtattagtatcattgaggaaagaagagaagagcaaatgattttctttttctttcttttcccacacaaaaagaacattttcttgactaatcataatccgccatgtcatcaaagactggtatcagaagtatcacttcagtgatacatctcatactcaaattagttgtttatccattaatttaatgtttttgtgcttttgatactcataaaaaatctgctatatacatagtctaattagtttgataacaaatagatatctggaaaattggaaactgtagaaaaacgatagctcgctggaaaagaagaaataaaacgaatgctgcagaaagaatagttgtgctaaagaagcgacttgattagacgttgtctaatgatggatacacctcccaggagatacacacaataagacaggacctctcacaagtctacaaagaagaggaacaattttggagacttaagagcaggaaaaactggatgaatcttggtgacaagaatacgaaatacttctacgcagcaacaaaggcaagaattgcaagaaatcggttggtagcaatagaagacgattcagggacaacacattatagagatgaaaatataggaatggtggccgaaagttattttactaatctcttcaccacaacccgacaagaccacatcaactaccacaatgtcttcattggttttcagaaacgtgtcactgaggaagtgaatacagaactcactcgggaagtaacagaagaagaaataagggatgcagtgtttgctattggagaagaccgagtcccagggcctgatggcttcataggagctttttatcaacagttgtggaatgacattaaagactcagttattcaagaggttaaacagtttttcagaacaagagtcatgcctacagcgacatatcacaccaacatctgcctcatcccaaagataacaaggcctcaatcaatgagtgatttcagacctatagctttatgtaacgttagctacaagattatcttgaaaatcttagtagggcgtctgaaaatacatctctcttccatcatcacagagaaccaagccgctttcatttcagggcgaaatatcatggatatgtaa

SEQ ID NO: 178665 - DNA, 314 bp, Arabidopsis thaliana landsberg
atgtctcttcgggaacatccgattaaaaaaaaagttacacgcgttgacttttattacaaaaatggcagtaaatctggcagtaactgcgtaaagtaaaaataatgtaaataataatcttcaccggaagacaaatcttttgatctgactttcgtctctccaaatctctctcgtctcgtttcttcagaggctatggggatctccttaagcaagcgtcgacgagacaacaacaaccaccaccaccatccacaccacaatccgccgtactattactccgatcctccaccacaacagccgtcgcctcaaaacgagtatag

SEQ ID NO: 178666 - DNA, 369 bp, Arabidopsis thaliana landsberg
atgggtcgtcgtttggatgcaaatacagaagtaattcaagaaacaatacaagaggtatgtagattgaatgttgacaaaaacttctgtttcactgcagtgtcaagactttctgatgatgattctaactgttttctttataatatatcataatgtttaggtggctaagctacaggatggtacatcatttataaaggatgacgttaaggctgttttcgatgcttttgaaaatctggtgagaaaattcattgattgcatatgttcaccagtttgttctccctacaaaaatccaaaaaaaacaaaacagagaagtgatcttgtgatcttcataattttcaggcaagcaaagtgtgtcgtatagagggaaatcag

SEQ ID NO: 178667 - DNA, 855 bp, Arabidopsis thaliana landsberg
atgggaaaccaggaaacgatgcaagtgttgggttctcgtgtctatcaacgggaacatcgtaggtgccttcgttgatatggtagtaaacaagactagccaaccatggttgagtgaaatatgccactacgtatagatccaagtccttggctatgtccaatgcaaagggcataaatggatcatagatcagagcttttggaggattgtccgacaacttcgcactgcatatacaaggggttatataacagtagagattgataacgtttttgcatataaattatacttatcctaaaaacgctacgaaacttgctttgatagttttaacactaattaaacttatttcttacatgggcattaatgcattatataaactattttaaattcataaaaaaaaaaggcttatgaatgttgtaaatggtaaaatctagctggattactgtgtataaacatgaaaagtggttgataatcactcaaaatatacattaaaagagacagaacacaaaacgtttcgtaattgacaaaaatagaaattctatgtcactcggaagtccaggatatagatttttgactaaaattgttctctcatcaaattccaaagtaaaattacctctaaaataactaaggggggtatgtcatattggaaattcatgtattgtacctagagatgagatcggtcaggcttcgagaagtagagttgtggaaacggtcaagatctacgaacttggcgtgagggtgttcatgtggaaagaaaccgtcgtggatggtgtggacagtgatggagtagtcgtcggaggtgtaaggttcacggtggtctttggaggcgatgatgagtgtgctggtgatgccctttttggataa

SEQ ID NO: 178668 - DNA, 289 bp, Arabidopsis thaliana landsberg
atgcgcaacgttgggtttgtctataattatgtcggcatacaacttgtgacaagtgaaaaaggtaagatcgtaagagaatgcattatgcatgccgtctttctccattttcattacatttttgacctgtcactttcttttttgggcgaaatgttttcacgctaaactcaaagtatggcgcaattctttttcattaacgttacttatatagtacttgtttttagaattacgggttaaacttcatttagtaaatgagtttattatcgatttgactgctagaacctgcaaataa

SEQ ID NO: 178669 - DNA, 271 bp, Arabidopsis thaliana landsberg
gcttacattgagaaagaagatggtaagaaattgaagcaaaagcaacgggagagaatgcaaccaaaaatgggaaagatggacattgactaccaggtttctattttttttaatctttgttttgtgatgagtatttgccgatatctgttctataactgacaagtgaagctattctttcctttctcaggtacttcatgatgcatttttcaaataccaaacaaagcctaagctgtcagctctaggcgatttgtattttgaagggaaagaatttgag

SEQ ID NO: 178670 - DNA, 160 bp, Arabidopsis thaliana landsberg
atgcctcgccctcgcatctgtgccgccgctattcgtctcgtcctcgttgttgccgtcgggcagtcgccgcgcatagggccccaccgttatggtgttcttgcccttgtgcgccgcgccattgtcgtcgtaccccgtcgtcctgcagcctcggtagcagcgg

SEQ ID NO: 178671 - DNA, 370 bp, Arabidopsis thaliana landsberg
atggtacatagagatgtaaaaagtaccaatatactgttaggtctacggtttgaagccaaacttgccgatttcggactttcaagatcttttctagtgggaagtcaagctcatgtatcaacaaatgttgctggaactcttggatatcttgatcccgagtaagttctagttcacatcacattatagtattcaggatatgtttccttgtatgtttagtaaacaaaaaccaaaatatttcaattacttttcttgcagatattatctaaagaattggttaacagagaagagtgatgtttatagctttggaattgtgttacttgaaagtatcactggtcaacctgtgattgaacaatcgcgtgataagtctacatag

SEQ ID NO: 178672 - DNA, 62 bp, Arabidopsis thaliana landsberg
atgacaggtgggccctcgcgtcggcgcccacttctgctgtgggtgcggcacggagcagtgag

SEQ ID NO: 178673 - DNA, 609 bp, Arabidopsis thaliana landsberg
atgaaagctccttcatcaaatggagtttctcctaatcctgttgaaggtttgtgtgtgttctcgtatctgataaatgtctatcctttagtagaagaaattcattgctggatttgaatagattcaagttttaagtagaagaggtcacacatttcttcagaattgctggatttgagaacctgaattgaattggtttcggtcattttctgcttagagagtaagctaagttactattgtattggtttataaagcctgtggcttttagttggtttagagcagttctctctcatcttgttggtttgattatagtaactgaatgaagatcctagagatttaaagtaatcacagctttgatgttgtgtgaatgcaggagaaaggagaaatataaactcagagctatggcacgcttgtgctgggccattgatttcgttgcctccagcaggaagtcttgttgtttacttccctcaaggtcacagtgagcaagtatgttgttcaataaagtttggtatcattcacggctgatcaagaatgagtcgctgattggaaatttcatgtggttgctgtttatttttctgtttcttaggtcgcggcttcaatgcagaagcagactga

SEQ ID NO: 178674 - DNA, 409 bp, Arabidopsis thaliana landsberg
cttcttcaccgtccccgaggccgtcgacgtggccctgatctccaccgagagtgcctcggactattatctcgactacacccggaacgagacgatccggacgctcgagccctacgtcaagaaagcactcgccgaaggccattcgatcgagttctcaagcgacgccggggcgcggtacttcctccagaacgtggcggtcgacgacctgctcaagatgaagcggaaccggggcgtgcttcaggaagtcctgtttcgcaagggagttcgcgaggacgaccgccgcgcggcgctcgtcgacctggcgaagctcgccaatgagccggagccgaaggttctggtcgccgcgatcgccggccgagacggtcgcggggtcgaccttgacgagggggttgtgatcgagttgctccggctg

SEQ ID NO: 178675 - DNA, 216 bp, Arabidopsis thaliana landsberg
atccacgagaatctcgagagaccatttcctcgacggcgcgtgtgctttcacgcgcgagggttggaggatttcggaggtgaggttgcggcggagggttctccagagagatccgtagacggaggagtggatgtcgtgttggttgctggtgatgactttggtggtagggagagcgagagaacggtcggagaaaatggcaccgttttggacaagggcttg

SEQ ID NO: 178676 - DNA, 268 bp, Arabidopsis thaliana landsberg
atgacggccagacgtgtcgcctttcgcaccttacgcattatagagactacgtacgctcattcagagtcagtttgctgtatggacgccagcgttcgacagcgcatcaccagtgaggcggtcgtcggcccattagtcgacataggtttcggctgtctcaggacgagctggcgttcaccgctggaatagtccagctggcgtcaatcctgttattgtaatggaatcgatagcgggcttgcgactgcgaaactccttgaacagcccgagatag

SEQ ID NO: 178677 - DNA, 1824 bp, Arabidopsis thaliana landsberg
atgtcctcgccggagcgtgctctcttgaatctattgacggacatcgctctctccttcgacggcgcaatcctcggactgactttagctgttagcgccgtcggttctgctctcaagtatgcttctaccaacgccgcgttgaagaagatcaaagatgcacccgaagtctccatttccgacctccgatcactgcttccggcttctgaagacaaatcagagactaacgataacaggaagagcaatgatcagcgaatcgttgtggttcgcggagtcgtcaaaccgaaaatttccggtgatgagggttacaagaacaacaacgtgttaatctctccggagactggagataaagctcttatcattcagagaacgcaaactgtacgttgctctaaaccctaagtgtttatgtttccctcaaattgcaattgacattgacctaattttgctttgtgttcttatcaaaggcttaggttaaagagtttggatgatttcttcatgattaggtgttcattgtgattgattaagttaggattatgtaagttggtactggtgtgatctcagaagggaaatgtatgtttctaatgtcatcattttgttgttgacagtatgtgtatagtggatggaagagattgtttcagtccactggtcaccggtttatgttggagagatcattgcgcaaacacggtgctgattttacgagaacggtaaagtctctctatcagcttcagagctttcaactttggctctgtatccatgatcaaacttgttttgtgtatcctttgctttgtgcaggtcccatttgtcattgttggaaaggatcagcaatcgaactctagttttgtcgctgttaacatggatggctcaaggcaacctcttccgcttaccactgtgtataatcgcttgcagcctattaattcttcgtttcttcaagcctttttgtaccccgattatcctgtgagtatatatgtattcaaagaaatttctggttttgaggaactgatggttacttgttcttggctaactttgtaatcctttctcttccaaggttggtctgcttgatatagagaagattttaccacctgggaaagatataacagctgttggcatctacagttttaataatggagttcctgaaatcaaatcgtgccaagatcttccttatttcttgtgagattttatctgaatatttttcgttcttatatatctgcctgcgttctagctcaaattattacttcatcttcttctttatgttttctcaatctgttgatcatttgacaagatttagtccattgttgcagaaaggctctatttgctgttcatatataaatatttatgaataatctttgcagatcagagatgaccaaggacaagatgattgaggaccttatggaacagaccaactttatattcttgggcagcgttatcttgagcattgtgtctgttggcatccttagctatgctgctgtcaggtactggagttgtgagagatctgatttggttttagatttgggcaatgtttcgatttgaaatctgtttaactgtcttatcttcaggacctggaataaatggaaacaatggaaccatcagagagaactgccacagagaccgaacgattctgtggtcgatgatgaacccgaagatgcagatgaaatcccagatggagaattgtgtgtgatctgcgtgtcaagaaggagagtacctgcgtttattccctgtggacatgtagtatgttgcaggcgatgtgcttcaaccgtggaacgagagttaaaccctaagtgtccagtttgtcttcagagcattaggggatctatgcgtgtatattactcttag

SEQ ID NO: 178678 - DNA, 235 bp, Arabidopsis thaliana landsberg
gttcttacatccgttggatcatcacatcattcaagagataaaatactacaagagagatgtggaggatagaagaatgtggacacgagagcgtacaaaagcacgggagaagactaagattggattcacagctagagttgacgcgaaaatcagacacctacgatcaaagctcaataagaaacagtcaaatatgtcacaattttcaactcaagatacaatgtccccaagatcagtatag

SEQ ID NO: 178679 - DNA, 67 bp, Arabidopsis thaliana landsberg
aaaaaaaccgaacctcgtcttcgaatttcgttctgttcctccacttaatcggccactgacactgtaa

SEQ ID NO: 178680 - DNA, 378 bp, Arabidopsis thaliana landsberg
atgcgcgagctcgagttcgaaaatcagttcgacgcgacgtactgcctgttctcgacgtttggttacttcgacgacgagacgaacaagaagaccctgcaaaacgtggcaaaagccctcaagccgggcggcaaggtcctcgtcgagattctgaatcgcgactacgtgatcgccgacttgcccacgcgcgtgtggtgggaaggcgacggctgcgttgtcctcgaggaagtcgagctcaactacttctcgtcgcgcatcgccgtgaatcgttccgtcgtgttcgacgacggtcgccagctcgagcaggagatcagtgtccgggcatactcgctgcatgaggtcggcaagctcatgcatgcggcagggttcaaagtccacgag

SEQ ID NO: 178681 - DNA, 400 bp, Arabidopsis thaliana landsberg
atgtgccagtgagtaattgaaatggagcgtgcctaggtgacattggcatgcgggcccggtcggtcagcgctgcctcacaacggcaggcgcagtcgtgggctagggcacggggaggaggccctacatagttgagaggcaaatgtgccaatgtttggatttagcccaatcagtggtttcctcactttcttttcttactaggtatgtgcccatgcgttgcgacggaacacaaattaacgagcctccaattgctcaaggttctagcgacggaggcgtgaacgcaatagtgacgggagcccttatggggaacagtgcattgttgcagagaagcgcgagcctgagcgcactacgggctccatcgtcgtgttgcgcgctgccattgccacgagctccatatatataa

SEQ ID NO: 178682 - DNA, 503 bp, Arabidopsis thaliana landsberg
cgatcatcgtggggctcatccagggcgtcaccgagctgttcccgctatcgtccctcggccacaatgtgctcattccggcgctggtgggcggcagctgggcgcaagacctgaacgtctccgcacccgaatcgccataccttgcgttcattgtcgggctgcacgtcgccacggcgatcgcgatgatcatctacttctggcgtgattggtaccggattatcggtgccttcctcgcatcgatcggccacgtcatcagccccgcgcccggcaccaggcgctgggagccgcagaataccgaccagcgcctggcgtggatgatcatctgggcgactatcccggtcggcatcgccggcctgctgcttgagcacgcgttccgcgtgtacctgagcaaacccgtcctgaccgccttgttcctggcactcaacggcctcatcctgctcggcggcgaagccttgcgcaaacgaagggccggactcgacgagcagcaggccgcgaccgacctcgag

SEQ ID NO: 178683 - DNA, 80 bp, Arabidopsis thaliana landsberg
atgggttataggttctgcgatatccttagtgttatctttctggaacaacaaaaggattcaaaaactaaaacggatcgaag

SEQ ID NO: 178684 - DNA, 59 bp, Arabidopsis thaliana landsberg
gaacaccacttaggcttgtcaaccctcgtgatattctagtgttgagcgacccggactag

SEQ ID NO: 178685 - DNA, 129 bp, Arabidopsis thaliana landsberg
ggagcaagatgattccgaggtagtaaggaaggtggggagagggaaatacagtgaggtttttgaggggattcacatgaataacaatgagaagtgtattatcaagattctcaagcctgtcccaagaagaag

SEQ ID NO: 178686 - DNA, 172 bp, Arabidopsis thaliana landsberg
aattgaactggaactgatttgttcccaacttggttttgattcagtttggataaaccggttttacttcaagtacaagaaagacagagtctctcctaacgaagttcgtaacgtgttactggttatcgcgattctgatagctaaaggcctacagcaacttatcgacccgtgctaa

SEQ ID NO: 178687 - DNA, 67 bp, Arabidopsis thaliana landsberg
atggatgacgatgatatggagatggatgagggagaaggagacggcaggagaaacatcagagttcaag

SEQ ID NO: 178688 - DNA, 73 bp, Arabidopsis thaliana landsberg
atggacagacttatggaagcaactcccaagcttgaatcttacaaaatccgagttcaaaatgttatcttccaag

SEQ ID NO: 178689 - DNA, 281 bp, Arabidopsis thaliana landsberg
atggctgatcacaacaacactcctccctttgacctaacgaaactcgaccattacatcaaataccaaccacgagaagaagctgaagatttttttgttcatgtcgaggtcaaggttctcggaaaaggatcttctccgttagagatctccttctcaacttcggtctatgaattcgtctgggaagacgaagattgttatgagttagttgaactctacgaattctttaccgaggatgctggaatagatgcattcgaggctcagttcttggtcaatgacttgattct

SEQ ID NO: 178690 - DNA, 352 bp, Arabidopsis thaliana landsberg
agcgacacgcgtgcgcagaccgaccccgggggtgcacctgcgcacgccacggtgaggcgggggggcgtggcacccccggacgtggcgtgcgcagagcgacacgcgtgcgcagaccgaccccgggggtgcacctgcgcacgccacggtgaggcgtggggggtcagtcctcgacgacgaagcggcggaagcggtcgcgcgccgcggcccaggcatggcggtcgagggtgccgtcggggcggagggcggcggcgaggtcgcggcccatggccaggacgtggtgggcgttgtcggcgacgaaaaggccctggcgcccgaaggtgacgacgccgggcagcccgtgacccagtcttga

SEQ ID NO: 178691 - DNA, 141 bp, Arabidopsis thaliana landsberg
caagggggtacggcgagcttagccgcggtcggactcaagctaatccagatgccaagatctttacccgcccgcagttatccacaatccgcaacgcacgaatcttggcagtcatcgtgaatcacaacgcgacgatcatcagcg

SEQ ID NO: 178692 - DNA, 64 bp, Arabidopsis thaliana landsberg
gttggcgcgggtcgtgatcgagtacacggagtccacgaagcggacggtcacgtcgccgtgcgag

SEQ ID NO: 178693 - DNA, 328 bp, Arabidopsis thaliana landsberg
gtaaacccaccaatcctctgaaccagcgttacatttcgcaagtcatagagagaaaagattggtttttgatactgaatcaagaattcaccactcatcgaattggactcaacactcgattcgtcatcagcgttttgcagaatcaagacaacccattacactccctgcgattttacctctgggtctccaacttcgacccggtttacgctaaggatcagtctctgaagagtgttctacggaacgcactttttcgcacaggccccttattgttgtctatggaactgcttaaagagattagagattcagggtatcggattagtgatgaattgat

SEQ ID NO: 178694 - DNA, 1546 bp, Arabidopsis thaliana landsberg
ttttgaatgtgcagatcagtttcgtcgtagctgagagcaaggtaattggtatttatgcgagatgtctcttgctcatgcaacataagcattgactattgtttttgcttgtgtgattaaataggtttatgtagtttacttgggagagaaggaacatgacaatcctgagtctgtcactgaatctcaccatcagatgttgtggtcacttcttggaaggtatgatttagtacttctacataggaacttttggaagatatacatatctcgaaatatctcagatagtttacgttactttgctgattttcatgtttcagcaaagaggctgtccttgattcaatagtgtatagttatcgacacggcttttcaggctttgcagccaagctcactgagtcccaagcacagcaaatttctggtacttttagcgttgaactctgtttcttgatttgacctaaaccaagaagttgttttttttaaaaacaaatcaatgccctttcttgaaaacagaactgcctgaagtagtacaagtcataccaaatacattatacgaaatgacaacaacaagaacttgggattacttaggtgtatctccgggaaattcagatagtctcctacaaaaggccaatatggggtacaatgtaatcgttggagtcatcgactcaggtatgtgcatatcgaaaatatgtttgattctctttaagacatgattactaatagaaaacataaaatgtggttacaggagtgtggccagagtctgaaatgtttaatgacaaaggctttggacctataccaagtcgttggaaaggcggctgtgaatctggagaactcttcaacgcctcgattcattgcaacagaaagctgataggagcaaaatactttgttgatggtcttgttgccgaatttggagtcgtgaacagaactcagaaccctgagtatctttctcccagagactttgccggtcatggcacacatgtcgcctcgaccattggtggttcttttctgcctaatgtaagctacgtaggcctcggacgaggaactgcaagaggcggtgctcccggtgttcatatagctgtttataaggcatgctggagtgggtattgttcgggagctgatgtattaaaagcaatggatgaagctatccatgatggtgttgatattttgtcactttctttgggacctagtgttcctttatttcctgaaacggagcatacctccgtgggagcattccatgcggtcgcaaagggaattcctgttgtaattgcagctggtaatgctggccccacggctcagaccatttcgaatgtagctccttgggtcttgacagtggctgcaaccactcaagaccgttcttttcctacagccataacacttgggaacaatataacaatactggtatgcatatgttctgttttactatagcataaactgtttttctatagttttaaatcattatgctaagatttcctctttgtttaatgtagggtcaagcaatatacggcggtccagaactcggtttcgttggtcttacttatccagagagtccactttcagg

SEQ ID NO: 178695 - DNA, 127 bp, Arabidopsis thaliana landsberg
aaaagagaatgaggagattgggaaaggtgtgaagagagtaataacacctgaatttgtgaatatgagcaaagaaattttataccccaaatatctatgtgttacacccttcctcgcccttacccgacct

SEQ ID NO: 178696 - DNA, 336 bp, Arabidopsis thaliana landsberg
atgactcggaccgcacgctcgcggcctggtcctcccggtcggggagcagtggtgagtaggcgttcggtgcctgcccgtgtggtcgtcgcgctgctggcactcaccgtcctcgcggggtgcgcctcggtccccgactcgtcaccggcccagccgctgcagcagatcaccccgggcgacgacgcggcgacgactccgggacccggtcagacgagtgatccggtcgagctcgtccgaggcttcatgagcgcgtcggccctgtccgagaaccggcacgccgccgcgcgcctcttcctcacccagaaggcgcagaactgggacgacagcgcggcgctgacg

SEQ ID NO: 178697 - DNA, 769 bp, Arabidopsis thaliana landsberg
gtctttaaaggtcttggcttagagtttgacacagctggtctcacgtaagcaccatgagtttccttttatcaatcaagaaaatagatttattttctcttcttctaacatgttttgttgataagaacagaggaaacagtctggatagtcatagacttatacattataccggtaaacaagcgccggagaagcaacatacacttgttgaggaactgtttatcggttactttacgcagggaaagttcatcggtgataggtatttatcactaggctcttgtcctcagaatatgtgaaacagttttattttgtgatagattgctcaagtttaacttatgatgcttgtggatcaatagagagtttttggtagagacggctaacaaggttgggatagaaggagcagaagaattcctctcagaccccaacaatggagtcacagaggtatgttttctgtatcatctaatcattagtgtttttttcttcctctgtagtataatgttgaatgaactgttttgaactttaaaggtgaaagaagaactggcaaagtattcgaaaaatatcaccggagttccaaattacactgtaagttttagcgctttagattgattgccttaataagttcatggcgaaactcgccatttttgaagggtgccttagtcttcaagtctaatgtccatgctttgtattgtttggtcagatcaatgggaaggtgaagctgagtggtgcgcaaccgcccgagacattccagagtgcgtttaaagcggcctcggcttga

SEQ ID NO: 178698 - DNA, 5050 bp, Arabidopsis thaliana landsberg
gagtttgaagacactttaaattatatcgctaaaataagaccggaggctgaaaagtatggaatctgtcgcattgttcctcctccttcctggaaaccgccgtgcccactgaaagaaaagcaagtatgggagggttctaaatttacaacacgtgtccaaagagttgataaacttcagaatcggagttcaatgaagaagatttcaaagcttcctaatcaaatgagaaagaagaaaagaaagtgcatgaaaatgggaatggattctgtcactaatggtatgggcgatccctgttctgcaagcactggaatgagtgaacttgagacgtttgggtttgaacctggtccagggttcacactaaaagacttccaaaaatatgctgatgagttcaaggctcagtactttaaaaagagtgaaacttctacagacgataaatgtaaagttgataattcaatagactgctgggagccagcacttgaggatgttgaaggtgaatattggcggatagtagataaagcaactgaagagatagaggtaaagttttgtcccctgttgttctttttatttgggggtttatggtctattaggacccctgtatctcctaactaccacaatgatttttcaatataggtgctatatggtgctgaccttgaaactggggtatttggtagcggattccccaagatatcatcaagtcacaatgcttcttcttcagaagataaatatgcaaaatcaggctggaacttaaataactttccaaggcttccgggatccctccttaagtacgagggcagtgatatttccggtgtccttgtgccgtggctgtatattgggatgtgcttttcttctttctgctgggtaagattgatctctgtgaattgcataatttattttgcaggttaaagcatgtacttagttgggatatcttccttttactgaaatcaagcgtagcctcatacaaaaacttacaactacaaccggatgtgctttgttttttgtatacctattcacaaatagtagataaatgtgattaaatttctgtgctacatatttacaatgataatttttccattattcctaaagctacgctaggattattattgattcaatttcccacaaaagtattagttagtgtcttcatattatacagttttcttacaccagtggatgcaattttcattacttcacatcttatttcgttttatattttccacttctgacattccttttgttctgctttttttgtttttgtttacctgaaatagcatgttgaagatcaccacttgtattcgttgaattatatgcactggggtgcaccgaaattgtggtatggtgttggggggaaggatgctgttaaactcgaggaggcaatgaggaagcatttgcctgacctttttgaagaacagcctgacttacttcataagctagtaagtattggatatttgatgaactaaagcatcgctttgcttctctataatcaatgatcaatagaatcttgaaaagtagaaaagtgttcaatcacgatgatgttcttatttcataatatgttaatgttagcatataatagaatattaccatatctgtgtttccatttttgtagttaatcaccctgtaggaatttctacagacccgttttatgtcctctattgacttgcacagttgcacctggtttaaatacatttgttgcagattattgtttcggtataaaacaaatcctttgatgctctttcgtgtaggttacacaactctccccgtcaaaactgaaaaccgcaggagtacctgtgcaccgttgcgtccagcatgctggagagtttgtcttgacttttcctcgggcatatcatgctggatttaattctggtttcaactgtgctgaagctgtgaatgtagcacccgttgactggttacctcatgggcagattgccatagagttatactgtcaacagggtagaaaaacgtccatctcgcatgataaattgttgcttggggcagcaagggaagtagtgaaagccgactgggagctgaacttactaaggaaaaatactgtagataacttaaggtggaaagcattcagtgcgaaggatggaattttggcaaaaacattaaaggtaaagattagatattcttactcttgattcttgaagtttagatgcctataagtgtgaatgattggaaaatcctgaactcatgaataacttgagaggtatctttgcaaactggtaccacggtggtatccgttgtaaactggtagcatgaggttgtaattgatatggaacttgaaattctcttaagttgaggggtattgcatatcacacgaatctacagctaactaacaagggaagaacggaagattactacaccacctcttactagttaaaacaaatgattagttcaggaggtgttcatcttctgcctgggtctaactgtacaaataaatctcgtaggtttaagaggatcattctttattgtcaatatggtgattaatggacttgtcatgttttttatttaggcacgcattgacatggaacgtacgagaagagaatttctgtgcaactcttcacttgcattgaaaatgcacagtaatttcgatgctaccaacgagagagagtgctgtatatgcttctttgatttgcacctgtctgctgctggctgtcgttgttccccggagaagtattcatgtttgactcatgtgaaggagttgtgttcatgtccatgggttactaaatattttctatttcgctatgatatcgatgaactgaatgttcttgttgaggcagtggaaggaaaactgagttctgtatatagatgggcgcgtcaagatttaggattggcattaagtacagacgtctcaggaagcaagatggagatagatgaagaaggaaaagtccacaaggacccgactccacaaacaactgcactttcagggaaggatttgcagttgaaagtaacatcgaaagaagtaagtaaagagttagaaaagactagtaaattatctcatgttaatttacttctgaaagaaaaggaggagcaaataacgtcaagtcactgtatgaagcctgtcaaagaagaaactgtttgtgattcttctgatccaaacgtttcagcttgccaaccatctgaaggaggcataatctgtatgacagctgttaagtccgcaagtggtaaaaagaattcacagagtctacccaatgatgtgatactcctcagcgatgatgagtatgacatacctaggaaacgaggttctgtgagaagagatgcaatttcttctggcaagaaattagaaatacgagagagaccgacccacgttttggcgttagaagcttctgccaaaattgctgctccaatttgccaaagggaaggagattcgctgcgtgatacacgaaacactatatcattgcctactaatgaccaaaaaacaatgagaagggatgtaccgagttctacttcgcacgcggaagttaatgcggaggctactgggcttactcaagatatatgtaacagaatggcaactaacagccacggtggtggaaaacctactagttgtaaatccaaaaactctggaggtttggctatagtggatgttgtggatgggacaagaagtagttcagttacaccgtcttgttcgcaaaataatagtccggataggttcatccgccaaaagggtccccgcattgcaaaggtcgtgaggagaatcaattgcaatgtagagcctttaagttatggatgtgtgctgtctggaaaatcatggtgcagccggcgagcaatttttcctaaaggtgacatgtggtcaagtatttttgctacttgagaacattaacagttatacatattgcaagtgcttattgtctattcttctttggtgcaggatttcgtagccgggttaagtacataaacattttggatccaacaaatatgtgcttctacatttcagaaattctggatgctggacgcaacagtccattgttcatggttagttggtagatagatgctgatctaatttaactaaccttaaaaatatgtctgagtagtgtttcattttcaaattaaatatagccatatgaataaatccgatgacatgaatctgaaccggaaatatgatccattatttggctgtcaaagacgtagagtcccatcatgctaacataaactttaaaagttttgaactgagtatgaaaccggaattaacctattaatcaacctttaaaatcttgtgtgtgtgtgtaaaaaaaggttgttttgtcttgattctattggtcattgtgcagttccaaaaatcttgcccatcaacaaactgtgtggtatgttctttttgtcaggtttacttggagagtaatcccagtgaggtgttcgttcatatgtcgcctacaagatgctgggagatggtaagagagagagtaaatcaagagataactaagcagcacaaagctggaaaatcagatcttcctcctttgcaaccctctgggagtcccgacggttttgaaatgtttggatattcgtcacccgcaatcgtacaggtaaatctttacaagttttgtattaggctcagatttttatgcttatttctaattatatatacaaaatggaaataaattctaacaacaagctaatatgaaagtccaacttttgacattttctcatcttttatgatagctagaaagagtcggagtatagcattgttgcttttgtaaaatggaaagcttcatttgtaaatctagttgacatatagatactctaatgtgattaacaggctatcgaagcattagacgtgaatcgagtttgcacagactattgggattccaggccttattcccggccacaagttcagttccctgcaaatcctcttctcagagaagccaacacaagtggcagatcgaatgtgggaaatctccagctaaaccctggacaccatatatcgcctactggaataaattctattcttaaagttctgttcaagaaagctagcatggaggaactaagctcacttcaagaggttttaagtgagactaactcagatatggtgaccgaacttgtgaaggaagagatccagaaccgtcgctga

SEQ ID NO: 178699 - DNA, 162 bp, Arabidopsis thaliana landsberg
ggattcgccaaagtcgtcgatagcacggcgacgcctattggcacgtcggaggcgcacgacgcggcaagaagcacacgatctcgagcattggagtttctacaacatcattctccatggtattattttgttaaattaagaacttccagggatgccagtgcttga

SEQ ID NO: 178700 - DNA, 149 bp, Arabidopsis thaliana landsberg
gtcgacctgaccggcgggtactacgacggcggcgacaacgccaagttcggcttcccgatggccttcacgacgacgatgctgtcgtggagcgtgctggagcacggcgggcggatgaaggcgcgcgtgcgcgacgcgcgcgccgccgtgcg

SEQ ID NO: 178701 - DNA, 698 bp, Arabidopsis thaliana landsberg
gtttggagtacttacacactggatgcaaaccaccaatggttgcacagagatataaaaagtacaaacatacttttggatgaacgtttccaagccaaattagctgattttgggctttcgagatcttttcctaccgaaaacgaaacacatgtttcaactgttgtggctggaactcctggttatcttgatcccgagtgagtattttcttcatattttatgttagtccataaacatgcatcataccttttgatagttactagccattaaacaccttccatgttttgttttgtaggtactatcaaacaaattggttgacagagaaaagtgatgtttatagttttggaattgtattattggagatcatcacaaaccgtcctataattgagcaatctcgtgcaaagcctcacatagtagaatgggtcggatttattgtaagaacgggagatattggaaatattgttgatccaaatctccacggagcttacgacatcggttctgtctggaaggctattgaactagctatgtcatgtgtgaatatttcttcggcaagaagaccaagcatgtctcaagttgttagcgatcttaaagagtgtgtgatatctgaaaattcaaggacaggagagagtcgagaaatgaactcaatgagttccatggaattcagcatgggaattgacaccgaggtgatccctaaagcacgctaa

SEQ ID NO: 178702 - DNA, 264 bp, Arabidopsis thaliana landsberg
atcgtgaatttggtacttcatacttaccggtcaaaagctcagaagcaacatttaagtcatggcgaaccgtatagtatatatcaaggaaaacctcataacataaacaaaggttcagaacttcagacaaaacctgttttagatgacagagtcatggatcaatctcagcccaacaacattaaaactttcagcccatcaaacccaccaagtttaaatttctcttctctcttgaatcttgatccagtagctgatccgacaacgttttga

SEQ ID NO: 178703 - DNA, 114 bp, Arabidopsis thaliana landsberg
ggtcccgctggccaatgggttgatgtgatgaagaagaaaagagctattcatgaggagatcatcaatacaagacatcagcagaatcaaaagacttccaataatcatttggagatg

SEQ ID NO: 178704 - DNA, 344 bp, Arabidopsis thaliana landsberg
atggagaaaatttcagcattcttcgtcattctcttccttgtctcgtcgtgtaagtaatttatgtcaatctcgatatatcaaacacttatagttttcaatatcattagtccttaatttgcttatactattgaacgtatatatatacaggcttggtgacaatgagtgttggagatatatgtcaaacggatagagattgtgttgagattgggattccaagatgtaagagaacaggaaagatgccgatttgttacaacggatattgttgttgtatctgttctgctaaaagaactcctgcttctactactcgaaaatctccttctccatcaacctcaaaattagtctga

SEQ ID NO: 178705 - DNA, 804 bp, Arabidopsis thaliana landsberg
gaaccaaacaagcctccagattcgtggtttgagttaaaagtaaacccacatatttatgttaatgggttgcccgatgatgtcaccatcgaggaagtaagttgtggtcatacttcttctaccattatgaatatctgaagcttttaaatggactgatagtagggatatcattacaggtagctgaagttttttctaaatgcggtataattaaggaggtaaatctcactatctgaagattcttcctgtgttttattttggaatcctgtgtaagtatcccctaacaatgtggatctggtaaacaattcaggatgacactggcaagcctcgcataaagctatacagtgacaaggcgacaggaaaattaaaaggcgatgctcttatctcctatatgaaggtaatggctatatttgaagttctgtcctcatgggatgcataaggttatgattttaaactttgtctatttttcatcttcatgtgtatttgtttttgttttcactaggagccctcagtggatctagcaattaaaatcttagacggggctccgctacgtcctgctgataagctcctcatgtcagtttctcgagctaagttcgagcagaaaggttaatactattgcacatttgttgtataacaacttatcggttatgtaaaacatcccatctgtggctttagtttcggcaatattttacttatggtttttattggctttactttttttttactcaggggagagatttataactaagcaaaccgacaacaagaagaaaaagaagcttaaaaaggtcgagcaaaagttgcttggatggg

SEQ ID NO: 178706 - DNA, 388 bp, Arabidopsis thaliana landsberg
atgatatcattgcaagaaactgcctatgtgccaggttttcataccaacatcatctctgcaagccgcatgaagcgggcaggctttatatgggattttgcagaagatagggtggttaaaaacggccatgaggtctgtcgacttgcagaatatcaaggactttgggtggtggagcagaacggcggaaatcgggcttatgcaccggccaatgagaatgctcatgcagttagaccaaagacatctataaaacactccagcaaaccactaatattagcaggcaacacagatatttggcacaaacaatttggtcatctaaatcatgaagccatccgacacctaccagatgctgttaaaggcatccaaatcgacgatgtcgaaccacccaggagct

SEQ ID NO: 178707 - DNA, 242 bp, Arabidopsis thaliana landsberg
actgccatatcggctttgcaatctgttcttcaagaagacttcaaggctactgagattgaggtatacaaaactcttctcgtatatgatggcaagtttattgtatcatttgtgggttatatatcttatcaaaccgtttggtgaaatgataggtaggtgtggtgagagcagagaacccggaattccgtgcattgacaacggaggagattgaggagcatttgacagccattagtgaacgagactga

SEQ ID NO: 178708 - DNA, 55 bp, Arabidopsis thaliana landsberg
atgaagaacatgctggtgacatcattgatgatggtgatgggttacacgtggtatg

SEQ ID NO: 178709 - DNA, 575 bp, Arabidopsis thaliana landsberg
atgctcggaaaaactgaggagatcaaacgaagggtagccacagctatggagaaggtatggttggttggttgttcataattagcatggagctgcactttctttgttttctcgtgattgctgattattgcaaattggggttgtataagttcaggtaagtgtagtgaacaaggattctggaaaattgttgctgaagtatccgtggattctctcaccaagcatacaagagaactattctcacatcggctcatttttttacagtgaatcggtaagcacaatttgacaagacagaatacatcacgttgatcagaaaattggtggttttgtgtttgctaagttgtatttatcatttttgttctatgattggtctaccaacacctggtttactttcttaggtgctcaaaatggatattgaccacgccattaggagatggcctttgcttctcggttgctcagccagcaatatggagatgatggtgaaggaatttgataaattaggtgttagagataaaagaatggggaaggttatacccaagatgcctcagcttttgttatgtaaaccccaagaatttcttaag

SEQ ID NO: 178710 - DNA, 432 bp, Arabidopsis thaliana landsberg
  unsure (1)..(432): unsure at all n locations
atggtgccgaactcgctcggacccggcgaactgctgatgcactacggcaccgacgagcaaaagaagaaatggttgccgggcttggtcgatggcagtgagattccgtgttttggtctgaccggccccgaagtcggctccgacgcgaccgcgatgnnnnnnnnnnnnnnnnnnnnnnnnnnnnnnnnnnnnnnnnnnnnnnnnnnnnnnnnnnnnnnnnngttttcaaaacgctacatcacgctggcgccggtggcgaccgttgtcggcctcgctttcaagctgcgcgatccggacggcttgctcggcgacaaaaacaagatcgactacggcatcacctgcgcgttggtgccggcctcgcatccggacattcacattggtcgccgtcactatccgggcgctgcgttcatgaacggcaccatcgtcggtcgcgag

SEQ ID NO: 178711 - DNA, 117 bp, Arabidopsis thaliana landsberg
gcggaaaagggaaaagctcaatcatttccttccacaccccttcaacctcctagagttgaagtccctggtttcgacaactccaagcttcttcgaagacatgaactcacaatcatctaa

SEQ ID NO: 178712 - DNA, 365 bp, Arabidopsis thaliana landsberg
atggtcgtgattctctttgttatcatcgccggatttactaaagccgatgtgaaaaactacagcgatttcactccttacggcgttagaggagtgtttaaatccgccgcggttcttttctttgcctatattggatttgatgcggtttcaacgatggctgaggagacaaagaatccagggagagatattcctattggtcttgttggatcgatggtggttactacggtttgttattgtctcatggcggttacgttgtgtcttatgcagccgtatcaacagattgatccggacgcgccattctcagttgcgttttctgccgttggatgggattgggctaagtacattgtcgcctttggtgctcttcaaag

SEQ ID NO: 178713 - DNA, 424 bp, Arabidopsis thaliana landsberg
gaaacaggaagcttaataataagttcaaaaatggcgtggcaaaggcggagccgtcggaggatttttggtttaagaaaaaaagaaaaagagagaaatatctgaaaaatacgggaaagatgcaggcagctgtcacagccgcaggtaaagagaaggtgtgtgacgtgtctcaataaaacaccgtttctctctataacacgattctgtcattatgtgtctgagcaaaagtgcctccttatttacatctctagaaccgtttactattggccacgtggaagatatcggtaccgttgcgttgttaaaaagggttactagtactcctcgtgaaatgatttggtcccacttcacaagtgttaatgtttctataagaaaaaaaagagaattaggaaagacagaatcgagaggagagagtatcggatcttcctaa

SEQ ID NO: 178714 - DNA, 24 bp, Arabidopsis thaliana landsberg
atgcgggccaaggaacagccgcag

SEQ ID NO: 178715 - DNA, 178 bp, Arabidopsis thaliana landsberg
atgaaggttcgtttaatcactcatacgctctggttcattgatttctgatcacataatgtgttacattacttattcataaatgtttttttttcttttcagtttttcgggtggatgcagaacaagctacatgggaaacaagagattactcatagaccaagcatatcctctgcttcttctc

SEQ ID NO: 178716 - DNA, 2231 bp, Arabidopsis thaliana landsberg
  unsure (1)..(2231): unsure at all n locations
attcttgatagcgttcaagtgtccataaaaaattttcacatcttatactcagatgcacaacctgaatcggtaagtctcttgcttgttcagtttaattagtttgctagaatataggcttgtattttgttatcctcccattgatattgttgaaacttatatacatcgatcatatcgtagtattggtttgtttgtgagagcatagcatttatcatggaggatatgtatctagatagagtcaaatatatttgagcattgtgatgctaaactactatcagtctttcttgtgattcactagaatataacttgaataatcgnttggtgttgtctactttcccactttcatatgtttttactctaaactgctgncacaggggcaagttgtattatgattgcggttttcaagcttgacagttactaaacaaaactcagttgggtaatctctttatgcaccttctcttgcacttttaagtgtactccactttgtgtttgattccgagctttgctttatatatggcaaggatatgttctttgaattacattgtgagacagcagagagcagaccccacattaatttctttccagttgccttgtttcttctatgtcacttaatatatattctagtttcgtatttgattccttgtagctttgctttattctattggtttggcgataccccattatatctttcttccaactgtctcttttcttactgtaaaatctccttaaacctgttttttccataagctaaattattgttgataagacaagacctgtggtggatacatgtgcgccctcaaatatttgacatgatgtctctgttgaatatcaggccatcagttggtagggtgagaggggggcaagtgaatatacttgtggaggttgaaggtttggaaatatattgtgacatgtatgagggaaacatggactttccaagtgttaatgaaaaaataggttttgacaattggtgccagtcaagattgcaaagcaatagatttggttatttactgaagccagtccatgtttctgtaacgctattggtaatggatctaaaacagcgtcattggtttgctgtctcttaacatcttttgttatcatctaatctttgttgctgcttcaaggtgctacatccttgctcttgctttagggttatgttaaaaatgagatgtacacatttatatgttatatctgccgtactgagtcttgatttacctgatggcctacgaaattttgatgacatattaatcaatcaatgttatcagaaaggatttgcataacatttttgccaattcgtttatatgtcaccatcagctccatatggacattgtgtttggtgaaagatttttacagctatctgatcaatgatacaatatttatacaaaaagtaaattggtctatgcatcagctattgcttgagtgcatttttgtgctgtatgtaaataggcattcttcattttgcctgatatacttctttgcataggtcaatcgatctggagagctttatgacgatcttcctcagtattctatcagcgctgagttgactgatgtggttagttctcagaaattgctaaactaggttcagagctcagatttatttaccatttcctgactcactctaacttccaattggcactgatgcgttttaggtggtgactctgaatgaatttcaattgcagcagattcttattctgttagattatttgcaaaccagccagttgcgtgagaggtaagctttcattagggtagcgataatttttcctcaattcaaacttttttttctcctgagatttagctctattattggatactacagaacgtttttttgaagaactactgattaaagaaccttttaaatggtttaggtatgggcggtatcgtccctgctccacttctttatcgaggaaaccacctggatggcagaaactttggtggcactatgcccaaaattcagttttatctgatgtacggaagaaactgtggaaaacttcatggagatttcttgaacagcgaatgtaagtttacgttgcttacatcatttcttttcttttaattagatgatgcttaatagctattacaattttgatttctcgtaaaacttctgcatactttacttccacgcaaataacttactgtttcatggcataagtagacaaattctcctggaatgtattcaagcgggctgctcacttttagatttttgtttcggcgaacacatacaggagaatccgcaggag

SEQ ID NO: 178717 - DNA, 106 bp, Arabidopsis thaliana landsberg
agtctcaaatgcatatatcacctatgaaggtgctctaacgactttcttacttttaagaaattcttataatcagtttcagagccgcgactacctctttaggaaaggg

SEQ ID NO: 178718 - DNA, 477 bp, Arabidopsis thaliana landsberg
atgtctccaattgagaattcctcatcttggacactcgaatccgacctagaagatctagacctcgacctccaagtctacaaaccatccgtaccattaaagaaagtcccaaacggagacattttcgaagcctcacgcgccggtgacgtcgatagactccggtaccttgttgaaaccggagtcaacgtcaacgcacgtgaccgttgggactctgttgctctttactacgcttgtctcgctggtcacatagactctgctcgattgcttctagagaacggtgcgatttgctctgaacatacttttgatggtgatcgttgtcattatgcttctcttaatttaaggatacagaagcttcttaaggcttttgaagctcgtcctcctcctcttgctcctttgcaagcttctcttagagataccttttgggatgttgtcataatcgagattatcttcaacaagaagaagctaatcttgatgtctctg

SEQ ID NO: 178719 - DNA, 388 bp, Arabidopsis thaliana landsberg
atgcaagtgattccaccagcaataaaaaagatattagacaaatggaacatcagaggacttgtgataatgtctctgttgttccaaacgtctcttatcttccttgcaccaatgcggaaacgcacatcaaagaagttgctcgccgcggttctatggacagcatatcttttagcggattggaccgctaattatgcggtgtctcagatcaccaagaaccaaggaaaagaaacagaacctggcgatcctccaaaaaacaagaagcttcttgctctatgggcaccattcttgttgttgcatcttggtgggccggacacgataaccgcgttggctcttgaggataatgcgttatggcaacgtcatttgtttggcctcgtctctcaagctcttgcag

SEQ ID NO: 178720 - DNA, 90 bp, Arabidopsis thaliana landsberg
ggcgcgaaagtgcttatggttggagctggtgggattggttgcgagttacttaagactcttgctctttctggattcgaggacattcatatt

SEQ ID NO: 178721 - DNA, 254 bp, Arabidopsis thaliana landsberg
atgggaagcgaaacacctatgcatccttcacggactccacttcatccttatatgactccaatgcgggactctggaggtttgttttttagatccaatatctgtttatttttaatgttatataacacctcctctgtaatatgttctcaagttccttggtgattttatgtaatttcagctacaccaatccatgatggaatgaggacacccatgcgtgatagagcttggaatccttacacgcctatgagtccacctag

SEQ ID NO: 178722 - DNA, 330 bp, Arabidopsis thaliana landsberg
atactgaacctctgtaattgcaaggaagatgttaggaggaaagttcatggagtgattgataagtttgctgagcgtggacttcgctctttggctgttgcaagacaggtcttttcggttactatatatcgtgaagtttatgtgtccttgtttctttattgtgattcatatcgatttgaatggtgcaggaagttctcgagaagaagaaagatgctcctggtggcccatggcaacttgtaggtcttttacctctttttgatcctccgaggcatgacagtgccgaaacaatcaggagggctttaaacctcggtgttaatgttaagatgataaccg

SEQ ID NO: 178723 - DNA, 514 bp, Arabidopsis thaliana landsberg
atggtatctgtgattttactcttgagcacccttcgatttctcggtttcatgcaggtgattgattatcttattgttcatacttcatatcatagtgttattactttcaatttggattacattgttttgtattgaatcttgccagttattcagtacaagagaagtggagctgcgtatatatttgatcttggaagcacgcatggaacgactgttaacaagaataaggtgttttatttgtggctttgacatttttattctcttgattgagctttgatgaactgacttatagtattttactatcggtgtgttatgttttttgcaggtggataaaaaggtttttgcggatttgaatgttggtgatgtcattcgctttggcgggtgagtgtatatctttgttaagctcatggtgattattttggtagcttttgctttgattttcctgagctcttttttttgttttttatgcagttcgactcgattatacattttccaaggaccctcggacttaatgccacca

SEQ ID NO: 178724 - DNA, 562 bp, Arabidopsis thaliana landsberg
cgctaccggcttccaggccgattcgctgctgggcgaggatggtcgcccgttgccgccgtcggtgtcgcgccagctcgaggcgggggcccgcttcggcctgttcgaccagcgggcgcggctgaccgtggccacttaccggatccggctcgatcacagcgtcgacctgatttcgccggagccgccgtactttgccacgcccgggccgggacagaccaaccgtggcgtggagatcgagttcgagggccagccgctgccgggcctggacctttccaccagttacacccaggcgcgcatccgcaaccatgacggcagtttgccggtcgcgtcgccgcggcggcaggccaacgtgtgggtcaattaccgcttccagcgcgcagggtggcaggcgtggagcgtggccggcggcattttcgcgcgcagccgcagccttggacatgccggggacggcacgtatttcgacatccccggccaggccagcgtggagcttggcatcacctaccatgccgatcgctggcggaagacgctgggggcgaagaatctgttcgcacgcacgctttatgcg

SEQ ID NO: 178725 - DNA, 1395 bp, Arabidopsis thaliana landsberg
ctctcaatcgctatctctgaacctatcttcctccgaaccttactctcctctcatatccactttctcgtatcgcctctcgttcacgctctctcttcgattgatgatgctccaatcgctatccagattatggatatgatctctcttctctgttccgttgaggaatcttcaatcggtgaggattttgtggagagaatatccgatcagctttcttctggtgctttgggttggagccgaagacagctccatatggtattgttacatttctagggttttaattggggattctcgttgagattttcgtgaatctatcggataagcttgaaatctatattctctcatagattgcttattgtctgtgttttgcagcttcactgctttggtgttcttatgagttgtgagaatataaatatcaattctcatatcagagataaagaagctcttgtttgccaactcgttgaaggtcttcagttaccgaggtaatgtgcataatccacctttggagaccactgtttttactatattgtatggggactgttgtgatttatcttttttctcatactagtgaggagatccgtggtgaaattctttttgctctgtacaagttttctgctctacagttcacagaacaaaatgttgatggaattgaggttctttctttattgtgtcctaagcttttatgcctatctttggaggctcttgcaaagacacagagagatgatgttcgcttgaattgtgtaggttcgtatgagcttatatatctacttcgttcttatgcggtagacattgttttcatctttaactcaaccatgaatagatttgcatagtcatatcctaaagtcctagttcctctactttggagtcttgtgacgcttaagtaattattcagcgttttccattggaaaaatgtttggtgatatgttgtcattggctatagactgactagaaaaccatgatagaattgttaatgaatttcttatagcagtagtacattctcagtttgagtctcccataattgttgttgttgttgttgtttctttttaacttgttatgtcagctaacagagaaatttgaactttgtagccctgttgaccatcttggcccagcaaggtcttttagcaaattcacattcaaatagtgccagcagcatgagcttggatgaagtggatgatgaccctatgcagactgctgagaatgtagccgccaggccttgtttaaatgtcttatttgctgaggcaatcaaaggtccgttgctttccactgacagcgaggtgcaaataaaaacccttgatcttatcttccactacatatctcaagagagtacaccaagcaaacaaattcaagttatggtagaagaaaatgttgctgattatatatttgagatactgcggttatcag

SEQ ID NO: 178726 - DNA, 605 bp, Arabidopsis thaliana landsberg
atgaaagcgcgcatcattgcccaagttgaagatcggtccgaactcgaacctgaacgccgacagatctcgtgcgcgatcgttttccacgacattgagcacgtagcgacccgcgagcgcgtcatggacgcggctcgtgtattcggcaatatcggtgccttggggtctgacgggagacacccagtctatgacgggggtcatgggaggccaggctgcgtcagtttctcaataatctttccccaagagagggaaagctccaaataccgcttgtgggcggctgctcccaggcgcggcgcaagtgacggatccgactggaatcgatctagggcctgagcgagggaacgcgcgttgggttttgcgacaaggccttccttttcatgacggataaactccaaagggccgcctgaatccgttgtcgttatgacaggctttcccgcaatcatcgcctcaagggtcacataacccaggtcctcatcgaatggcgggaaaatgacggctttggcgcccgcgtacaactcgatcatcttttcagtcgagacatgtccatgccattcgacacggtcttcgagaccgaattcctttatctggcgacggaaggcttcgccgtc

SEQ ID NO: 178727 - DNA, 345 bp, Arabidopsis thaliana landsberg
gtggtggtagtaatcgggaattttgcgagtggagccgatatcagtagagacatatctaaagtcgcaaaagaagttcatatcgcatctagagcaagtaaatccaacactttcgaaaaacgtcctgtacctaataacaatctctggatgcactctgaggtaaaaactattttcttataatggttaatcttgataagaaaaaattcgaaacaaattataaaattcttgcttctattaattattttatttttttgatatcttgcagatagacaccgcccacgaggatggtaccattgtttttaaaaatgggaaggtggtacatgctgataccattgtccattgtaccgg

SEQ ID NO: 178728 - DNA, 39 bp, Arabidopsis thaliana landsberg
atggccgttgattcaactgatcaacggcgagattttgtt

SEQ ID NO: 178729 - DNA, 461 bp, Arabidopsis thaliana landsberg
catctgaggacacactgaagcctcataagtcgaagctaagagggcagagatcatctcggtcatctcacaagacgatgagcaggtctctatcatctgactcgcaatcaaaaagttcgggttttactcctcctgaaaacatggtatgcattcaaattttttgacatctattccatttgaacataatgcaacaaatcgtaagtttactgatgctatatcatatgctttcaagcagaaggttgatcttagcaaattggaaatgcctgctttactgaattattggcgacattttaaccttgtaagttgaattccagaagaaaaggaagagaagaaacttactttcgttttctcaatcttgttttctatgtgcttgcttctgaagaaactctttgtaggtggatgcaattccaaatccatcaaaggagcaactaattgacattgttcaaaggcacttcatgtctcag

SEQ ID NO: 178730 - DNA, 632 bp, Arabidopsis thaliana landsberg
atgggacgagaccctcttgagattcaacggcttgcaactggactatggtatacagggagaagagatcttacatcaacgctatacacactcctgagggtagcttactctctcattatatttctgactttttttcttcttctagtgttcttaacgtcatcgcacattaccatttttctggttggataggcagttgttctggacgaggggcttgaacctgatcttatagctgacattcagggactcttagaagaactgattgaagctgggctcagacaacggttgattactcttataaaggtattaaccacttgggttctttataagttacatcctcataggtgtccattcttgaatctagtagaaaatattagatgtaaaagtcctttcagacgatcttgtgacttgatattttttgtttttctttggcattactatgtaattattgtattgatagcaaattctttggtgttaggaactcaatcgggaggatcctactggactgggtgggcccttatgcgagcgataccttattgactcaagaggtgctcttgttgaacgaagagctgttgttcagagggaaagattgatactgggacattgccttgttctttcaattttggttgatagacctg

SEQ ID NO: 178731 - DNA, 198 bp, Arabidopsis thaliana landsberg
gagcaacagagggcagcttcgtcggcggcgcaaaagacgatagcggcggcgctctcacaagcatcacacaaaattcgcatggttttttttactcaaacgactagtctcactttcaaagttagcatctttcgccaaacccaaattctgactgttgaagcggaagatggagagactaaagggtttaggattaatggataa

SEQ ID NO: 178732 - DNA, 659 bp, Arabidopsis thaliana landsberg
atgggtgtgatcaggtcagttatgcctgcttttcgcaataaaaacgacaaaatcgctttcgtagttcacgcttctttagccgtttcgggtttcattctcacttcaaccggacgtcctgccttcgcccacgacgctctgtcctcatcgaccactcagtgttagtattggcttcgttttagggtttattttttattttttacaagtttttctagggtttaattagggttcggatttgatcgatttttttatttttaggtttggttgggattgaagggtggaacgaattcgacgaggagtatgcgtttgtttataaatgtccggtgaagagatatctggttaagtgcttggcaatgaatgataaacttcttgttgatgcaatagctgaagatggaaaagaatttggccatctccaaattgagtatgtcatggtttctctttatctctttacttttgcttgaatctcaaggtactgaagctttctatctcttttctttttttatattagagttgggaattatattgatgaatccggcgaggaaggcgattacgatacacaattcaagaattttgacaagttagtgactgagttgaagagtgagattttgtgtaagctaaatactgtttccactacaaccaagtccagctctgagattaaatga

SEQ ID NO: 178733 - DNA, 408 bp, Arabidopsis thaliana landsberg
cagctacccatttaatcatagagatgatcttttcatgtcttctaatgtttattatgaaaccaatcgacaacatcaacatggtcacaatacacgcaacagtcacttgaaaaatcgccatggttatgctcctagatcttctcctcgatcttttaacgtcaacactttcggtgctaaagccaacgggaacgacgattctaaggtttttatttctctaacattataatccaatatctctaacattataattaaatgaaatctatgtttgagccgtaggccttcatgaaagcttgggaagcagcttgttcgtcaaccggaatagtttacattgtggctccaaagaatagagattacatgcttaaagcggttacgttctctggtccatgtaaatcatccttgattatttttaag

SEQ ID NO: 178734 - DNA, 92 bp, Arabidopsis thaliana landsberg
atgggcaggtaccataccactggtgtgttttaatcaaacagtcggcctccccttgtccgctccagctctgaactgactgtgcaacgcccctg

SEQ ID NO: 178735 - DNA, 244 bp, Arabidopsis thaliana landsberg
ggtggtgcattgggatcggatagctggagagagtctgttgataatcttcttctgaccactgcaacaaatgcctgtgaagggagatgggccaatgctgaaacctaccattgtttacccaataagtctacgacggatctagttgagtttcagcttgcagcactccgtgccttttcggcatctctcgtttctccatcacgagtacgccctgcatttttagctgaaggacttgagcttttcagaacag

SEQ ID NO: 178736 - DNA, 130 bp, Arabidopsis thaliana landsberg
gcacaggcgctggccgcccactatcaccggcactactacgccggtgagaacaatattttgctgtttgccggcattgccgaaacgattgcagcgcttcataaaaaaggctgcaaacaggcagttgccactg

SEQ ID NO: 178737 - DNA, 65 bp, Arabidopsis thaliana landsberg
tgccaccgttatgccgtgccgtcaactccgttgacttcaggacaacgctgctcgtcttttactga

SEQ ID NO: 178738 - DNA, 768 bp, Arabidopsis thaliana landsberg
atggctctgatcgatgtcgcgatatcttgtctcaattcgatccgcgaagtaagaaatccgaattctctttttttttttttttttttttttttcatctggtctcatcttgttacacgttttgatctgctgcacctgaatcattacgatttctccatgatctcgttttgctcgtttttgtgtgttcttgggaaatgtaaaagtaccttactgtaatcctgaacaagtaaggtttagatattttggaaatgttttgttttgtagatagaagaggatgtaaaagatgcgattgtgtatatcgatgctggctgcacagaaagttttcaatttgtaggagctttccctttgttcttggaactaggtgctcgagctgtctgcagtcttgaaaacatgacttccttagatgcggtaagcttgttaccgtttctttttttcctgcacaatgttggctaaggaatatcctatcaatcaacggttagtgttggtaattgaggatctagataaagaacaggaagattgttatcctcatacttttggtatgaaggggatctttttacctagaaagtgagaaatcttctgatttaatttatatgatgtgacttttgatgccttgtgctctaggtggctgattggaattcaaagtctgattgtgccaagagaattgtgattatgacatctcgacttctcaatgatgctcatcggtatatgctacggtgtctaagcacccatgaaggtgttcagcgctgcactgtattcacatctatttcagag

SEQ ID NO: 178739 - DNA, 973 bp, Arabidopsis thaliana landsberg
gagcagtgcggcgggcagctcgcagcgctcaccgccagtcattctgaaatcatgacagctcacaacgcatacacggatcgagttgactttctgtccgccggagtatcgcgcaccgctgagttcgagcacgcctcgattttcaaggaggcattagtccaagcatccaaacttcgcaggcgggggcaaatcagcagactccgtcacctcagttgcctcgcgtctctccaatggaaattagaaccacctcgaaccaaaaccaggttgttctgactaccccggcaaatcccgacattcatgtggatggagttgccgcccggactccatcattgtttcgaggggagccctctctcaagcacccgacctcagaatcccctaggatccggatgttgtcagcaatgagcttcagattctcaaagaccaaatttgggccatgaatacaaaggttcatcgacctaccaccgcggcccccgacgttgatagagtaattgaaacaacccgcaggactctgttcactccaaggatctcgagacttcgcattcgtgacttccgagattttaagctccccagctacaacgacaagggagatactaaggagcactttacctcttttcaggttattgccggacgggtacctctcgagccgcatgaagaagacgctggactgtgcaagctcttttcagaaaacttgtcaggaccagctctcacctggtttacctagttagaagaagtttcaatcgacaacttcaaacagctctccaccgctttcattaaacaatatggatacttcatcaaaaatgacgtcagtgaggcccagctttggaacctctctcagtctgctgacgagccacttcggacatacatcactgcgttcaaggaaattatggtccaagtgcctaatctatccgactcagccgctcagtccgccttaaaaaatggattccggcatgaatcgcgttttcgcaagagaagttaa

SEQ ID NO: 178740 - DNA, 101 bp, Arabidopsis thaliana landsberg
aaaaccatcgtattaaaccggtgatattgaaagaaccggatgaagaagaccaacgtcttcagttattgaactggtttggatgtcgacagcaggaacaataa

SEQ ID NO: 178741 - DNA, 280 bp, Arabidopsis thaliana landsberg
atggaggaaggttgtatatggtgaggatcactggccatgtgctatgcttgctgctcctttcagcaaatggattcattccatcagtactcagtgcgaacctaacatttcttggttcatcggcaaagtctcggtggttctcattgaaatcttgccactacttcccatcggctggatgtcgaagcttcccatcgtttttatgctcatcagaagcatgccagctcataagtttgtcatccttagggttagcgaacaaacacctcaatcgatcgacgacggggag

SEQ ID NO: 178742 - DNA, 109 bp, Arabidopsis thaliana landsberg
aagaagaagaacatgctcgcagcttcttcttcatcttcttcttcttcctcttcgtcttcttctgcgaatcttatctacaagagaagcaaatcgactgctgctgcttacg

SEQ ID NO: 178743 - DNA, 74 bp, Arabidopsis thaliana landsberg
atgcaattgattttgctggtgggaccgaaagttatgatgtttcgtgcttgtgttcgcatagcttttgctggaat

SEQ ID NO: 178744 - DNA, 117 bp, Arabidopsis thaliana landsberg
ctgaatgctctatccacgacaactctagcttgcaatcttaagcatcagatcaccatcaccttagctcgattctatgtcaaagcgctacttcgtgtagattttctcgtgccggcttga

SEQ ID NO: 178745 - DNA, 47 bp, Arabidopsis thaliana landsberg
atggcgaggttctacgctacccgtaatcttgagaagactttcacgag

SEQ ID NO: 178746 - DNA, 374 bp, Arabidopsis thaliana landsberg
atgcctttggtaagtgtagtgtgaaaaattcaaggaaacagattatctttggtggaaaggtcttgcccgtatcatggaagccgaaggatacatcaaagagatggataacaaggtacactagtatccaaaaaaccaacctttcttatgatccatttatcggtaaaggcgtaaagctacgatcacatattcggttaaaaccatgttactgatctgtgttgcaggatcgtcgagttgagattaaattcatacaaccaacagaaaaagggaagaaacaactagatttccaagatgacaaaccactctatgtttatccagaagccgacatgctactttcgttgaaacaagatagaacatacagtggattctctgaatga

SEQ ID NO: 178747 - DNA, 1048 bp, Arabidopsis thaliana landsberg
atggatcagatgcagttgtaaccggtggatctcctgtatcagatcaggtacctgcctctgctcaaggactttcttatgtgttggtttaaaggtctagtcctttgtaatgttgaaactaagcaaacagtggatagtgatcatatgttatttttgcttgtgaatttaatatttctggacagtgtgcccaggatgcatctcctatgccattatcttcgcctggaaatcaccctgatacagcagttaatatcgagggtttagataacacatcagtagctgagcctcatataagtggatcagatgcatgtgaaatggaaatttcagaacctggtccccaagtagagcggtcaacctttgcaagtcagtaactgccttgggcatttttaagtatcacctaggtcgacatatgtgattgccaaacagctaacaaggagatgccttttgtgcagatcttttccatgaaggtggcgtggagcattcagcaggtgtaacagctcttgttccatcacttcttaacaatggtacggaacagattgccgttcaacctgttcctcaaatacctttccctgtgttcaacgacccgtttctgcatgaactggagaagttgcggagagaatcagagaactcaaagaagacttttgaagaaaaagtcagtttccctcattacccagttacctcttgttttggtttatttttctagctgcccattgactctcagttgcttgtgagcagaaatcaatcttgaaagctgaactcgagaggaagatggctgaagtacaagcagagtttcgaagaaaatttcatgaggtagaagccgagcataacaccagaacgacaaagatagagaaggataagaatcttgttataatgaacaaactgttggcgaatgcgttcttgtccaaatgtactgacaagaaggtatctccctcaggagctccaaggggtaagtgtcgaataatatagcaaattggttttaaaaataaggcgacgaagtcataatagcactttttctccaggtagaattcagcagctagcacagagagcagcacaa

SEQ ID NO: 178748 - DNA, 1239 bp, Arabidopsis thaliana landsberg
tttactgagtggatcttacgtgaactagatgagtggaccaattatttggatcgcttaaaggatcctaagcttcctgagaaagacaagtcagagttccttcgagagtgggtatcttacagaggtcagacgttagccagaacaggtacaaatgattacaacggaaatcataattgttcatagttattgtcttgtctataggaatattcatttgtgtctctctgattacttctgccagttaggggtatgatgtactatagacaggctctggagcttcaatgctaccaggaagttgcaggggaacaaggttttttattttctgagccagttgccaataacttgaatgctttcaccgaagcttttggaaccaaaatatgatatcttaatttactatatgctacttcttgcagccgagtttagtgtctttcgggccatggcgtccaacgatgaaaatcagaaggctttcctggaacgtgccagagctcttgcagatctgaagttcacttatgttgtttcttgtcaggtctacggaaatcagaaaaagtccggtgatatccacaaccgcagctgctacacgaatattctgcagctcatgctaaagtatgtcaaagtaggattgattttgatgaagtatcatgatatatttgcctaatcttgtcaatcgttttagatatccatcattgcgggttgcttattagatgagagggaggagacagcagatgcaaaatctccgaaggtcttttactctgtacttctaaaaggaggtgacaagtttgatgaggtacaaggatttccgagcaatcttataattttgcttctccgtttttctatcagttactcttttgtatatgatgtttccattatgctgattggatttctagacatggtgttcttctttaacgtgaatggtcttccatattaggaaatttaccgcattaagcttcctggtcctccagctgagattggtgaaggaaagcctgaaaatcaaaatcatgctatcatatttacacgtggtgaagcactacaaactatagatatgaatcaagtatgtattcttcttcaatctcaataggcagaacccatttttggaattcggggtcctcatggttagtactctttgcaggacaattactttgaagaagctttcaaactaagaaatgtattggaggaattcaataaggagcgtgttggtagacgcaagccaacaatattgggtcttcgagaacatatatttactggaag

SEQ ID NO: 178749 - DNA, 106 bp, Arabidopsis thaliana landsberg
atggatatcgggttgagaatttttgtcgttttcgtgcttcttgctgctgtgacagcagaagtccatcttgtgactatggaaggagatccaatcaaaagaaacaaag

SEQ ID NO: 178750 - DNA, 534 bp, Arabidopsis thaliana landsberg
agcatcagtattcgtcccctgtctatcagggtgattggaaaaatttgtggagtacggttgctaggattggtgaaaccatagctggctgttcagatctatggagaaacagtgatagagatgttgcaaagaagagggccctgtttgaacttctcaagttattagaaagtagtggtttgcagaaacacaagtttgaaaatatagaggtaatatacttttgcttgtcgatacttctgtgtatgtttcttctagtcatgctctgtttattaatcatatatattctctgatcatcttcttatgtagatgtcaaatcactttaaagggttgctttatcagccagcatacgatccaaagcatctgttactgctaacacataccaaaagtaacatacatccttccatgggtgtagaagatcaaaacaaggaaaattcactagttgagtggagagtggcaaatgagttttactttaagagcttggcttcagtgcaactcatgttaaatattgaccgaaaacactccgatgtaacagctgagcag

SEQ ID NO: 178751 - DNA, 290 bp, Arabidopsis thaliana landsberg
atgctgaatgctgtgctcatcgcctcattgtgagtctatggctctgtgcagttctgcggagactaagctcgggatcgcgtctgggtgtggaggaggaggagggtgttttggaaaggcaggtgtctcgatttttggttggttcatgccttggtggtatgctgtgatgctgagctttatctgatccaaacaaatttcgtggtgccacaggtgcagggatttgatgccttgcggtcttgcggagtaccacgacgaaagttcagagcgggaaggcggggagaagtgtgataaag

SEQ ID NO: 178752 - DNA, 427 bp, Arabidopsis thaliana landsberg
atgttaaatcggaatagtgaacaacccgatcattccgttaagcggcgacaacaagctcaaggcaaaaccataattgttaagttggacttttcctatgtgataggcccatattttggtggcccattaatttttcccctcagcccacgaagtgttatatgtgttggacccttacattaacgtggcccaagtttgtcccatttatctatttgttataccttaatttattcttgttttacaactttgctgagaacggctggggactccatcctcactctgttttaaaaccaatagttaatttagacaaattccatcccttgttcctgctggatgaatcttttagtgacctagagcaatttccagaattttttaagaccttcgccctctttgctgagaaatcgtgtgtgtttcctattgctctccatagaag

SEQ ID NO: 178753 - DNA, 93 bp, Arabidopsis thaliana landsberg
ccaacacttgtctcggtttcaaatcatgtatcgtttatcaatcctaaagctcctgtctatccacgtcttgctttagggaagaaatgggacgag

SEQ ID NO: 178754 - DNA, 376 bp, Arabidopsis thaliana landsberg
tcaacgaaacgccggaagaaatcagctaagagttcttctcgagagaagggcgttgacatcgaaagtaacactagtggcttagtggagaggaaacggctcttgcttgccccggcgagtaaacggcgatctctgtttatccggcagcttgcttctggaaaatcacatctcaggaacaagtctctcgtcagaaccatcggcaaggtataataattactgaatccaatttccattaattgatttgtaaatttctttatttttaaaatcatactctgctctaattggtcagacatggcgtaaaacaatggaaggagcttcaagagttttcatcgagaagcattataacagacacaggcgtctcatcaacgacgtcgtttaa

SEQ ID NO: 178755 - DNA, 76 bp, Arabidopsis thaliana landsberg
ggtaaggaagttgatctgaattccctagataaaatgtctatagaatatgcagaggccaagaagcgtgcagtcgaag

SEQ ID NO: 178756 - DNA, 619 bp, Arabidopsis thaliana landsberg
atgtgggaacaaagacattaagacaattacaagctgaagacgatgacgaagaaaggtttcaagctgacatgcaaagggcagtgcttcaaagccttggtagtttttcaacatccttgtttatatatctgatatcatgtctgacagttaacattttgcgatattttgctaagtgcccattttgtcactattgtctgactgactgtcatttgtatgaagaatggtgtattgtgtataccacttttcttcatcgcagtgcactttttctttttatctgattactttaggtgtctgaaacttttttttctccagcttacttatgccaacagctgctacgttttattttagaatttttagcatatttgttctgtaatcattttggggtgacaaaaaccctcgatatgaagcatctgacaccagaacatgttttttcaacgcagacgtgtaccaaggaggtagaaatatggcgtcatgtttgaggacaccgctggaagtaaacaatgatgggggtttatctgatgacacaatggagtctaggagctcaacaggagttaccatatttggcacaggtcttcagaatgaagttggcgaatacaattgctttttaaatgttatcatacag

SEQ ID NO: 178757 - DNA, 78 bp, Arabidopsis thaliana landsberg
ctagttggtgcatctgatgttgagcatcctagtcaaaccctgaaaattcgaaggttggaagctatggataatgcatga

SEQ ID NO: 178758 - DNA, 1575 bp, Arabidopsis thaliana landsberg
atggaagaagagtttacaaagctggagatgttagaagaaaactatagcgacttcgatttgacctataactaccttgattggttgaccgtgctgccttggggaaatttcaggtttgtcatgcttcatgctcatgtctcgaggagagttataacaccattttagattaattttcttgtgcactgattgagaagtctcatttataatcattttaatgttgattgcagtggtgagaattgtgatgtcatgactgcagaaaagattcttgacgaggatcattatggcttatctaatgtgaaagaaagaataatagaacacattgctgttgaaaaacttagaggcactccacaaggttggtctctctatatactgtttcttgattctatatagaaaaatcatgtcctcagaattgagttactaatggaagataatttgtcttgcgggtcctcccggggttggtaagactagcattgctcattctattgcgcgtgctcttcaccgtaatttctttcaattctctgttggagggctatctactgctggctaacattaaggtgattaactacgtaattgcgtaatcaatgttgaataaaaaaaatggaataaagaagaagatgttaatctcttgtatttggagaaaaccgtacgaaaagattgtggcattaagcctgaagaggtctaactcgcaaaaccagatatatttacctttcattttctgatgtttgactcaataatctaacataagtgacttcttatgctcagagtgctcttaaactagtacgagaagatacatctgaagtttgaactttgaagtcaaaacaaaatgttaaaattactttctttttttttttctttttttcttcttcttaaattaaatgcataaatcgaccttcattgcttcgttttactaagggttttgtgaaatcttgaagatgtgacataaaatggagaaaaaacaaggatagaaaagggtccaatgaagattgacatctttagattacttttgttttggtatagatctttcgcttaactttatatcgaaatccatcattagcacaaaatctgataacgatcacaaaagcctcatcacgccatcttaaaatcaatcaaattccaaattctttatcttattttacaatttttaattcgttttgaacgtatatatcaaaaggatagatatcacatatcttgtgtgtggtacggtagcgaatctagagatgcatgaatcatactaacctataagatggaaagagtcacaattatttaatattccataaatggaaagccataagaaaaaggcaatacagaccgtaccctacaaagatttcaggcacacacatgctctatgcttgccacatccatatatgtatttgtacgtaccattgacaaaagagaaaatcacgtgcgaatttcagtgttatatattatctcaaaacaaaaaaatagagtttgtgtgtgtgtgtattaaaaagttgtaccaaccccatcaaagtgtgtgaaatgcctaacaagccaaaagatgtgacaggctgacgttgatggtggagtcgatctttcgctttatttttagacttatga

SEQ ID NO: 178759 - DNA, 151 bp, Arabidopsis thaliana landsberg
atgggagagacgtcggatggatggtttacggtcaaatcggcgtatgctctcttttggcggataatgagttacgaagccaaaatatgtcaagcttctttgatcgattatggacagtggaaaaaccagaaaaagtccgagctttttgtggttg

SEQ ID NO: 178760 - DNA, 82 bp, Arabidopsis thaliana landsberg
aaaagaaaaattgacggtcatcaatttaaatcacttgcctgaacaagaaatgattgttaatgtcatcaatccatcctattaa

SEQ ID NO: 178761 - DNA, 335 bp, Arabidopsis thaliana landsberg
atgtgcagcgcgatcaatccggacgtgcgccgcctcgagatcgtcgtcgtccagaacgccattatctccgatgaaagcgcgaagaaggaagaatcgcggctgaaagccaaccagaacgccgtcatcgaagacccgttccagctgatttcgccgttcgacccgcgcttcaccttcgacacctttatcgtcggcaagccgaacgccctcgcccatgcggcagcgatgcgcatcgtcgagtgccagaacgtgccgttcaacccgctctttatctatggcggcgtcggcctgggcaaaacccacctgatgcacgcgatcggctgggcgatgaaacgcca

SEQ ID NO: 178762 - DNA, 2675 bp, Arabidopsis thaliana landsberg
atgacgcaagcacgacctgtgtatgttgcggcgattgatatctcttgtaaggcttatttcttctattttgtgttcgaagctcattgtgatcagtgtagattgtacttgaattgtgtgttagtgaactttcgattgtgaattttgaaagcaatgtgtgtgtcattttgctatggattatgattctagcttgggtttgtatgcttttttgttgttcttatcgatttttggcttgcttatgttgtgattttgtcatgactttggagatagggtgtggtagcagtaaatttgtttcgaattttgttcaaatgttgcactttttgctcatgattatttttgttatctgcagcttctgaggaatttttggagcttacaaaaagtgcattgctagccgctctggaaggtcgtttcataccaaatttaaagcaaggatttactttttcttctgtgtgactgtgtcctgaggaaaacaattctctcgttttttcgtatatgcagctctaagtccaggggctctttttggtcttgttacgttcagtcacaaaataggactgtatgatgttcaaggacctataccagttgtaaagaatgtattcattccccctgatggggagagcagcttatcgctagaacttgaggatgtcatgcccttgttacaatttttggctccggtatggtcattttttaacatcttgtttcctgtttcctacttccttggtcattcaaattgattgtcggatcacatggcttggaatacccgttgacagactaagttctctttctgtacttcctgcaggtagaaacttgcaaggatcgtattgctgctgcacttgagacactcagaccaattacttcttgggagagatcagctggagcaggtcaagggatggatagtgtgttgatgggtggtaggggctttggtacagctatggaagctctattcaactatctaggatctgaatttgggaatacatttgcattaggtatgtgaacttatttagcatgcccatactctatatgtttcaacatagtcgtagtggccagttggtattgttttattgacttgatataagtgcagctagggtgtttgctttcctatctggtcctcctgattatggacgtggacaattggatacaagtagatatggtgaacaatatgcaagtaaaagggtagatgctgatcgtgctctacttcctgaacaaacaccattctacaaagacctagtaagtcttatttcaagattttctgtctccggaatggatatattctttgagcttagatctaacggctcttttataggccaccattgctgtccaatcaggtgtatgtgtagatttatttgcagttacaaatgagtacacagatttagcatccctgaagttccttagcattgaaagtggcggttcactgtttttgtattcaagcactgatgattcaactcttccccaagacatgttagttctgattcttggcattatatttccactccaatagaaataaagcatgctgtgttttctttacttgttaccaacttaattgaagcaaaatcgcatgatcttcttttgtaggtttcgaatgcttaaccggccgtatgcattcaattgtgtcttgagattgaggacgtcaactgaattcaaacctggcaactctgtatgtggttttagtgaaaaccgaaagttcagataatgagatctcttttttttttttttttgcttcagctaacagtttagccttacttgcagtttggtcacttctttccagatgcacagtacgagaaccttcagcatatcatatgctgtgattcatatgcaacatatgcatatgactttgaatttgcagataacactggattttccaggtaaacttaacaataattgctttttcctataaaattttcatgatttggtcgaagggacgatattgatgatgattgtttccatgcaattgtaaagctgctagtcattgattttgtcataatgtgactcttaatacatctgtaattagtcattgtcatgctttccttgacctgcaataaagtaattgtcttaaaaaaaaattatagagctttttactatattattgaatcctctgccaagtcttttaactaatatgataaacggacttggcacttaaagatgcttacttcttgtgctcttttccaggcattctggagagcaaccagtggtgcaaattgcatttcagtacacagttgttgtacctcccgagggactgtcaaattcagaaatgtcatcttcaagtaggtaagattcaatccatgctaaagctgttgattgattgtagtcaaatggggctatgcttattattggaattttttatcgttggaacattcatagtagtttgtatcctagaaatgaatttcataccttgcaaatccatgtcaaagcctagggttgatagtaaacctcgaacctcccttacattaatgaccttatactcggtcaatcccagaacccaaatttgtctttcatgataattaatactgtggatcttgtagtgtttcaatctcggtttgattttctctgtgttacacagaggcaagcacacacttcagagacgattaaggatcagaaccatgcaatttggaactgcccacaatatcaatgaaatttacgacagtgtggatcatgaagttgttctctcattgctcgttcacaag

SEQ ID NO: 178763 - DNA, 221 bp, Arabidopsis thaliana landsberg
atggagaatcgcgaagatcttaactcaattcttccgtaccttccacttgtaattcgttcgtcgtcgctgtattggccgccgcgtgtggtggaggcgttaaaggcaatgtctgaaggaccatctcacagccaagttgactcaggagaggttctacggcaagctattttcgatatgagacgatccttatctttctctactctcgagccatctgcttctaatgg

SEQ ID NO: 178764 - DNA, 555 bp, Arabidopsis thaliana landsberg
cgcctggatctgctggctcagcggcggctgggaaatgcccagggcctcggcggcgcggccgaaatgcagttcctcggcgacggcgatgaagtaacgcaggtggcgcagctccatgggcactccgaatgagtcgaattacatatcaaacgtgtcgatcaatatattggaaataataaaggcccttccttatccttgtcacacaagcccaataacgactttccactttctgccagcctggctgcgcgggccgatttcgctcgccgcgaggcacacccctttccagaatcgaggtgagttgtgagtcactctgccgtgcgggcttcatcggcttccgaacccgccttgctgcaggccgccgaggcggccaaccaggcgctggccggcgccgtgaacgacatcgagagctacatcgagaaaggcaccccggccttcatgcgtacctcgctcgcgctgttctccggcggcttcgccaccttcgccctgctctactgcgtgcagccgatgatgccggtgctgtcgcagaccttcgtcctcagcgccgcgcagagcagcctg

SEQ ID NO: 178765 - DNA, 274 bp, Arabidopsis thaliana landsberg
gtgttgtcagagatggagcttccccgacgatggtaatactcagataatttttgaagcggccctcatagatttatccagaagattttcgacttttcttaagtctggattcgagatcaccagatgggaggagactatccaccgtttcaggactaatcggcgatggctgaacggagtcgacggtgttcaacacgatgcatcgtcagacgctcaaacgcttacggcgcagcttggtacactcccggcgttaaatcacgtgttagcatccaaagattag

SEQ ID NO: 178766 - DNA, 282 bp, Arabidopsis thaliana landsberg
gtcgctaaccacaattccgtccaagacgacctccctcttgaaggtgatgttaacgatgaaggtgatgtaacgattgttgttaatcccccccccacacacacacatgttgttgttgaagataacgcagaggttagaaattatggtgattatcgattatcagtttattttcgcttctataagagagcaatttttgtaaatgtttggtaggtcgctaaccacaatttcgtccaagacgacctccctcctgaaggtgaagttaacgatgaaggtgatgttaatgag

SEQ ID NO: 178767 - DNA, 1738 bp, Arabidopsis thaliana landsberg
atgcccaccacaactctccctggctctatctctcccttcaatgtccctcatagtgttgtgagttttactttcaatgcttcatagttctgatcattcatatgttgattaatttttgcgtacaactttaattttataaaatctttaatctagtggttagttgttcaaagatatcgtgttaatttgggttacatgcaccttgttctaaacctctttccatatataggctacatgtccggatcgatttattcgtctctttcattcacattaagctgatcagtagcttctgcataattctattgttgtatgaatgtctacgttttgaataagttttgaacattttttctcatttgtaaaagaagaatctatgcttaagttgggaatttttttgatgtgtatagaggacgaaaaagccaaatgggcagcagaaaaaggaagaaatagagaaagaggtatgggaatccataaaattagcttacgtacttatgtttatgtctaggcaaacatcaagtgatgtccttataaatatgtatctagatcaaggtattataggtgtccaatcaagttttcggttcaattttatctttataataaaaaaagaaatcgtaaatacatggtattattataatcaagaaccaaacgaaattgaaagattatggtatttctgattctacatttgtagtttttttttttactttttaattatgaggttaatatttttgttgttaatgaaattaaaaaaaagtattgatatgataaatcgttaggtgtggatgttacgagagatgctggatcaagaagaaaagacacgtgagatattggaacaagtccaaaaacatcaacttccttcttcttcctcttcccttactcttcctgcttctctccctcccaaggtacgttttcattagtaacacatatacgtgtatagtgttccaagtttggctagtgtaaaaaagcagcaagactttaatatatgtgatgatattaacatcatacacatatttttggtaacgttgcttttaaaccaagtctctggtcaacgaaaaatattattgttaattaacactattatatgtctacatgaaacaaaatggttcgatcataaacaaagatacatttattgtgaaaataaaaaggtcttaacattttattaattaagcggtaaaatgtttaaatttaccttaacactttgttatgggtgcagatgaaggaacttataacggaactatcaatcgtagaaggagaaatctcaagactagaaattcaaataagccatcttcagataaatctcaagcaagaacaagacgaaactttgaaacaagctacaacaagttcttcaagacgagcatggcaaactagtgagacttacaaggatgacaacataaccccttatcaagctccaacattaccaaaataccctaagctcccacctccaagccctatggtaaacaaaggcatgatgaagagtgaaaacaacaacaccaaatctactacaagtcatcatcaagagaatgcaacatttggtacaaagacattgcatttcatcaacaaagctataaaaggtgattacgcgattgaaagcttccgcaagtctaacgagaaagttggagttgttgagaaggaaaatcatcggtcggtccaacatgaaaataaggtgcaagagaatatgaaaatgaaaaagattaggacgatgaaatcgccttcgcctctacgtgaacctagatatacctctcctaataag

SEQ ID NO: 178768 - DNA, 207 bp, Arabidopsis thaliana landsberg
ttttatcttctcacggtgacggacgttgaagccgtcaaagaaagtgatagctggtcacgaaactatatattgtctcctacaacgttgaaaaagagcctccgttatacaactctagaagcagataatatcgccacgcatgtctacaatctttgccgatcagagtcaatgacgaagccggttcaagtgaaggatttcgtcgccttatag

SEQ ID NO: 178769 - DNA, 719 bp, Arabidopsis thaliana landsberg
atggatgatgaggagccaggtgctgatgaggccacgctaaaggacggtgttgcgccggtgctgatgatggcgcgccgaaaagaggagatgttgaagtagcggcggatgaggatgctccgaagagagaagaattagaggcggaggcagatgaaggagcagagaataaggaaggggaagatccaaagagaggtgttgaaccactggctggagcagctccgaatggagatgacgatggagttgcggcggaagaagcggaagctccaaatagagatgacgatggagttgcggtggaagaggccgaggaagttacaaatccgaaaggagaagaaccaggagcagctgaagaagcattggtggtagatgaaccaaacagcgacggagcaggagcagatgaagaagcggcggttccaaatccaaacgatggagttgtggaagcaggagtcacggaggcagaagatccgaatccgaacgatggagtcgatgaagaagcagaagaaccgaatccgaaggaaggagtagaggaagctccgaatccaaacgatggagtagtggaggaagcaggagttgatgatacggaggatccgaaaccgaatccggtggagctagggtttgaagattggttaaaggagaaagataacggagaagtggtagatgaagcagaagaggaattagttgcagaagaagatccgaatgagaatcctccaacggaattggattga

SEQ ID NO: 178770 - DNA, 726 bp, Arabidopsis thaliana landsberg
atggtggttcgaagaaaggaaacggcgtgttcacggcggaggtttgcggtggcggcggaggaggaggttcggaggtgaagaatcagaaatcaggcgcaggaattgagccgaaatcgaacaggcagagaggaatcccggcggaatcacccggattaggcggtggtgaggttgcgaacgagaatcacaggctttgggttgctctagctcgagacgagatcgaagaagatttgttcagcatgagtgggaacaggtcatctcgccggccaaggaagagggcaaaagctatgcagaaacatctcgatgtaagtcaccaggtgttcgacgaattgcctcacagagaatttagaacaatgactacgcttttatagtgtctccattttcttaggcaattcaatgtctgccattgtaggtcattttccctggattgggtctcgttgggatgaatgctgattgcttcagagtagccacttctccggctaaggttagctttgatcagtccacttacttgctcgatgaaagcttggatcaacctgccctttagctatattgatctgtagatagtatgaaatggatgaaagtctagacctttagtgctataacagaatgatacgaaatggatgatagtctaatggtactgctgctttaatgatacaaaacccgtaacagcgattgtattccatttgcagtgatgatcgatgcaaaggagtcttttggcgaaggaaaaag

SEQ ID NO: 178771 - DNA, 247 bp, Arabidopsis thaliana landsberg
atggtttgtgcagtttctccctcgcaaaggtaaaccgagaacccaaatttctctttcagaaattattccaccctccctccacttttctgcaaaatgaaattgcatcataaattgcagttgtaggagtgaaaccttcagcaccttgagatttgctcagcgtgctaaggcgatacagaataaggcaattgtcaatgaagtaatgcaagatgatgtaaatttcttgcgggaagtgatacgccagctgagg

SEQ ID NO: 178772 - DNA, 124 bp, Arabidopsis thaliana landsberg
aatctcagagtgcggaagcagggggaactgagttcttcacgcggtcggcaaccaagttcaagggtgccctggcccagaagttcatgtttgtggatggagaccgggctgtgtgcggctcctacag

SEQ ID NO: 178773 - DNA, 123 bp, Arabidopsis thaliana landsberg
atgaatattgatgcgcagagaaggccatggtgtccgtctaaaaaacaagtgttcggtggttcgtgtggaaatgatggagcacaacaatgtctaaataacttattaagtacatgggatccaagt

SEQ ID NO: 178774 - DNA, 156 bp, Arabidopsis thaliana landsberg
atggatttggcactacaggtaagtagtactcaacacaataacttttggttcctatcccaaacatttttatcatgatggtctacagtagtcaactgcaaaaaatctgtgatttctaaccatgcttgatctgttctttcttagagctaccggaattag

SEQ ID NO: 178775 - DNA, 522 bp, Arabidopsis thaliana landsberg
atacctaagacctcttgtggcggatatagcagttgttgccaaatgtcgactgagtgccctatacaaacatgaaaaagggaagcttttcgcccaactagttgacttgttacagttctacgaaaagtttgagataaaggatcatgatggaacacaattaactgatgatgaagcacttcaatttcattacgatcgttttatggcgtttcagctacttgcctttaagaaaatacctaaggtattgtcctggtaatcatggttaattaatagataggtagttttgtgtactaggtatttttgttatgttactattggattttgaagtcattgatctactctcttccttattttctaatattttttggcaaacgcttctctagattctcacatttgtttttatctggtttgcttcagttgcaagatctgtctttggctaacattggttcgattcacaagagttctgatcttcggaggagattgtctgtgctttctcttgaagatttaagggatgttgtctgctcaaag

SEQ ID NO: 178776 - DNA, 114 bp, Arabidopsis thaliana landsberg
atgggcgtcagcggtgggtcccactatgtcttcttgtctcttctctgtattctctgttcactaggaaaactccaggaatcccgcaatgtagctcctgttggtcgagtaaaatga

SEQ ID NO: 178777 - DNA, 215 bp, Arabidopsis thaliana landsberg
tctttcaagcctctatctaccatatctggcgaaaaaggaatgcacgacggcatggagaaatcagctcacctacaaaccggctcatcaaactcatagacaaaactgttcgcaatcgaatcagctcaatccgagacacggaagatcataactacaacgactgtatgcagctatggttttccatgaggcagcctcattcttccccacaaccactatga

SEQ ID NO: 178778 - DNA, 61 bp, Arabidopsis thaliana landsberg
atgcattataggactgacaaacctgcgaaaattttggttcggttaaagaatgtagtgacta

SEQ ID NO: 178779 - DNA, 103 bp, Arabidopsis thaliana landsberg
atggccgacatcctgcacgagatccttgagcgcctcgagcggttcgcctggatgatctcggtcgagaaccggggagccgggcacagcacaccgagcccgatct

SEQ ID NO: 178780 - DNA, 162 bp, Arabidopsis thaliana landsberg
gataaacaaagtgttggggatctagtaaagctcatcgaccagagcaatggatacatatttgccggcattgatgcaagtgtggttgaatgcagcaagattgcaattggtcaaactgattgggatgataacagatatccttttttagcattttggatttcttaa

SEQ ID NO: 178781 - DNA, 343 bp, Arabidopsis thaliana landsberg
  unsure (1)..(343): unsure at all n locations
atggttttggacggtgaagaccttcggcttgaaagnnnnnnnnnnnnnnnnnncccgcttgcggattccgcctttagcctgaccgacaatcaattgatcattccgaaggcgcccaaacacggggtcatcgagatcacggtcacgattcagccttcaggcaatacccgccttgaaggtttgtacatgtccaatggcaattacttcacacaatgcgaggcgcaaggctttcgaagaatcacctattttcccgacaggcctgatgtactcagccgattcacggtcaaattgcgcgccgacaaaggcacccatccggtcaccttgtccaatggcaatctgatcgaca

SEQ ID NO: 178782 - DNA, 826 bp, Arabidopsis thaliana landsberg
atgacatttattttagaaccaaacctggttctcagaaatccctttgggccttggcccttgaaattaacagatcgaatcgttttcgtcttgtccaatcgctccacagtcgtgtgagtggaagattttagttattaggctctattatggttcaagttgggtaaattaatgtaagcctattttacaaaactattgtggtgggatactattgctttccatattatcgaaaattctagtggcttgaaaaattgtattttgaggcaaactagtaatgtttttttaatattaataatttaattttagtaagtgttattctaataaaaaattcaaacaaaatatgtaaacataatttaagcaatgaaatcatcttttaagaatcaattaagtagaaattttggaacaactatatttgaagacaataagcaaaacaaaagcaaaagagaagcaaaatataagcaaaaccatagcaaaaagtagtaataaattatttttaatgccataataattagtttagaaattataatttttaaaaatgtataaattgtctattataattcttttttataaaccactcatgaccatcaaagcacgttgtaaaccactcatgaccacttatcctacattttcgaaaaactgttcatgtgacttctttattcaacttatattgatactatatttttttataactagagagagtccagatggagacattattgaatgcatccatacgagagatcaaccttcttttaatcatcctctcctttggcggaaagattggtttcccacaagaccggagcagcggaaagagtcactggaggacacgaggcaa

SEQ ID NO: 178783 - DNA, 1362 bp, Arabidopsis thaliana landsberg
  unsure (1)..(1362): unsure at all n locations
gctttggatcatgtaatcgcagaggccaaaacacatggcgttaggttgcttctgagcttagtgaataacttacaagcttatggagggaagactcagtacgtcaattgggcatggcaagaaggtgtatgcctcatctcctccaatgattccttcttctttgacccatctatccgcagatacttcaagaattatctcacggtatgttttttttaatcttatctcttttctatgtgaacatggatgtgttacagtgttagtcttaatcatcatagttgaattagatactgaattcagaaacattgttcacgcttgaccggtagacttggataagtttccgctcaatagtttttcttcacttataggctttgatttttcatggttgtgtaattgatgttgagcttgtaattactctcatttccatatgccaggtgctgctgacccgcaaaaactctttaaccgggattgagtacagaaacgacccaacaatttttgcatgggagttgataaacgagcctcgctgcatgtctgatgtctctggggatactctacaagtgagttctccttcattttggtggttttcttgtccagctttggatcattagtaattgttgaaaaagttagtaatgttactcttgtggtttgttattctggtatgtggatttaaaggactggattaacgaaatgacagcattcattaaatcaattgacaacaagcatcttctaaccgttggcttggaagggttctacggtcccaatagccctaaaaagctgacagttaaccccgaacggtgggcctctgagcttgggtcagattttgttcgaaactctgattcgccaaacatcgattttgcctcggttcatatctaccctgatcactggtaagnnnnnnnnnnnnnnnnnnnnnnnnnnnnnnnnnaaatcttgtttgtaaacacaaagtttggaaactttggcaggtttcacgatcaagggtttgaagaaaaactcaagttcgttgtaaaatggatgctatctcacattgaagatggggacaaggaactgaagaagcctgttctgttcactgagtttggcctctcgaatctgaacaaggactatgatccatcgcagcgggatcggttctacagaaccatctttgatgttatttacaaatcagccaagcggaagcggtctggtgcaggaacactagtgtggcagtttctgatagaaggcatggaaggtttcaacgatgactttggaatagtcccatgggaacaagactccattcagagattaatgattgaacagtcttgcagattgagtcgaatcactggacgccatcttcttgacaaaaagtccatagaaatgtgttcccatagaccatga

SEQ ID NO: 178784 - DNA, 15 bp, Arabidopsis thaliana landsberg
atgaagctgctaaag

SEQ ID NO: 178785 - DNA, 148 bp, Arabidopsis thaliana landsberg
atgaaaaatacgagaatcaaactattggccacagttcacctgctccaaatctgttgtagtgatgatttgtgtctagacattaaagcaagagttccaactctgttgtcgtcctctgtgacactatcatcggaccggtatcatcggaccg

SEQ ID NO: 178786 - DNA, 241 bp, Arabidopsis thaliana landsberg
gaccaatcaagcaaaccaatggttaccttcttgttcacgccaatggtggtttgaatcagatgagaactggtgtaagcctcttcttcttctctatgtttccacttccagtataagagattttctcgaatcctcacttcatttcttcttcacagatatgtgatatggtggcaatcgctaaaatcatgaacgcaactcttgttcttccgtttcttgaccattcatctttctggagtgatccaag

SEQ ID NO: 178787 - DNA, 708 bp, Arabidopsis thaliana landsberg
atgcccaaattcgcgaagatcttcaacatatgggcgcttgaactcgggtagaagcaaaaagccatgtgttcgatcgcttgcttgaccggctgagcgcggactggccgcggcagcgcgcgccccacgcgtggtcgccctaccctacgcgcctgtgtcgtgccctcgcctataaatgcctccagaggccttagccgttggcacttgcacaccccgagcctcgcccgagccagagatcaccggagctcgccgtgaaaagcgagcaccgccgcccgccatctctgcccagactcgggcgtcgtggacagtctttgcggatgaatcccagtctcgccctagccccgggatagcttcccagtgaagccgtgaagcattctccaagcttgagccgaggcatctgctcacaggagaggcggctttacctcaccggacttcggtcttccgccgccgcgcgtggaccgagctatccagtgagtctccgcccaattcttttcgctcatgtcttctctggcatcccatggacctccctgacctatttaattgaactacctcgccgtgaccaggccggtctcctcgccgccgacgagcatccccgcctgcgcgcgtggaccgaccaactccggccatctccgtcgacgttccgcacaccgttgtgatccccgcgacctccccttcgccctcgaccacttcaccggaacagtctcgccgtcg

SEQ ID NO: 178788 - DNA, 945 bp, Arabidopsis thaliana landsberg
atggtttcacattggcgctacaggtatagacaagatgaggatgttgtagaagatgattacgtggaaggtgaatgggatatacaggctgataagaaagaggttacagatcttattgctgaagataaagccacaagttcaaagaagagcaaaaacatgggctgtgaaggtgcagagaaaaggaagatgaaactgttatgtgaaagagccgcaatgacaaatgcttttgatagtgttgagatgaagagatacatcaaagaaatgtttgaaatttttttcgagcagtttgggcaagaagtaggcaatttttttcgatgtatcaacactcaaggaagttatgaccactattgcatcaatgaaggaaacattgactactactgctgagacttcattaaaagaaaagccaccttccattaagacaaaagcaatggtacgttaaaacaaaaactctcccttctctgcttttgtagatgtatttgtaatttgtacaacagacatgtatttgggctaattgtgtttgttatgttgtattttttgtactatcaaacactttaactcggctatttagtgacttattgattgtaatagtccttgatatctattgcaattttaagactttgtaaagtttatgtcctgtgatttttacattttctttgttgtattgacaggagataaatgctttgtttgatgaatattacaccagtcagggtgaacttgacattgaccttaatttggattcactagaatttcttcaagaagaaatgggtcatctttctcaaaaaaacacaggtacccggatttgatcaatcacagagtcaaacaaaaaaactctttcgatttcgactggcgttacaaaccagactcggggaagaatgacccagatgctattttggtgtacgtacctgaagctaaatggagtgttttcgatgaatgggtacgcatcttatg

SEQ ID NO: 178789 - DNA, 262 bp, Arabidopsis thaliana landsberg
atggggcatgcgctcgatgtcggccacatcatcgacgcgccggaagggtctggaataacgggcaacgccaatcctgccaagatcatgaacttttccatcaactataatctcaggaggatcagccccgattattcggcgatgatgggcgctgcttacacggtgaattccaaagtgggcggcagcgcgtatggcacctgcctgcctgccaatgcggacatgacgccgttgcctgtcagcgtcgacgcgcgggatggttgcgccg

SEQ ID NO: 178790 - DNA, 160 bp, Arabidopsis thaliana landsberg
aatatcagagtttttcgaagaagaaagcaaagaagaagagattgaaaaaatgagtgtttgggagaaagaaaaggaagaaaaaatactctcgtgttttgttgtttacaagaagacgatgtcgtttagagtaaaagaagaagaaataatttttttcctataa

SEQ ID NO: 178791 - DNA, 372 bp, Arabidopsis thaliana landsberg
cactgcgagtcacgcaacaagcgcatgtacttctcaatcaatgaatggccggcccatgggggcgcgaggggctcagctgagaagatcctcctcctaccgcttctaccagagtgcagtgaccgccgacacaagcagacagcgaggccatggaccctccggcgaaaacctgttcccggagaaaaatctgaccataatgaccaagacgcgagctggctggccaccaccacaccaatccccgtcgccgtcgtcacccccatgccataccagtgtccgggcacagcacgatttcagagcggctcactccggcctggcacgttcacgggaaccgccgccctggactcgccaccagtccaccaccacccggccaacctc

SEQ ID NO: 178792 - DNA, 842 bp, Arabidopsis thaliana landsberg
atgaatgatctcaaacacttgcttctcgtaagtctttcacacacaccaatggtaagattaagatattgtttggatgcaaatatcatcagtttacctatttttgtgacaggatgtgtttgttgcgggcacagacacaaactctagtacaatggaatgggcaatgacggagttattccgtagcacggagaagatggtcaaagcacagagtgagatacggcaagtgattggtcaaaacggtttcgttcaagaatctgatatcccgagtctgccttacttacaagcaattgtgaaagagactcttcgtttgcatcctgcagctcctttgatccctagaaaatcagaatccgatgttcagattatgggtttccttgttcctaaaaacacccaggtttttctcatacttatctttattacaccaacattcattacttgagatattacaccaataaaaaagtttggtttggttaaaatcttccacctctgtttctcgagattaggttgttgtgaacgtatgggcgataggacgagacgcgagcgtgtgggaaaatccaatgaagttcgagccagagaggttcttgttacgagaaaccgatgtaaaaggcagagatttcgagttgataccgtttggatcaggaagaaggatgtgtccgggaatgtcgatggctcttaagacaatgcatatggtgcttgcctctcttctctattcctttgactggaagcttcaaaacggtgtcgtccccggaaacattgacatgagcgagactttcggtcttaccttacacaaggccaaatctctttgtgccgtacccgtcaagaaacctacaatatcgtcttcttattaa

SEQ ID NO: 178793 - DNA, 124 bp, Arabidopsis thaliana landsberg
tcaccaccatcggaggtcgcactgtcggatcttctccacggcagtaaattctgcgttctctcttctcaattcgccgccgatctctatatctctctctccgagcgtattaccaaatcgtgcttag

SEQ ID NO: 178794 - DNA, 119 bp, Arabidopsis thaliana landsberg
acgccattgaacatgaaattcagttgatcggagaaaagattcagaagaagataaacgaacaaaatcgcttctccactcaaattcaaactcgttttgaagaaattagaaatgaattttga

SEQ ID NO: 178795 - DNA, 1552 bp, Arabidopsis thaliana landsberg
atcaatgttgtctccattctaagtggacaagttaatggtgacccgctggatagtgcatcaggggttgaggacaatgatgatgcaaatgttgaccacatgattcatctaataggcaagggatacaaatttactgcttccatgttggtggtggtctgttgcctgactccattccggattataaacatacaacaacgacgtttgtagcactcatgattccttggatgaggtaaatgttgatctgtatgctaccatggatggcccagaagcaaaaagcaaggtagatctaatgaccaaatttcatcggcgatgaagcaatacgttgatatgaaagacaagcagtcagagaatcgtatgctgaaggcaatatctgagtctgagggacgtttgactcagttgataatgaaagctttttcagccccaaaacaggcggctagcaatatgccttctgacatatgtggacatgttggtagttcaaagaatgtggttgatagttgtggggaagagattagtggtccgaagaaaggtagtggtaaggagattctatcaagtgttaatcacattgtggcatttggttctacatcagtcgatgcatacggtgctttgcacttggaccatgttctggattcagttttgccagaaatcaatgttgctgctgtgaaattaccagagcctactttgcgtagacctgtggtaagcaaactttttccgatgctagacttcaatctttgattaccattaaaccctttatgcactttgtttacaagtgcagaaaaagccaagaagaaacagtcgtaccacgacaattgctccaccaaaggttcgggcagataaaccttctcttgaaactattattgaagctgctcaaacagagacaataactggggacggaaaaaacaaccctacttgtcatgatggtgtttcatcaccaactcactttgaaggtgccaattttgggaacactgacgcatccaatgtgagatataaccttttaaatcttttagtttatgaattattaactgccagacgtatgaaataatgtctctattttgttcatatatgttttagccgccatctataaatccatcatcagaagtttgcgcagagatttccattgattccgcaaggagaatcccttggttgaagactccccatgtgagttaagtgatgcgcatcgtacagatgaggagccagcaggagacggtgctgcaaaggaggtgcctattgcagatgataaattgcctaatggtacaaaggaggtggtgcctaatgctgaggagaagttggccaatgcacagcagccactagaggtatgtagtaattatcatatgttttgagctttaaattgcaacatgtagtacttctatatgaacatatatggaatatttgtttgtttattaactagtcatggattagtattgcaagtaaggttatatttcccactgtcattcaagtagaagctgagagtgttgaaactgatagtgttttcccattctcattcatgtagctaaagagtatagaggagaagctccccgttacaggggatccacgtgag

SEQ ID NO: 178796 - DNA, 770 bp, Arabidopsis thaliana landsberg
gcgtgaggagtcactaccaatttttaaaagacgactttttggtggattgctagactttgctgccagagaactgcaagctcaggtaacgtattccttgcgtttttttttcttgtcttttatatattattatatagattcttcttcttattattgaaattaagagtcttaatgccttccatagttccatagatcgccaattccttcctttccttgaaagaccttttccagtgagctattaaatggctatttaagttcttgataaaggaaattgtagagtgtctgttttcttacgaatgcacaatatagataaatttccagggagtttgcttgcaagaaaacaatgctgtaaagctttgttggtgatatcagattatccattccagcatgtggtgtgtgttcgcctgtcttgttatactgggatagaactagatttttatctacacaatcgttttttccctcaacagactcaagttattgctgcagcagctgctggtgttgctgcagagggtctagcaccaaaggatgcaaaagcaggagcagaaaatgctgctcagctttctgtttttctggtggaaaatgcaatcgtgattttgatgcttgtcgaagatcatttgcggtcacaaagcaaacagacttgtgcaaccaatgcagttgcttctccatcccctcttaaaaaacgtacaagcacactgacagcgatcggagaatcatcagagatttctagcagccgtgcttcactgtcaagtgattcagggaaagtccctttagat

SEQ ID NO: 178797 - DNA, 409 bp, Arabidopsis thaliana landsberg
acggcgaattcaaagacattttcctcgagaatacgcccaagctagttgcaatatcggtttcaatgtacatgcatgaggatgttactgattttgagcagagttcggattataatctcgttaagttccttggtggtgtgccccttcttgagaagctcgtcggttatatctacttcacaaaggtaattttgcttcatcctaaatattttgagcaattgccgttaatgaaaaaaactcttttctttgatctcagtacttgagtataggagatgacccgggaaggcttccacttacttacatacatcttaaaactatagaactttaccaagtatgctttgaagatgccgatgaggtgctagttcttcttcgtttggtcactcactctcccaaccttaaagagctcaaagtttcg

SEQ ID NO: 178798 - DNA, 1425 bp, Arabidopsis thaliana landsberg
atggtgtcgtactgttcttatcacaggtaaatgctcttaataccttgcttgtaaaatcttttccatttgattttgtgtaatgaatttgttctcttttttttggtgtagggctccgaatccagatactgtgttaattatacagacgccttcaggggtcttttctgcgaaaagtcttgttcaaaataaaaagaaaacgggtacgaggcttattttagcaaacagagaagaaattgaagagtctgccgcagaggataccatagtaattgatccattttcttctgctcgttgtcgactatataaaagaacggttaatagcaagaaggtatctttgttgaaccttcaaaaactctgtatgcataggtttaaaattcttttttgcttagaagactgatgcattatgtgggtgtttgtgacttttagaggactaaagaagaaggtattcctccctacacaggaggaatacgtcatcatccttacgcagcgatccaaactttgaacgcattcagggtaaaaaataatctttctgtagtgccaatatgcataatgcacctggaataggcaacttgggactgagtcattttgttgaatataatttgtagcatgtggcagaagaacccaaatcattttcctcgttcagggaacggcttcaccacttgcaggtaagcattcctcgcatatctgaaggagactgtactatatagttgtatcttgttgtaataacatctgacaagtttcatgtgttgtgacagaggacagaaatggaacgggtctgctttggtcgatctggtatacatggatggggcctttttgcgagaagaaatattcaagaaggagaaatggtaagcagagccatcagaacatacttcttccaagaaagacaatctatcgaatttcctctgttgtgttgaagaatgttgaaatgtaatttcttttcaggttcttgaataccgtggggaacaagtgagaggaatcattgcagacttaagggaagcaagatatcgtagggaagggaaggattgctacgtgagttgaaagtgatatatcccttgtgacagtcttaacatgtgtgcatagagttctaaaactttattgttttaaatttgttgcagctgtttaagatcagtgaggaagtagtggtggatgcgacagagaaagggaatattgctcgactaataaaccattcggtaagcaacccatcaagtatataaataagttgagtgattaccaacagattagagtcttgagtcctatacctaaatggtgtgttgtgtgatgcagtgtatgccaaattgctatgcaaggattatgagtgtaggagatgacgaaagtcggattgttctgattgccaagaccactgtagcttcctgcgaggagttaacgtatacacatcactctcttgaacataatttaagtatcaccctttga

SEQ ID NO: 178799 - DNA, 1324 bp, Arabidopsis thaliana landsberg
atggagagagagtgtgaagaaggagaaatggagaaaaagctgagacgaagtttcatgggctatactaggagagctggtccttccactcctccacccacctggcggctcgagttttcgccgccacgagtcggagcgaccaaggagtttttggcgaattcggaggactctgtccggaaattgtgtgctgatttgtgggaaactgaacaattccggcaaagaattgagctgcgacggtgtcgacgaagggattcagatgtggaatcgcattcccgtagcccgcttcacgatcatgtaaacaattttggcgcttttgatttgcttgaatgtttttgacgggtttatgtagggttttagtcttcttgttttgataggtcgtaaagttgtgatctttacggtgaggttagagtatattcgaccggaaaaaatctcatttttgcgcaaattccaccgagaaaatctcaaagtattgttctttatgatgtggtcttttgctcgtctatgcacaaatttcattggacaaatctcatggtcgtaaagttggctcgtaagtgtgtttagtatttatatatgagttttaatttgcagccaccaagcagagctagcttgaggaggcaaattgcagcaactgatgattatagaaatggtgatctgttgcaacctatctctcctgcaagttgcagcagcagcagcagttcattgcaggtgaagaaaacaaagttttttgctctttgttcactcttaaatttaaccaaggaatgcttttttacaatcttgttttgagctggatttggtgtgtgttggcttaatgtgcttgtaggttgtggtgcgtaagccagcgtttagtcagacaggttcttcggcggttaagtctgcaagctatggtttgggttcctctacaaagcttctcaaggtgctaaaccggatatggagtctcgaagaacagaatactgctaatatgtctttggttagagctttaaagatggagttggatgaatgtagagccgagattaaggaggttcagcaacggaagaagctaagcgataggccactgaggaagaaaaaagaagaagaagaggtaaaagatgtgtttcgatccataaagagggagttagatgatgagagaaaagttagaaaggagtcagagactttgcaccggaagctaacacgagagctttgtgaagcgaagcattgtttgtccaaagctttgaaagaccttgaaaaggagacacaggaacgtgttgttgtggaaaatctctgcgatgagtttgcaaaagcggtgaaagattatgaagataaggtgagaagaattggcaaaaagtcaccg

SEQ ID NO: 178800 - DNA, 520 bp, Arabidopsis thaliana landsberg
atgacgaaaaacccgatgcgaagaagcttttcaggaactcaaaaagtacctggcgaccccaccaatcctcgcgaaacccataatcggggaaccactttacttgtatgttgccatgtcggatactgtagtcagtggagtgttagtccgagaagacagaggtgaacaaaaaccgattttttacgtctcgtagacattcaccggcgcggaatctcgctacccgcaaatggagaaactcgctctagcagtcctaatgtcagctcggaaactgcgaccctactttcaattccattccatcgtagtaatggaatccatgccactctacgctatcttacacagtccaagccaatcgggacgcctggctaaatgggcaatcgagctcagcgaatatgacatcgagtatcggaacaaaacatgtgcaaaatcccaagtcctagcagatttaatcatcgaactacccacaaaggaggcacgggagaacccgctcgacacaacttggctgctacatgtagatggctcgtaa

SEQ ID NO: 178801 - DNA, 54 bp, Arabidopsis thaliana landsberg
ttttacctgacctatatccaagatgatatcatcaacgacttgtcggaagactaa

SEQ ID NO: 178802 - DNA, 101 bp, Arabidopsis thaliana landsberg
attttcgtcatacgaagaaagaacagagaaagagaagaattagcaaaattatttccaaggaaatgatatacgttcccgctacagaaagtttacgaggttga

SEQ ID NO: 178803 - DNA, 315 bp, Arabidopsis thaliana landsberg
atgaacaaactcatctcccgtatgatccttctcctcaccactctccgcctctctttatccctctcctcgccgtcgtacccaacggtccacgacgttctccgatcagaaggtctcccggcgggacttttacctcaagaggttgattcttatattcttcacaacgacggtcgtctcgaggttttcctcgcggcgccgtgttacgctaaattcgagacgaacgtgcactttgaagccgtcgtaagagggaatctgagctatgggagcctcgtcggagtagaagggctatcgcaaaaagagctcttcttgtggcttcag

SEQ ID NO: 178804 - DNA, 307 bp, Arabidopsis thaliana landsberg
ttgaaggatgtttccactttactacgccgtgagaatgctgcaacgatccgctactactcgaatactaatcgagctcctctgaacagagaaggtaatattatccttttgaggtagaaattttccatttgtacttttgtatggttttatggttagtatctgtgagactctctgcttgttgcttcagcttttttttttgttatggtcttcagatactttcaattcccgtcttggttatcccccactggagaggatttccatatgtagcaccagcactgttttttcctcacgggactctgtagctgtgtag

SEQ ID NO: 178805 - DNA, 379 bp, Arabidopsis thaliana landsberg
ggtgtacgaggatgattcagctaggagacagatccagctaaccaatgcgggctatggacatggtggcatagacacaacagcagcaccgccaaacccattccaaatgcaacaagatccttttgcaatgtccaacaacattgctcctcccactaatgttcaaatggcaatgcaacaacaacagcaacaacagatgacgatgatgcatcagagtccctacaattacactcatcctcatgattatcatcaaaatcatcatcatcatcagttctcagccggtccttctccttctaatccttttggagacgctttccttgccctcccacctccgccaggatcagctggtccgcaacaaaacaaccatcatcatatgctcctctag

SEQ ID NO: 178806 - DNA, 111 bp, Arabidopsis thaliana landsberg
aacagcgaggcaatggtctcaatcgatatgcctgctggtccttcagaagtcctagttattgctgacgaacatgctagtccagtttacattgcagcagacttactttctcag

SEQ ID NO: 178807 - DNA, 59 bp, Arabidopsis thaliana landsberg
atgcagtcagcggccacggttaaagtaccgcggaccggtccaggtggttcccagccacg

SEQ ID NO: 178808 - DNA, 498 bp, Arabidopsis thaliana landsberg
atgaagtcacaaagccataagccatggaatctagtcgccggaatcttctttccgatcatcactttcttcctctcggctcctcttgtcggccacgccttgtatctcttctgcatgcgtaacgaccacgtttactaccgccacttccaaagtacgttaccacgtgtacaaacactcgtcagcgtctctctcctcgccttgttcctccttagcaacatcggtatgtttctccgaccacgacggctcagctacttcctagttattgtcttcttcataggttttgcttactccggtgtgtacaagatggaaagccggcggttttctccgacaccaatgtgtttcaagggagaatataataatggacaaggagaacgtaaaacagaacaatatcaagtggttaagatagaacaaagtcaaggacgcttgcaaagagttcacttgcggtttgtcaacagctatgccttgccaccgtatgatagaagattgttaccatctgttaag

SEQ ID NO: 178809 - DNA, 557 bp, Arabidopsis thaliana landsberg
atggggtataatacacctgttcaaggacttgttaatgagattgaacacagtgaagagtctggagatatcaatgtagtgactaagagaagcaagaagcgaatgcgggtaagcattaagcattaattgaacataatgactattcatctctcaattctttttgtattattgacaattggattcttttgcagctatagcacttcatataagtaatattagggtgtctacgtccaaattaaatggatggggactgtcatccgcgaagaaccgacattgtaatccaaaatctatgcagcatgtttgtgaagccgatgaaggcaatgatgggtgccattatactgataagaatgaggagcgaggagacagtgatgaatagcgatataggcagggagactggtcattttgaagagtgcgaagatagtgatataagcaatgagagtgatcagagtgaagagcgtggggatagtgacgatgatggtataggcaatgtgactgatcaatttgaagagtgcgaagatagtgatagaggcaatgagattgatcagaatgaagagagttga

SEQ ID NO: 178810 - DNA, 213 bp, Arabidopsis thaliana landsberg
gaacaacgagaatacatcacaatcgtcgcatataacttcgaaattgtaagtttacaacactattctcaaccacaattcgcagaaagccaacaaaacagatgcccagaaatcgaactccatctctactcgctacataagactaattacaaccaaatctcgcaattcccgataaaagcgcacgaaatcagcgaatatgaacaaggctatcactaa

SEQ ID NO: 178811 - DNA, 374 bp, Arabidopsis thaliana landsberg
ctcaaggttatctggaagaagttggatatcacccagtgcaatgaccgggagaaggtcttgtacgcctcgggaagacttgagggagccgtgtctgattggtgggatgccttcacagcagcacaccccaatgcagatataccataacctagcaggagttccaagtgaacttccatgctcatcatataccctcaaggattatgaaactcaagaagaaggagtttctttcccttattcaagggaatatgatcgttagtgagtaccgtgattgcttcacccagctttcacgctacgcatcggaagaagtggatactgacgagaagcgccaagagcgtttcttagaaggattgattggaccactgaactatcaactatag

SEQ ID NO: 178812 - DNA, 123 bp, Arabidopsis thaliana landsberg
ctactaccgcttccggattctccactgttacgactcaaatcgttgagaaaaaccggcagcattgcgccgccggcaaatggagatgatattaactcaacaccgtcgtcgattccatcggcgtga

SEQ ID NO: 178813 - DNA, 1274 bp, Arabidopsis thaliana landsberg
atgtggagtccaagcttcagaaaaaactcgtctttcgatgaccagtttgaattcagcggaccttatagctcaatgatcgaagtgtcacacattcatcgaaaccgtaaaagacgcgaccttgacctgatgaatcgaaacttcaggtcagcctttaaatatcagctttccaaagtttcctttgttctttcaattcaattcttgtgctgatagtagtcattggtttatacttatacagcttacttcttaagcaactggaaagtgttgatccgagaaaactgactcatcaagagaaactggcgttctggattaacgtacataacgctcttgtgatgcatgtacgcggttttctctctggttctttgatctaacctttgtcttctttttactgtcatctcttaacttataattggttttcaccattgcagacatttctggcaaatgggattccacagaacaatgggaagcgatttttactactctccaaggtaatgatatcaacttttttcttggtttgcttcaaaaacattggttgaaaacattaacatttttgaatgataataaaaccttttttttttttctctgcttaacatttttcagccagcttacaagataggaggtcgcatggtaagcttagaagcaatacaaagttatattcttcgtatcaagatgcctcgtcctagccaggtagggctgacttctaaagtatctcaaaaatacaaatggtctatgtgactatgtctaaagcttcctctgtttatgttgtagtggctgaagttattactcatacctaaaaaattcagaaccggagatgaacatcaagaatattccctcgagcattccgagcctctcttatactttgcactttgttcaggcaaccattctgaccctgcggtaatcagagaacgcttacacttttgtcatcttctttgaagaatgagagatcttgaatgtgttttctttggctttagattcgtgtttttacgcccaagggaatataccaagagctagaaaccgcaaaggaagagtacatccgcgcaacgtttggagtaaagaaagaccagaaactagtcttaccaaagatcattgagtcttttagcaaagactcaggtttaggtcaagcagcattgatggagatgattcaagaatgtctcccggaagcaatgaaaaaaaccataaagaaacttaactcagggagatccagaaagagcattgtcgaatggacgcctcataatttcgtgtttcggtatttgatagccagagaacttgttagatga

SEQ ID NO: 178814 - DNA, 583 bp, Arabidopsis thaliana landsberg
atgcttgtttggaatttgacggtttctcacttcagagctgctttactatgtgatcctgttttcaattctggctatgacctcggtcctaaacttcaaactggaatttatatgccattgttatgtggatcacaaattgacgttcgtggcccagaaattgttatcagggtgctccatgatcagccaatgaatgtgaaaatgctaccctccccttccctaaatcacttcgagagcgaaaacagcatcatgccttttggaaaagccagagagtcaagaaagttacaagagcaacataagcagaaatatacatatttgtttggacaatggtcaccagtaaagttattggcccctttagtgcttctaggtgttgttgtctctgttttcattaaaaagttttcgtcgaggggcagtgatgttagtttgaaagctggaccttccaaaaagaagaagaaccgtaaatccgcgaaggatacaaataggcagtcagttcctcgtggccaggatcagttcgagctcattgaaggaggtcaaatgttactaggcttcaataactttcaaagtggtgcaactcatgggccaaagatcg

SEQ ID NO: 178815 - DNA, 57 bp, Arabidopsis thaliana landsberg
atggacagagatcgaatacaagaggccaaagattttcttgacatggtggatgatgag

SEQ ID NO: 178816 - DNA, 131 bp, Arabidopsis thaliana landsberg
ttgagctcccggttgcatctagtgaagacgatagtggtctggacatgtggtttgatgctttgaacctagaggacgacttggaggaagaagcgggagtcacgctcgatttggagcaaagtttagacggctaa

SEQ ID NO: 178817 - DNA, 4283 bp, Arabidopsis thaliana landsberg
  unsure (1)..(4283): unsure at all n locations
agagttggattcgcaagtgaaaaccaatcaagaatttacacttgtaaatcttcccgtggtcttcaccgcatctgactattccgttttcctctttataaatacgtttctcgccgatcaggtgctttttgttcgtattgtcaagttttcgccggagaattcatcacttaaatctataacatctgaaattcaaaatgcctcgaggaagctccggaggtgagtcttctcgttttaaaaaaaatattcagatctctaccttcacattgggttatttaaggatttgccgttcttccaatctagggtttgctgtaatttgttcctgcacttgtgataatcctctcatatgatgttgcaagttgtgttatatcttccgattagagaatattttagtctcctgagcgattttgcacatgttttagggtttatgattctggcgacgagggagaaattgatttttgtgtgattgaatttttgtgcaggaagatctagctaccgtccttctcgccctgcagctgcacgaagcccgcctcctcaatctggttaatattaacctcactgaattttttgatttgattgtataagattttgctctgtttatgtaattgtgttttgtttctgggttttcagtgaaccgtgctcctcctccagcaacagctcagcctagtagcggtggttctttcttaggcaatattggtgcatccataactgaaggtttgtgctttttatctgtttcttttggtgattttcttaagcattgttgtttcatagattggtggtttggttggatttggtttcttatgatgtgtttgttttatttggaacaataggtctggcttggggtactggaactgcatttggacacagggttgtggattctgtgatgggtccacgaacctttaagcacgaaaccgttgtttctcaggttccatctgctgcaaataccatgactgcttgtgacattcactccaaggctttccaagatgtaagttaaaaacactttctttattctccttgagcattttaggttgattccaatcttttcagagcagttgttaaaaatctagctaagcgattgttaacagttgaatgtgaatcagtagctagatcttgattgaccttgttttggttaggtatgcattctcaaaatacatcgaaattgaaggacaagcaggcacattgatagaatgaatacaatagaacatgattgtgttgatgtgcttaaactcaaaagactatggatttcttgaacgttattttgctttgttgattgttgatactatgtgtatccgagattatctggtttgacattggatgttattatgtttatgtgtagtgcgtcaaccattttggaagcgacatcagtatgtgccagttctacatggacatgctgagtgaatgcaagaagaattctggttccgtggtggctgcttaatcaactagtcgagatgtctgtgctaagaacaactctggtgtctttaataattagttgttgaaatctaatggttttcttgttgaaagatttgggatcttttatgttattgtcttttggttttatgggatcttttatgatggagttattatatcacataattaacatgaaacctataatagcaattagatcaatatcaaccaattccttcattaattttattgttttacttcaaaactccatctttactttaacgtgaatttcttttcgttctttcattgtcgattctccatttattctctgaggcgtttcttgtttgtgtgtagtgcctcaacgattatgaaacagacatcagtaagtgccagctctacatgaacatgttgtctgggtgcaagaagagttccaagttggactcttaattttgctttttcacgtcaatcattcttattttccaatcaaatatttctctgaaaatgactcttgcattgttttatcattttaagcagaagatggattctctcatggatttattcttcatttgaacgattttaggatcttcattacacgtttctttttgttagtgtcagaagagaagaacatcaggggctttaaacgcaaaataacaaataaaaggatacaattaataatatctataaactttgaggtgttcaatgcaattaaaagccaatttcctccgcttcaaaatctcagtcgtgtgcgcacataaacctttaccaaaatcccagcaatcgatgattttccggcgattctccgggagatttcctaactgcgattcccccgctcttgtaaacttaaattcgaaagctaaacggagtttccgatctgatgcggncgctcgaagccnatagctaatgcattagaagagaaaagtaccaaacttaagtgttatacaattatcccttccttctccggcgctttttcagctctcttcgctcatctctaccactatcgactccgtcttccttgtctcatcttacccttttcttccgtcataccctttaggtacacttttcactctctgcagatttttcttaagaaatgtaaggttttgataattgggaatttgaaaaatcttgcagggttgaagatttgtgtttggaggggtttgagaggtgttaccttctcgattttgttgttccaaaagattttgcttgccagaaaacagcttgcgagtatgttcagtgatgttatcttacaactatttaggttcaaaaagttaagtcctttggggtttgattttgttctttgggtttaggatcgtttgctttgatcatcggaactccgcattgaaaaggattggcttaataaaggaagagcacaagaagaggcttaagatttatgttgatactgaaactagtagctcaaaggctgtgtataaatatttctctagtaaactcacagatcaaagatcaacatcaacagcaacaacaaccaccctaatcctcctcttctcacagcgttcaagagtcttaaactctatgccaacaaaaacaatcaagaacctggagaatccggcaacacaaccatcaacagaaataaaaaccaccctaatcctcctcttgtcactgcgttcaacaaccttgaactctatgccaactataaccatcaagaacctggagaatccggaaccaccaacataaacaacaacaaccctaatcctcctcttctcactgcgttcgacaatcttagactctacgccaactacaaccatcaagaacctggagaatccagcaacaacaactaccccaatctcaacgtttataacgttggtcatatctccgccgctagcttcaacgctcctccgttcactccgtcgtcgttgacccaaccagatgattcttcctccagatattccggcaaacccttccctcctcctcctctgagtttcgtgagccctggcgtcgacaaggatcaaaactggctatcaagtctgttggacatgatgacgtgtgcacaacgtttcactgagttccaaaagtacctccaagatctcgatacctatccaacggctgagagggagagccatctgttcaagatcggatcagcgttaaccacaaccaaacgcattttcctccacttggctacgaaccaatacggctcacaagctttacgtatcctctttagacgcagccctagcttagaccatctcttattctgcgccgtcgacacaaacttcttcttgctcatgagcgataagtatggtcgtggcttgatcatccccgctatacgagccgtcgataaaaccaagaaggagtctctctacaagctcacttacgaatacactctgcaccttgccaggctagaaactggatgccttgccctaaacaatgtgcttcaggaaatcagaggcatatacagagacctaatctttgagtgcgtcgcaaacaacgcagattggttatcttttgacccctatggaacacacgttgtgcagaacattctgatacttcagaatccggttgcaacaaccgcaatcgctgagagacttcgtggaagtttcttcaggttagcgatggagagacaaggaagctatgtggtggagaagtgtttaaaatcggattttgcgagagaccaagtgttggaggagtttagagggaatgccaaagaatgggtaagaatgacaactgataagtttggcaactttgtggtacagtgtgcgttgagagtgatgaaggagaaagagatgagaccactgttgagagagtttgtggagaagctaaggcctcactttgggaagatggagattgggcgtgggaggaacacactgcgagtgattcaagaagaaattgttggttggattaatcagttaccagataaatctggatatgtgaactga

SEQ ID NO: 178818 - DNA, 2169 bp, Arabidopsis thaliana landsberg
  unsure (1)..(2169): unsure at all n locations
aaaacgccggaagcgttctgacaagaagatttgtcggaaggagccgaatgattctgctatggctgctggtccggtggttatcaagcgcgaaactgaagatactcctggagaagaagaagaaggtaacacctctagagacaacgccttggttgaagtcaagttagagaagcaagaagaacttggtcttctcgttacttgtggaatccagaaacgaaaacgactcgctcgtggagcaagatctcgaagatattcagacaccagcttcgaggaaaagccgattattatccctccgaagcacaagcagcagagagtattaaccactcgatggaacaatgaaaggtagtaaaacgaccaaagcccctttagtttcatgtgttttgatttcatgtttttgtatgaagagagcaattgtttttttatgcaggattaagttcgcagagcaaaccttagcggatattatgaaggagaaaggtgctacttttgaaaaacctgttacgcgacaactgttaagagttattgctcgaagcaagataggtgatactgggctcttggatcattccttgaagcacatggatggcaaagtaacaccaggtggttctgatcggtttaggaggtgttacaatactgatggatgcatgcagtattggctcgaaagtgctgaccttgtcaagattaaacttgaatctggaattcctgatcctacttgggttcccccagcttggtggatggttcagactgcatcatcacatgatcaatctgcggttacgtcaaagcttcttatgggggagattgagcaaatgaagaggtaatatgtttgcaacaactcttgtggttcgatatttgatttccttgaaatgtgcttggagtctcatttcgtttttggtaagcagtgaaatcaaagaacttgtatcaaagcaaaatttaccagatcatgctgatgcaaatgaggtgactttgagatcgtttttttctttatgttagaggaatgtgttaagatgagcatattagagattcagaaacattttttttatttgcattgcttcccagaaactattcaaggaacttaagagttggagggaaaacactgataagcaaattgtggagatctcagaatcgttgatttcaactcaggtcgagactataagcaagtacaacgtatttgttcaaagtttcttgattaaaatgatcttaaccttaggaagcttttgtccaccatatctcgcttattcgcagggcatgttcaaggaattgaattcgtggaaagataaagtagatcagcagttactgggaatttcaaacacgctgagcaatctgcagccgaatgggagcacgtcattcagtccagctcaggaaaattgggaacatatattgaagacttccaatttggaagattttacaacgaatggttttgaccaatgggatgaccttattgatggtctaccagaggctgtcaggccggagacttacgcgcttccaacaaatccttgcaaaagctctctccaagatcagtcattgatctctctccaagaccagtcattggtctctctccaagaccagtcattggtcaacgtagatatgcaaatgacagaaaggttagagcagttgtttgtttgttttggcccaagagtaagggtttgatgtttattattgtctaatattttgtttctctatttagcagcatgactagaggtgaatccagaagcnnnnnnnnnnnnnnnnnnnnnnngactccgggttcttcgattactgcaggtccaaaatcagatattgacgacccaacaatccagactcaggtgagttagtcaaacatattagaagcattggtctggtgtttcagttaaactggatggtcaatcttggataatcctctagcctctagattaattatgatcaatttactactgcgcatcttatcacagtctttgcttcattcactataccactcatgcatcgtctgatatgcatcagatgttattgggcaatttttcaaaagctttgcattacctttacttgatgttaaggaatcaatatttgagaattatatttgtacaggaaaccttgaaggagttggtgacatggaaagccaaagcggagcagcagctgatggaattatcaaacgctgtccttgctcttaagggacagaatcaacccaactggcgttacccgtga

SEQ ID NO: 178819 - DNA, 340 bp, Arabidopsis thaliana landsberg
atgttagcttcagatcattcaccagtaattgcaacaatagcggataagataccacgtggcaaacaaaattttcggtttgataaaagatggattggtaaagaagggttattagaggcaatttcaaatggctggaatttagataccgggtcacgagagggatgttttgttgaaaaaattacaaattgtaggcgggctatatctaaatggcgaaaagatttatctccttacggacgaaaaacaatagaggaactaaagatggaattagatgcggcacaaagggatgatacaagagcacgagaggagattacggaattaacgttgcgattacaagaagcttacc

SEQ ID NO: 178820 - DNA, 539 bp, Arabidopsis thaliana landsberg
gatttgtggctctaacccaggaagtggtctgccaaatgcaccagcatctggtggttttgctgctgctggttctagtgccactggtggctttgcggccatggcttcagctggtagaggctttgctggtgcttcttctactcccactggtggcttcgctgcgttagcctcaggtagtggaggctttgctggtgctgctccaggaggaggaggcggtggatttggtggacttggttcaggcaccggaggtttcggaggctttgctcctcagggtagtagtggaggtttcgcgggagcagcaggaggtaatattacaatctaaacatcgattgacctatacattacagatacaaggtcatgctcatacagattgaccattgtcatgtttgtgattgtattattattattatacaggtggcggttttggtggtttcggcggacaagcgcaaggccaagcgggtggtggtggattctcagcctttggtggcaactcgggagcaacaggaaagccctcggaactcttcacacagatgagaaaatga

SEQ ID NO: 178821 - DNA, 306 bp, Arabidopsis thaliana landsberg
  unsure (1)..(306): unsure at all n locations
ggatttgtcaaataacgacttgaccggggatgtgcctgagtttctagctgacataaaatcgctcttgatcatgtaagtctcttaagacagtatgaaacataataatgtgttttaactatttttataagtcgtctccttgtattattattattnnnttttttttttttttttttttttttttnggataaacagggggctccttggattatatatctcttttttataccttaacagaaacttaagtggaaacaattttagcggtcaacttcctcaaaagcttatagataagaaaagactgaagctgaa

SEQ ID NO: 178822 - DNA, 754 bp, Arabidopsis thaliana landsberg
ggtacactaccacaaaagggtggtgaagttaacttaactctgggaggaatcgacttgaataactctggaaggtatgcaggatactgctcgtcgattataaaatttcatggaataattgaacttacagtgattttttttgtttgttttcagtgttgtggtgagagaggataaaaaactgttgacggtattatttccagatgggcgtgatgggagagctttcactcttaaggtgattcatcatcatcataaaatttgaaatacctactctaagaacgagtttcaagtcgtttaagatggttctgtgaatatatttttgttactaattttggatgttgcaggctgagacatttgaagatttgtacgagtggaaaactgctcttgagcaggctcttgcacaagcccctaatgcagcactcatcatgggtcagaatggaatattccgtgctgaaactaacgaggctattgaaggttcttttcatcaatttttgttctagtccatgttacagctttggcctaagtgccttacatatacacaatatttatgcctttatttcttatgtatatttctgccttaataatagtttactttccatcatctatgcgtcattctacctttatggtccataattgttagggcgggagaagcgtccattaaaatccttggttgttggaagaccaatcttacttgctctggaagatattgatggaagcccatcattccttgagaaagctcttcagtttattgagaagtatg

SEQ ID NO: 178823 - DNA, 367 bp, Arabidopsis thaliana landsberg
atggaattgacactgaattcctcgagttctcttatcaaacgtaaagatgccaagagttctagaaaccaagaaagttcctccaacaacatgacctttgcgaagatgaagccgccaacatatcaattccaagcaaagaactcggttaaggaaatgaagttcactcacgagaagaccttcacgccagaaggtgaaacccttgagaaatgggagaagctccacgttctctcatacccacactccaagaacgacgctagcgttccggtgttcgtcatgttaccgctcgacacagtaacaatgtcagggcatttgaacaaaccacgagccatgaacgctagtttgatggccctgaaaggagctggtgtggaag

SEQ ID NO: 178824 - DNA, 822 bp, Arabidopsis thaliana landsberg
atgtttgaccggaaaagtttaactcgttataagaaaggtggcgagaaggagcattacatggaaaagtacttaagaatcttatgagcgagtgtcaggagaaacctaagaagaaggaaatgctcaagagacagaattcggggacaaattcttttaagcggggtagaatgtagtgaccctcgctaaggggtaagcggccaagcaaaaaaacatcgaggaacgaccgaggaagaaccggaagagaaagaaatagtaaagggacaaaatccaaagagatgggcaaggtaaaaatgaacttggccaattctagtttaaaattaggtcatccgggcgaagccaaaacgaggggaagttgccccaaatacatggctgattgcctaaatgtgcccaaaaggtgataaaccataaaagggcaaatgaactaactatttggtcaaaggagggcaaagatgggcaggaatgagcaagtttgggcaacacgagcgtgccgcgggcgaagtttgccccgccgggcgttaccgccctttgaccacgccatagacacgtgggctggcttacttagagcccaagaaaagttgcttagatccaaatttatgaggattggagccgaagtttccccttccacgtgtcatcgttccatttcttcaacatacgtgtcttcacgggcggtgacatgtgtcccgcaaggtgtcaccaccagatgacatgcgtttgcttggagcccaagctgttccacctaaaaatgcttggccaaacttgagccatttgatgggagaaaggagagagaaccgaaatgatgccaaattatcgagagatcgcccataa

SEQ ID NO: 178825 - DNA, 343 bp, Arabidopsis thaliana landsberg
atgagacgtaagagggaggcagagaagaatcttgaggaacttgagttgaaagtgcgccaactgaaggtattgtctcattgattaatccagtagaaactagagttcccagtctttatatatcttaactgaaatgattagcttgaatttacaaagctttagttcgctagtatccataaccgtttccatatttttctttgttcggcttgtgcagaagcaccgcaggcaagcagagaaggttttgacgacaaaggaacttgagatgcacgatttgaagaatacagtcgctgctgagatcgaagcattaccttcttcaagtgttaatgagcttcaacttgaaatcatg

SEQ ID NO: 178826 - DNA, 2080 bp, Arabidopsis thaliana landsberg
atgattgtttacgaggattcttctgacgacggaatcggcgctctctccggttatagtgtacggcaacgcttttaactcttctcagagattagggttttctatgactgatatttaagtgatgaagacgatctgtactgatacggcccattagtggtttcttaatgggcctatattgttatcatttggaagcctgtgcaacgaaatttagattcctagttagttgggttgatatcggtccgattgtgacagtcacagatggtttagatcaaatctcactagttatttttgttagccacgtcagcttaatattcgtgtacgcgcaagctcaccgttagctatgataaaccccttcactatcatctcttacaaaaacccattagcttcttcagtcttctctaaaatacttgcaagcaacagagtcagaggttaagtaagaagaagaaaaaataatgctaaggtttcaatgttttcttcaccttcttcagccttctatggcgaagaacaacagcaaccactcgaatatttgtttacacaatttggcgccgtttcgggtcaccgacacgattcctgtacagaagatccaggagttacgtgcgaatcggtcgagggagagtggaaagttgcgagtaaatggaataggtagagaaatggaagaaggtgtggaagaattcgaagaagtagatgatggagatgatgatgaggtagaagatgagttctcggcgaagaagagaggcgtttacagagcgaagaaagagaagattgattacgataaagaccctgagtttgcggatattcttggagattgtttagataacccagataaagctcaaaagaaggtgaagttttaaactttgatctttggatcttaccatttcgattgagaagctgttgttgagctgatgtattgacaaagtaacgtttattgagctgaaatttttgagtagcttttgattttgattgttattttgaaatgggttgtttatcaatgaactctttttagatggaagagagattgaggaagaagaggaacaaaattcttcatactaagactggttctgcaacttcgatgccagtgacgtttaacaagtgagtgatcctatgttgcttttgaagttatatgtgattctcttggttgattttgcttgctcatttgatctgcttgttcagtagttgttgatgttcagtgccttgttcttctcattgtttattaaactcttggttttgttgttttgtaagatttgagtattcgaattcatacatgtggttggagttttacaacacaccgctggacaaagacatagccttgatctctgatgtgagtcctcaaactgaatctttgcattcctatactaatctgaggagatagggaaaatcttaacaaatcactcactgttttcttttgatggctaaaatcttgcagacaatccggtcctggcatatccttggacgacttggtggatacaactccatgaatatgcaagtatgtctatgattgagaaagtgaaagcatttatctattcggtttccttttgttttctcgcattataagcattaagctgtttttttatcttttgctcgtatggtgcagttatcacaagcaccactggataagaggccaaactatgatgccatacttggagctaatgtcgagcccaccacgttttataacatcggggatcttgaggttcaagacaatgtcgctcgaatatggtgataactctcactacaccctaaaaacattttttgcaagtcttgttgttactcatcacataaatgatggttttgacaggctcgatattgggacctcggagccgttgattctcgatgttctgataaacgcattgacacaaatcagctcagagtgagttcaattctctccttctctctgtatgtttattaactgaattaagcttttgagatggacatgtttgaaatgtgtgtaagctctaacgtggtatttgttttggttgtttctagttatgtcgggataaagaaagttgtgtttggtggatctgagttcgagagctggaaggagaatatgacatccgaggaatctggtttcagagtccacaagatttaa

SEQ ID NO: 178827 - DNA, 129 bp, Arabidopsis thaliana landsberg
gatgcaaatcctttctaataccaagatcctcaagatctttgcgagcatttagttcatccttcgatttcccacaatacaacaatgtcgatacaatactgacagctacatttctctcaacatgcataacat

SEQ ID NO: 178828 - DNA, 459 bp, Arabidopsis thaliana landsberg
aattgccggggggcgaataaacccaattttcgacggtcaattcgttacattctgaaaaagtttaatacagatgtgttagccatcttcgaaacgcacgctggaggtgatcaagcgggtcgtatttgtagaggattgggttttgaaaattctttccgtgtagatgcagtgggtcaaagcggaggtttgtggctcttgtggaggactggaatcggtgaagtgtcggttgtggactctacggaccagtttattcatgctaaaatagttaatggagaggattgtgtaaacctcattgttgtctatgctgctccaacggctagtagaaggagtgggatgtgggatagattaggcgatgtcattcgtggtgtggatggacctgcggtgataggaggtgactttaacacaattgtgagactagatgaaaggtctggaggtaacgaactttatcaagtgattcagtag

SEQ ID NO: 178829 - DNA, 814 bp, Arabidopsis thaliana landsberg
attatcgaagcgctacctaatgttccatcacctgacctggcattccggttgtacttgcaatgtgctgaggtaaaactaattacctgtttatttagtatgcacttgctcggtaaaatgctcacagatctttcctatttcatcaggctgcggataagtgtgatgaagaaccaattgcatacgaatttttcacccaggcatacatcttatacgaagaagaaatttcggttagttatgttttcgcggacgttcatatgtctcgtgtctaaaccaaagcaagtaggtgagtttaactctctctcgtgcgtcaaaaacttgccttttgaacaggactcaaaggcccaggtgactgcgttacaacttataattggaactctgcagaggatgcaagtatttggtgttgagaatagagatacattaacgcacaaggctacgggggtatttcatcatgatatgataattagtctcttaccatattcaattgtctctgcttaaaggctgacaagggaaaacttatactcttgcagtatgcagcgaaacttctaaagaaacctgatcaatgtcgagctgtttatgcctgttctcatttgttctggctggaagatcgtgagaccatacaagatggagaaaggtaatactttcttctgtgcgatagaacacagtgcgtttaaaatagctcattaggtttcttacttgaaatcagggttctactttgtctgaaacgagcgcttaaaattgcaaattcggctccccaagcggccaacacagctcggggtagtacagggtatgttaccctcttcatcgagatactaaacaa

SEQ ID NO: 178830 - DNA, 433 bp, Arabidopsis thaliana landsberg
aaatactatttgaaactgcatctacacagactcaaaagccagtgtgcaatcaatcagacgagatgataacagatagcatcaaaaggtaagagattcaaaattatctgccaaatctatatactgagtaacagtgatgagatctataaacgaaacacagtcacctgaagacacactttgaaacacctggagctcctcaagtggaatctcttaacaagctcgctgttggaatggacagaaacgctgcagctaaactcttcttccaatcctgtggtactaacttctacttcaacttaatttcactttctttgagcataaaaaaacctgactatgattattgtttatatgtccagtgttagctactcgcggagtcatcaaggtaaaccaagcagagccttatggggacattctcattgcaagaggacccaacatgtaa

SEQ ID NO: 178831 - DNA, 622 bp, Arabidopsis thaliana landsberg
atggggatcatatcatctaggattttgaaaccggagtacagatctcaatacaataaccaaatcccgatgcaggagaaagtggtagattcttcaagcgattggcaaaatcaacatgacgttttcatgcaaggaggtggctgcaaacaagtatatatggattttcaagattgcgtggatgattctaaaaagaagaatgaaactatcggtcagtgttacccgatgctacagaagtgtatggaggctcactctgattactataaaccgatgattggaatggatatagcaacgttcaaatgaagaaagccttgtgaagactttcctgtcttcaactactgtttccctagacgaaataaacgaagaggaagatcagaagtttgtagaattcatgaaaggaggtggttgcaaagaatcatttacggcttggaatgatgattgcaatttcactgaagaggaagctgagaagaacaaagatttggttactaagtgtgcgggactctttgggacgttttccaagtgtatggatactcactctgattactatcatccaattctcgcagtgaagaaaactaccgaagaacatttggagaaagagctcgcaactttcttcttggaagaaagctaa

SEQ ID NO: 178832 - DNA, 111 bp, Arabidopsis thaliana landsberg
atggcgttcgcagcacttgcgattcttggccacagatcagcacactcctttccgattggtccagtgatagcagatcctaattacatcacacaacagactcatcagctacaa

SEQ ID NO: 178833 - DNA, 380 bp, Arabidopsis thaliana landsberg
ttgcctcaacactgtcacttccggaaaaggttgagacaaaatgtcttgaagaagacactcaaggagagagttcatctagtggaaacaaagacccaacaacaaaagtgttggatgttacagcgaagccaaaatcaaaacgtagaaagtctttcacatctctactagtgaatggatcaaaggttcgtaatttattagttgtgttgtttcttgtgacttctttttctctaatattactaatttggtaattttacttgcagttcgatgagaaaaatggtgaaaccacagagccagaaaaacttccaagcattgatgatgaatccaatcagctggaagttgcagaatatgtggatgacatatatcagttctattggactgcagaa

SEQ ID NO: 178834 - DNA, 942 bp, Arabidopsis thaliana landsberg
gcggcactacatgtattgaaatccatcgtagcaaatacaccaaagacgttgaaggaaataatgccaattttgatgagtaccttaatttcttctttggcatcaccatcttctgagaggcgccaggtttgtatcctaccctttttttgtttcattccttacattttaaccggcagttgtatgagtctattatactgtgtaggtagcaggaagatcacttggagagctggttaggaagcttggtgaaagggtgcttcctcttatcattccaattttatctaaaggactgaaagacccagatgttgacaaaagacaagtaagctttgtgatgaatcaatcattttatctctctttctcaaaaactttacaccgtagagcatagttattttggttgaagttattgttgcgaccatgataaccatgaagtaaatatttcagtgttattttatcttagtagagctggcaccgtttcttttttcaagtaattgtgacatgtatttatttcatttctcttaaatgagctgtgtatcactgcatgatttgtgtcttgctgcgttgttttatgtccatttgtgatactgaaatgttttcatatcgatcaactgatcctaagcatatgattgtttgttttaaatctgatatgcagacttattaggcacatgttattcatctaacagcttgacattatatatatttcataattgacagggtgtatgcattggcctgaatgaagtgatggcaagtgctggaaggagtcagttgctgagtttcatggatcagcttattcccacaattaggacagcactttgtgataggtttgatttattctgtatgcatgtttctttatgctattaaaaattaacattctaaacttctacaactttcttctatagtgctctcgaggttcgggaatctgctggactagcattcagcactctgtataag

SEQ ID NO: 178835 - DNA, 543 bp, Arabidopsis thaliana landsberg
atgattcaaatggatggtggcgataggctgagagtgactttattagatcgtatgtcaacggtggagagtagccggagctgtttaactcttgaagctattctaatggctgataaaaacagaacctcgccgcagattctctcaccaccgccgtcgaggagccaatctaaccggtcacttgttgaagtcatgcaaagagagcaccgacacagtagagataaaaccgcttggaaaagtctccgtgaaaagctccgtcttaaacgtaacgctactgtttggatctcgtctaattctatcccgagtttggatacgtctattcctaaccgggataacgttagccaccaactcggtttcctcctttctaactctggaaatgtaacggaggaagcttcgtcggtggagggaaggattcggttaggggctgtgttggcagaggagagagcattatcggctagagaagaggaaacgccggcggagagggaagtggagccggcgaggatgtctttgatggagttgttggaagagaatcaagggcaaatgagtttg

SEQ ID NO: 178836 - DNA, 826 bp, Arabidopsis thaliana landsberg
atgggagaggattatgagcttgaagaaggagagatgaattgttcttctgatgaagctgttgttgatcttgacgttgatctctcttacattgtgagtctctcttgtttgtgattttttttctcattattaaatggtcttttttgtgtggtgttatgtgaagccgttgttgatctttgtgtgatgcttaatttctgattatgttttggaagtgttaagatcatatgaatagtacagtactctgtgtttataatgccaatgatgattaagttttgtgcatcttagtttagttggaggagatatacctttaataagatatttcaattgctatgaatcttgcttgtttcatactgagttttgagttttaaacagagaactatgtgtctgtcttttgtagcatatgaaatctcaattttatgtatctcaatgaagaatatatagtgtggatactcattttttctctgtttttgtatctttgtgtgtcgaagtctttttctttgcctggtggttttattatatatgtgctcaagttttgttgctttgtgtatctaaggacaagaaggtacagaatgtacttggccacttgcaaaaaggtttcggagaggaagcccgggaccggtttggtaagtaatattaaattggtgttagtgagatatttgttttgaaatgaaatgtcgttgttgaatgatatggttggtcaggtccggatatctttgactatggatcatttttgcccacttacaaacgtttgccggctgtaccatcatgtcaaaggagttctctagggaatcatgctgtacaaagaatttccaacagtttacccgggaag

SEQ ID NO: 178837 - DNA, 737 bp, Arabidopsis thaliana landsberg
  unsure (1)..(737): unsure at all n locations
atgaatatgtggggacccgaaagcgcagaaggtgctgctgatattgattccaccacgaggaggaccttgcatgctgaaatgatgagactagagtctgaagggttcattcagagcctgagaccgagccctgcacttatgagattgccaagggcagggaggaagcaaggcgagacgatatctaaaggccgccggaattacgagcttatgcttaatctacagcttggaatcaggtaaatatcccagtttgctgcctcatttatacaatttgaagttttgttgatgtataagcgctcatgtgaaatgtatttgcttnnnnnnnnnnnnnnnnnnnnnnnnngctccggttgtgtctcttgatcttaagcattcggcttttgatccaaaggagaaggtatggacaagatttccaccagaaggaaccaaatacacacctcctcatcaatctagtgaattcaaatggaaagactattgcccattagtttttaggtgagatcaaataacattaggctttacttatttcccatctgtacgtattctcacacactgttatgctaattttatctatctttaggagcttgaggaagctattcaaggtagacccagctgattacatgttatcgatctgcgggaatgatgcccttcgggagctatcatcccctggtaagagtggaagctttttctacttgacaaatgatgatcgttacatgataaagacaatgaagaagtctgaaactaaa

SEQ ID NO: 178838 - DNA, 393 bp, Arabidopsis thaliana landsberg
atggcagcctttaagcaactgatatccttctcgctcctaatggatatctgctctctctgggctccatctcagaactcgactaggtaatgccgtctccaagaagaacattcgaaaatgcgatatgatatttgatgttcgtcagttgttatcaatagtcattgagcctagcacggcgtctaattgtttgtggcgttcttattttcggataggtacgcattctctggatcttctggagatacaagcgcagagtttgagaaggacgattacacgctaaccctcattaaaccatctccaattccttctcatgaagtcaagaacctctcagaaaccagacttttaccagctgatgaaggagaaccagaaaaagatttggaggaagacaaaagggagtaa

SEQ ID NO: 178839 - DNA, 636 bp, Arabidopsis thaliana landsberg
tttgattggtaaggctggtgagaacattaagaggataagacgtagaactagagctagtgttaaggttgtttcgaaagatgtttcggatccttcacatgtttgtgccatggaatatgacaatgtagttgtggttagtatctgaaatagcgtctttatttgcctgttctttgttgctttctattgatgtttttcggtcttttgatcgaatagatatctggtgagcctgaatccgtgaagcaagcgctttttgctgtttctgcaatcatgtacaagatcaatcctcgtgaaaatattcctctagattcaaccagccaagatgttccagcagctagtgttatagttccatcagatctttctaattctgtctatcctcaaacgggattttactcgaatcaagatcatattcttcagcaaggggcgggtgttccgtcatatttcaatgcactatctgtatctgactttcaaggttacgcagaaaccgctgcgaatccagtgcctgtttttgcttcttctctcccagtgactcatggttttggtgggtcttccagatcagaagagctggtttttaaagtcttgtgccctttgtgcaatattatgcgtgtaatcgggaaggagggatcaaccattaaagaataa

SEQ ID NO: 178840 - DNA, 702 bp, Arabidopsis thaliana landsberg
aatttttccaaaccaaaaaagtccgaaaccaacgactcctgagagagactataatgaccaaaacaaggtgcatgcatgagcattttcgtaaaattgtacaacgagttaagaagactcttaaactctcagcttccgacaaaagtcacggcgttgctgagttggatgacttaccggaagaatgtgtctcaatcatagtctctttcacaagccctcaagatgcgtgcgtccttgcttcggtttcgaaaacctttgcatcggcggtcaagtcagatattgtatgggagaagtttattccgccagagtatgagtctttgatttctcaatcccgagctttcaaattcttatcgaagaaggagctctatttcgctctttgcgacaaatctgttctaattgacgatggcaaaaaggtatatctatctttaatatgggatttttttttttttgaatcatcaaatttagttagagaactttgacaataatgatgtgatttaagtttaaataagaaattttgtgcgtatagtttttagcaatttggtgaattttatgatcatttggcttatttcagtccaggtgaaaatcgaagagcttatggatagaaaaagcgaacgcgaagagatgtatcatgatatcagcgatgaaccttgcaatcgcgtgggggaattctcctcagagttggcgatggattccagatcctcaagctag

SEQ ID NO: 178841 - DNA, 116 bp, Arabidopsis thaliana landsberg
gtgtgtttttcatatatacaatgatatcgggtgtgggcatcctgtttgtgatgaagatggtacccgagactcgaggtcgttcgctcgaagaaattcaagctgccattacccgataa

SEQ ID NO: 178842 - DNA, 579 bp, Arabidopsis thaliana landsberg
atgctgcctcgtagggctcgggtagtctgcaagctcctagtgggactcgatgagtccggcggcaatgttagccgtgatgcaggccatgcagcaggagttggcccttctgaggtaagccattcctgtcgcccctgcgggtgcctctcagggtgctggaggtggagaagtgcccggggcgctgctcctgcgggtgctgttccgggtggtggggccgaggtgcctcttccagtcagtggtctttctctgatgcagtggatgggcatgaagttggattcttttgatggcagtggtactccggtcgaggcggcagattggttgacttatgtggaggataagatgaatgtcttcgagattgcatatggagatcgggttcgctttggcactcagctgctgaagggagaggctcaaatttggtggagaggcgtgcaggcagcgcactcctcctcaccaggagtcctatcttgggatgttttcatcaggcagtttgaaaggagattctacctggtcacctttctaaagaaaatgaagattgacttgcagtcctacaagcaggagaagaagtctgtcacagagtatgag

SEQ ID NO: 178843 - DNA, 796 bp, Arabidopsis thaliana landsberg
attaagaagttggaccctgtaaccaaacgtgttgttactgtcgctggaacgggaaaagccggttttaaggatgggaaagtcaagggtgctcaggtctgatctaggctagctactacaatcttatacattgatcaaacagacaatgtgatttgttagtttgacacattacttttcctttttctttggtagctttcagagcctgcaggacttgctataactgaaaacggtaactttcttgtcctttttaacagttattaataagggatcgatcgtgtgaaattttcgttgcctctactgttttcagggaggctgtttgtggcggatacaaataatagccttatccgatacatagatttgaacaaaggagaagactcagagattcttacattggagttaaaaggtgttcaaccaccaacgccaaaggcaaaatccctgaaacgtttgagaaaacgtgcctcggctgatacaaagattgtcaaagtggattctgtaacgtcccgcgaaggagatttgaatctcaaaatctcattaccagatggctaccatttctccaaggtcgagatctcttcccactttctctctttttccacttcttattttgtctctctcgatctttaacaagtatatatattgcttgttgtgcacaggaagcacggagtaagtttgtggttgatgtcgagcctgaaagcgcagtagcaattgatccaatggaaggaaatctcagtcccgaaggttcaacaatgcttcattttaaacaatcttcaacttggcttctgttgggaaaatcagttgcaag

SEQ ID NO: 178844 - DNA, 83 bp, Arabidopsis thaliana landsberg
tcccgacccacgacgtcgtgttggtgtttgagacagccccgtgccgcgtcgtcgatctacgcagcgcttgcgagccgtcgtga

SEQ ID NO: 178845 - DNA, 146 bp, Arabidopsis thaliana landsberg
atgatcattacagaaggcgggcgagttggctcagtcgatcggagcgagttcgactcagagagaaggcgaagaagaagaagaaagaagaagacgcgaacgttaagcttgagcggtggatttttatataaatgggagaaaaagaaaaa

SEQ ID NO: 178846 - DNA, 2066 bp, Arabidopsis thaliana landsberg
atgagttctctggttcctgttatggagaagcaagagagcgttcgaggtaactctgtggaggaacagcagagtctcagatgcgttggtgcagagaatcaggtgagaaagggaagagctttggacaagcaagttagtttcctagctgtgaatgttgttgagaaacatggaatcaaaggaagagcaatggagaaacaggagagggcaatggagaggcagagaagctttcgtgggtttgttgagaagcagaaaagctttagggtagtaatggagagacagttaagtttcatgaatgttggtggtgagaggaagaagaagactgactcacctggtaaaagaggagattctcctcttcatctcgcagctcgaacggggaatttgggaaaggttatggaattgattcgagcttgtaacggcattgaagagttgaaggagttgtcatcaaagcagaatctagaaggagagacccctctttatagtgcagcagaaaatgggcattcattagttgttgaagagatgttgaaacatatggatcttgatactgcatcagttaaagctcgcaacggttttgatcctttccatgtcgctgcaaaacaaggccatattggtaaatgaaactttagagaatctgataataacttgaagaccttgttattgttgtacaccttcttgacatatatctttgaatgtgtgctgtcttttgcagaggcattgaagaaattgttggagacatttccgaatctggctatgacggtggatctatcaaacactacggcactgcacacagcggcaacacaaggacacactgaagtggtaaactttcttttaaagacggattctcatttagctaagatagctaagaacaatggtaaaaccgcacttcattctgcagcgcgaatggggcacagagaagtggttaagtctttgataggtaatgatgcaagcatcgggtttagaactgataagaagggacaaacagcgcttcacatggctgtcaaaggtcagaacgaagggattgttcttgagttggtgaaacctgatcctgcgattttgagtgttgaggatagtaaagggaatacgccgttgcacactgccacaaacaaaggccgtattaaggtatcatcatcgctaattccccctcccctcagtttctcaatctacaagaattctgatgaactgcattttgcctttgcttgcagatagtcagatgtttggtatcatttgatggaattaaccttaatgctatgaataaggctggagatactgcacttgatatagccgaaaagattggaaatccagagcttgtgtcggttctgaaggaagcaggagctgcaacagctaaagatcttgggaagcctcgaaacccggctaagcaacttaaccaaacggtcagtgacattaaacacaaggtacagtctcagctccaacagtctcgccaaacgggtgttagggtgcggagaatcgcaaagagactgaagaagcttcacatcaatggtttaaacaacgctataaactctgcaaccgttgtggctgtcctaattgcaacagttgcatttgcagcaatcttcaccattcctgggcaatatgaagaagacagaacaaagggactgttgttattaggagaagcccgcatagccggcaaagccccgtttttagtcttcttcatatttgacagcttggcgctgttcatatctttggctgttgttgtggtgcagacttcagttgtggtgattgagcagaaggcaaagaagaatcttgtgtttgtgatcaacaagctcatgtggttggcttgtttgttcatatctgtagcctttgtttctctttcgtttatcgttgtgggtaaggaggacatttggctggcgatttgtgcaacgattattggcgggacgattatgctaaccacgataggtgcaatgtgttactgtgtggtcatgcataggatcgaggaatctaaactgaaaagcttaaggaaagagagaagcaaatcgaaatctttctcactatctcatatgccttcagagtcagagattctcaacggcgaattcaacaagagaatgtatgcactctga

SEQ ID NO: 178847 - DNA, 382 bp, Arabidopsis thaliana landsberg
atggtggctggaagttccgagctgaactctggcaacttctcaatcgtcacacaatccagtgacagcggaatcggaggtcacatcactttcaccagtagtaacgatctcggcgtgttcactcgtaatagcggctctattaccatgcgcaccaacaaggttgcccacggcgatgcaggcaacattacgatcgccaccggctcggccttccttggcaggggcggtgccatcacaattgcggcaggtgagacgcacgaaggcaatggaagcttggttagcatcgtgggtagtgacgcctacagtcgaggtgcacgaggaggcgatatcgacattttggccggtaacagccacgctggtcccggtggtaatgtggttatctctggag

SEQ ID NO: 178848 - DNA, 472 bp, Arabidopsis thaliana landsberg
tctctcactaacacagcctttagttcgagaagaccgaagtggacttcattttcttgtacgggaattaaaatattgcagattgacgacatatactaacatgaatcatcggaggagtatatttgccaggtacttcttcgaagttttgattaactattatttcatatttggttgtgtagtgatcatatcttgttgatacaggcttgatagtacgggagttgatggaaaattcaaaagtgttagagggcgcttgaagaaggtttacgggaagatgaaaacactcgaaaactggaggaagaccgtcttgttagcttgcgtggttgctttggctattgatcctttgtatctgtttatccctttgattgattctcagagattttgcttcactttcgacaagacacttgtagcagtagtttgtgtcattcgtacttttattgacacgttctatgtgatcacatcatttactatcttataa

SEQ ID NO: 178849 - DNA, 84 bp, Arabidopsis thaliana landsberg
aatccgttcgcaaccattcgccgcccaatcccgtagctaagatggccgccccaggcctgcatgccgatgaactcgaatttcatt

SEQ ID NO: 178850 - DNA, 102 bp, Arabidopsis thaliana landsberg
cctgtggatggaaaggaccctgagccttgcaggatcacacatcttgatgtggatgtgcatcagagagtcatgtttgctcaagaggcacatcctcgggtttag

SEQ ID NO: 178851 - DNA, 173 bp, Arabidopsis thaliana landsberg
aaacttctgctgataaaggcgatgctagtgcatccgaagctgttcctgatgttactgactctaaagatactagtgagagtaaacgcaacgctaggaaaatgattcttggtgaagaagctctgaaaatatcgtccaaagagccatattgtctataccatccctattttcgagag

SEQ ID NO: 178852 - DNA, 501 bp, Arabidopsis thaliana landsberg
atgcaatgtgtaacgggtccttcaatgagcgttttgtggaacggtgaaaagacggagccttttaagccttcaagaggactccgccaaggtgattctttgtcttcatacttattatgtgtatggaacggttatgtcagcttattgatgtctctattgctaagaaagaatggaaaccaataagcctgtcgaggggggaccaaaaattttgcacatgtgctttgtagatgatcttatcctatttgttgaggcctctatggcacaaataaggataatccagagaatcttggagcgattttctgtggtatcaagttagaaagtaagtctggaaaaatcgatttttttttttccagataatgtgcatcgagacttggttaagttgatgagtgatgaaagtggtattcaagcgacgagagagttgggaaagtatctaggaatgcccattctccataagcggattaataaagacacctatggagatgtgttagagaagatctcattaag

SEQ ID NO: 178853 - DNA, 281 bp, Arabidopsis thaliana landsberg
atgccagccgggacgacggcgcaactggtcgcggcgcgggccgcccggaccccggacgcgctggcggtggcctgcggggatgagcacctgtcgtacgccgggctcgaggcgcgggcggggcggctggccgccgcgctggagtcccgcggggcggtcccggagcaggtggtggcggtgctggcggaccgcacggccgggctggcggcggtggtcctggcggtgctgcggaccggggcggcctacctgccggtggacctcggcctgccgacggagcggatcgg

SEQ ID NO: 178854 - DNA, 434 bp, Arabidopsis thaliana landsberg
atgcagagtaatctaaaacgggaggtgcaacagcgccacgtgtcaacagaacacacggcctttgagataaccggaatcaatagaccgggtctactatccgaaatatctgccgtactttccgacattggatgtcacgtgacggctgctgttgcatggacccaccacgagcgagcggctatggtgatttatctagaagacgggtttaacggtgggcccattatcgacccaataagaaaggcccaagtaaaggatcatctggatacagtcatggaggcccatcacagagttggcgatgtgtctcatgtcgtcgtgagggtcgtcgaggctaaaggagctccggtcgggtgggctcacactgagcgacgacttcacgagctaatgtacggagaaggagattacgagaattgcttcgactgcgattgtttcggagacag

SEQ ID NO: 178855 - DNA, 963 bp, Arabidopsis thaliana landsberg
atgccctttcttcctatttgttcacctaatgcttcgcgttccaaggtgatttgtatttctttttatctttctcctagatgcattttgtgtataggtaccaagtttttacttgtgtgacaagattttactagtaaagattctgtttctttggcacaaagattattgctttggtactctgaatgaatgaatatggcactcttatatacttgagatgtggaggaaatgtaactgactgagatttatctgcacactaggatgtttcagaaacatttcatcctcagaggccagattggtataaggagctttttgcttggttcttgagcacaggaatgcgatcttatgaagcagaggtcagtctttgtgatttaaatgcatcattctatgatccatttcttgagaatgatagatctttttcatgttttatgtttgtgttatttggtaagatcgccgagtacaagaggaaactattcgaaaaactggctggtaaagcagaaacagtgctggagattggtgttggtactggccctaatctgaagtactttgctggtaatgaaaacgtctgtgtttttggtatggacccgaaccataaaatggaaaagtacgcatgtgaatctgccagagaagctgggatgaaacctgaaaactttagattcatgcatggagtaagtaaattgctctgttttgatttgtgagacatctctttttgtaatcccctgatgttacttatctgttgatcttaggtaggagaagctataccattagatgacctcattatggattcagtggatgccactcatgttctaggttcgagatacctatgtcactctaacactaaatggtaaacttcctaaacccttaaaagatctcactggatatattacttacctgattggtatcttcagagatcaagcgggtgctgaaaccgggtgggattttcttattcatcgagcacgtagcggctaa

SEQ ID NO: 178856 - DNA, 170 bp, Arabidopsis thaliana landsberg
tctttcggctattagtctagctgccaatcctgtttatcatgcacgtacaaagcatgttggtcgcgacgtacacttcgtccgtgatgaaattatacgaggtaccattgccaccaaacacgtctccacgacatctcaactagcagacattatgactaaagcattgggtcgtc

SEQ ID NO: 178857 - DNA, 155 bp, Arabidopsis thaliana landsberg
gcgtcctatcgcttatcccattcgagataagtacttttctctgtgtctacaagtggttgattttgaatcattaccttgtggatggggaagatacgtagaacttcggctaactttacggaaccaacataattctctcaatctttccataaaagcag

SEQ ID NO: 178858 - DNA, 175 bp, Arabidopsis thaliana landsberg
atggcacgagctttgttcaggcagcgccgaatgccctctcggttgtggggggaggctgtgatgacagttgtgcacattttgaatcgatccccgacaaaggcagtgaagaatgtcactccttatgaggcgtggcatggccgggcaccaacagacggcgatctcaaggtctttggct

SEQ ID NO: 178859 - DNA, 303 bp, Arabidopsis thaliana landsberg
gctcaagatcgagagcgagatgtagccgaacaagacgcaaggctccgacaagagaaccctctcctcgctggaaacgtgtaccctgatttcgctcaagcactgaacacgccgagtgaagttgaaggagtactagtgcagatagttgatggcctcccgcgaaccccagacgcggaaggttaccggcggctgcttactcaggcggccaatcatcttctacccttcgctcatcctacgaacgacctgtgtcacgccattaatagccgacgagacacgcggagcaccatcagcgcttcacgtgactga

SEQ ID NO: 178860 - DNA, 325 bp, Arabidopsis thaliana landsberg
catcaagcgcaaattcgacggcctgtgcagcatccagatgaatcgcacgttgacatccaacagtccgtcgggtctctgcgaggacgagccggacaccacggaaacgcatgcaatctcgaaggtcagcgacacgctctaccaggcgacctaccttggcgagacgatcaacctgaagatgtcctcggcggatgacgccggcggactgtccggcgccctgagcggcagctatccggacggcccggacgacgaaggagaaacgaccgagagcctcagcctgaaggttccggacagtacacacctgcacggcacgctgatctggagctaa

SEQ ID NO: 178861 - DNA, 111 bp, Arabidopsis thaliana landsberg
aaggaaactcatcgtcatcgtctagcagatcgatcggagaaagaagaaacccagaagaactcttttacgctttgtagatctccgctttcacaaattcaacgtattgagtag

SEQ ID NO: 178862 - DNA, 1466 bp, Arabidopsis thaliana landsberg
aatggcggtaccacttgttactagaagcactcttgaagttgtcttaccagaggcggttgttcctaagctcgttacgaaatcaagaaacaagcttgcacaaatcagtgaggtagaactctttttaactggaactagattggtgcaaatcatgactctaatcaaaatctttgacgctttgtcttatctctttcccacttgatcacagtggtctggagctagtgtaaccatagttgaagacagaccagaagaaacacagaatatcattcgaatttcgggtacacccgagcaagcagagagagctcagagtttgcttcaaggcttcattttgagcagtaagtttctctctttccaaacttttatatccgtattgtactgatctataagtctgatttccggtccttgtttggtgcagtacaagaggatggaccgtgaacttggaccagatcatcagtcaacacagagatggagatcaagaaactgagaaatgtggagttatgtatgacttgttgaatattaggatttcagtaagcagtagtttagatgaacattccacattttgaccatcactctttggtttctatgttgtctattagtcttctttgtttacattgttctgtaacttatttaaaaaagtcattaaagtttaatccgaatgactaatcattaaagactcatctttaattcacaccacccctatgtatattggaagaacttaaacgctgcgtttcacttgagttaacatcattgagattggggtgtttttgcaaaactagataaagtttagggtgaaaacatagataaatcttaagtcgtattttacaaaaatagccactgctaaaacctcacctgcggcttcacctttcttcgagttcgtgaaaaagagacgtcgcatcgcaccgccgtcgccatttccaccgtcgtagcattgccgcttcactggtgattgattcttccttaacttctctttttgttttctctgttctcttatatccgtcgttttctagggttttctcactccttgttgtggaatctctttgtagactgtcgcactgaatattgttgaatcgagaaaatggcttatgttgggcaaagtagaaacgtgattcggcatgtagtctcgagaggaacagcttatcacaagtatgaaaatgcgattcatcatcctctccttttcgcttgtcaaggagttcgatacagaaaattagaagttattcttacaacggtgaggtttaatgattctgaaaggcatgatttttatcgtttgattttgaaatttccttcacatttcgttgggttgaattgaaatcagatggtgggtttgttttgatttgtcttgatctttatctgatctggttttgttagggcattgagaagcttggcaaagctggtgagactgtgaaggtcgctcctggatacttcaggaatcaccttatgccaaaacttcttgctgtgcctaacattgacaa

SEQ ID NO: 178863 - DNA, 84 bp, Arabidopsis thaliana landsberg
atggtatctgatgatatagttgaaggactccctcttgttgaagttgaattgaagaaggcatcttgccgggaaaaagctcgaacg

SEQ ID NO: 178864 - DNA, 287 bp, Arabidopsis thaliana landsberg
tcagccagaacatcaccgccgcaccggcgtcggccgtgcaggcacctgccggcaacggctacctgctgcaagtgggcgcattcccggccgccgccgacgcggaaacgctgaaagccaagctcgccctgcagggcttcgtcgccaacgtgcagtccgtcaacgtgggcggccagacctaccatcgcgtgcgcctcggcccctatcactccgccaccgctctggaagcggtgaagcagcggttgaccgccgccggcatcaaggccatcgcgctgaaagaaggcaaataa

SEQ ID NO: 178865 - DNA, 943 bp, Arabidopsis thaliana landsberg
aatcgaccacattctcgtccctagagaccctcaattctattacaacgagtcaatctgccactctcacaagaagaaagtatcttctcttgcttattgccatgtccataagaagctctctgagattaaacatatgtgtgaaggatgtcttctctctttcgccaccgagaaagattctgactgtgatacttataagtctctcattggcatcttacataaagatctcgagcttctcattgacgatgaacgagaccttcccttggcgttcaagaaagacgacaatttagtccagacaacaaaaaatctggtggattacaagactaacaacattaaaaatgatagcttgaagcaacattgttcgtgttgtggagaattattgaagataaaatctgagaagttaccgaagaacaacaattctttccttgctcctgctccttctcctagggtatcgcacaacaaactgtctgaaaacgaatctgagtttaaggatatggatgtggacagaacaccaagttttgtaagaggaggtaacaagttttttgggatccctctgtctgattcggcgcaaaacagtccacgatggtccgttcgatctcttaagaaatccgttttgaataagacagagaatgcttcggacacgacagatccaaccggtgaatccattcttaatcagctcaagaaagaggttcgcttggacaagaagtcactcattgatttatatatggagttagatgaagagagaagtgcttcagctgttgcagccaacgaagcgatggctatgatcacgaggcttcaagccgagaaagctgctgtccaaatggaggctttgcagtaccaaagaatgatggatgaacaagcagagtatgaccaagaagctttgcagtctatgagtagtgaattggcgaagagggaagaggaaatgaaggagaatgaagatgaatttgag

SEQ ID NO: 178866 - DNA, 141 bp, Arabidopsis thaliana landsberg
ccaagtgcgactgggctaatcgcggatgtagatcactcagttaatgtgacccatgactttaatccgggttcacaaaatcttcaaatgaaagcttgtcaaaactcgagaaagaatgagatgtgcgagaaagctctaggataa

SEQ ID NO: 178867 - DNA, 882 bp, Arabidopsis thaliana landsberg
gcggaaagccaaaacctcaaggctagtacaaagctgagtcaggcgagggagaaaatcaagcgcaagtatccacttcctgttgaaaggagacaactttccactggctacttggaagatgctcttgatgaggtctgtttgattagtttgtgtatattgggttcttccattttctaaagcaaagattgcactagtaacgactgattgtttcttggaaccaggatgacgaggattaccgctcaaaccgtggctatgaggaagatctcgaagctgaagcgcaacgggaacgccggattctaaacgccaagaaggtaaacaaaacaaaaactcatatatctcggaatgcaaaaaaagcattagaaattgaactaatattcaactgcttctcactggggtaaaaccagagccacaaaggcattccggggaggtcttcaatgacttcggccagaccgtcaagacgtcaaatggagtattctgagagtgagagagaggaatcagaatatgagacggaagaagaagaggaagaaaagtcaccggcccgtggaaggggcaaggattcagaagatgaatatgaggaagatgcagaagaagatgaagaggaacgaggaaaatctaacagatactcagatgaagatgaagaagaggaagaggttgcggtacgcaaattagaatgttcttccatttttattgttgtcaatgaggaagttcattgagattgtaatgtgtggtgaaatgtggtttatgtagggaggtagggcagagaaggatcaccgtggaagtggccggaaaaggaaagggattgagtctgacgaggaggagtctccgcctagaaaagctccgactcatcgtcgtaaggccgtgattgatgacagtgacgaagattaa

SEQ ID NO: 178868 - DNA, 402 bp, Arabidopsis thaliana landsberg
gcctggtattacttctctatgtttctggcgtcttgctgagtcagtctgagatcccactctctatgaatggagtgttaactcggttaaatggagagagcgcattcgcactgatgggtcttcttggcgcaagcatcgtccctcacaatttttatatccattcttattttgctggggtaccttttttctctttatatgtatctctcttttcgggttaagaagcaatgattatactaagcagtgaacgctctattacaggaaagtacatcttcgtctgatgtcgataagagcagcttgtgtcaagaccatttgttcgccatctttggtgtcttcagcggactgtcacttgtaaattatgtattgatgaatgcagcagctaatgtgtttcacagtactggccttgtg

SEQ ID NO: 178869 - DNA, 472 bp, Arabidopsis thaliana landsberg
atgttcctcgatctcttgaaattgtcctcaaccacatgctctgtttgtagtgtaagtacattgtaatgattgagcattgtttgtctcttcaagctctctcattatgttctaattaataatcttttttttactcttatgatgttctctgcaggatccaccaaaagaccctgttgtaactttgtgtgcccatgtgttttgttatgagtgtgtgtctgtaaacattaacggggataacaatacgtgccctgcacttaattgccacagccagcttaaacatgatgttgttttcactgaatctgcagttagaagttgcatcaacgattatgatgatcctgaagataaaaatgctttagttgcatcaaggcgagtttatttcatcgaaaatccgagctgtgatagagattcttcagtcgcatgcagagcaaggcagtccagacactccaccaataaagacaatagtatcagtggactg

SEQ ID NO: 178870 - DNA, 334 bp, Arabidopsis thaliana landsberg
ttctggattcgccggcaaagctgaagattatcgccgcgcaaatgagaaagctggtggaagagatcaagtatcactatacgatgataagctggtgcaagatgttgctattatccaatctggtggagttgttgtgcccgagtactcaccacgttcagcgacgccgatagtggcgaagaagggaactcgttggtcagccctagtacacaagtaagttgtcgtctagccaatttaagatgacgaatgttagatggaggtcttggctttgcttagggcattaattgtttaaagttgttaatttgctaattatagatcatatgatgaatctttaatctga

SEQ ID NO: 178871 - DNA, 117 bp, Arabidopsis thaliana landsberg
atgtatggcattggaaaattgacaacaacgctacgaaattcagctctgggcccactatggctggtgtcaggttcaaacgaaaacaatgacctcaacagtatagaggccggctggcag

SEQ ID NO: 178872 - DNA, 179 bp, Arabidopsis thaliana landsberg
tggcggttaagtcgctgcataaacattgttcccaagccgtggttaaggcagaggctattcaattgaaaaatatcgtttcaagagatttttgggatgggagagagagcgttgaacaggaatatcaaccaattcaaggatcatacctgactcggagattccgaatcgacttttcaaaataa

SEQ ID NO: 178873 - DNA, 736 bp, Arabidopsis thaliana landsberg
atgataggtgtttggggtcctgctggaatagggaagaccactatcacgaggattttatacaatcaactttcttcatctaatgatgacgactttcaattgttcattttcatggagaatgttaagggaagctataggagaaaggaaatcgatggttatagcatgaagttgcatttacgagaaaggtttctctctgaaattaccacccaaagaaagataaaggtaagccatttaggtgtagcacaagaaaggctaaagaatcagaaagctcttattgttcttgatgatgttgatgaactggaacaactacgtgccttggcagatcaaactcaatgggttggtaatggaaccagaattttagttactacagaagatagacagcttttgaaggctcatgggattactcatgtatatgaagtggattatccatctagagatgaagccttaaagatcttgtgtcaatgtgctttcggaaaaaactcggcaccagaaggatacaatgatctagctgttgaagttgtggaacttgcaggatatcttcctttaggtctcagcgttttaggtgcatctttgcgagggatgagtaagaaagagtggataaacgctctaccgcgacttagaactagtttgaatgggaaaatagagaaactactaagagtatgttatgaagggttagatgagaaagataaggctatcattcttcatatcgcgtgcttattcaatggcaagaatgttgatc

SEQ ID NO: 178874 - DNA, 253 bp, Arabidopsis thaliana landsberg
gttcttgaggtcgggtgtgtatcttgtcttggaaaagctagagctccaagtctaccagagactcatgaagaaaatgtaagcaaagacaagctatgataccatccaagattcttgagtttataactcttattattatcaatgtttcagttatataaaccagaagctgagtgatccagcgagagctcaccagctgaagcttgaagggattgccaaagcactaagatggctagatatggacatggatctggacgag

SEQ ID NO: 178875 - DNA, 137 bp, Arabidopsis thaliana landsberg
gagtatcagacgcagtgagccatccgatcatgatcggacagcccagattagatcgggctccacatgaaacggtgaacgctattgaccgtgggtctgacatcaagcactcagattgtccagttgaatcggacagctag

SEQ ID NO: 178876 - DNA, 57 bp, Arabidopsis thaliana landsberg
gtgaaaaacgaaagagatattggacgtagaaaatatcaaaagtgtgcacatcctaag

SEQ ID NO: 178877 - DNA, 76 bp, Arabidopsis thaliana landsberg
atgtgcaacggtattagagagacccggaaggagaaacaaccaaagagtaggaaatttctcttcgtagaagatgaag

SEQ ID NO: 178878 - DNA, 1150 bp, Arabidopsis thaliana landsberg
atgaatcgaataacttcttcttcaaatgcgcaaacgaagaaatttcctcagtctcagccacagccgccggagaaaaatgagaaaaaactgaaaagggagagatttccggtgaaccctttgagagatttcagtacaagaagctctggaagcagcagttgtagcaatgagagtgcttctggttcaacttccggtgaagcatccaacggttgtcacaggttcttgctctctcattctttctcatcgtcttcttcatcatcttcttcttcgttgggagtttttcctcgtagaccagtgagatcagtagctaaaaaccccaaatctgctccggtagttagtaaacccttaattagaaagaaaccaagctctcttgaggaggttaagttgaaatctactcttactgagaaacctaatttgctgaagtctcatagatgcaagacaaatcctgtatctggaaagagaccaacttgtaagattaccatgaaaccggagaaagtttcggttttgaagaaacaatcttctgtttctagaaatgttaagcttaaagatagccaaactacgattagagtagatgacagtattgctcagagtactcctgtttctaaattagaaactggatctgatttgatttatagaaggaagagtgaagctactgatgatggtagactaagtagcaacagtagtagttatcaagataggacaccacctgttcaagcttcggtgtctccagagatacagtgtggatcgtctatgaatctgtctgcatcagctcaatcacaagcttgttatgctgctggacatttactctcaggtgttagtgataagaggaaatgcaagcctaaggggatactcactgtgggtgaaaatggttttgaggttggtaaaggcaagatactgaatgattctgatgaatttgatgaaggagattttggtaatgacgggagttatgatgatatttctgttatgcctttgcctgcggatgcgtcagtgcactggcttttatctccttgtgatgaggagaaagaacatgagaaggaaatatctgatgatggtttctctcagtttcagcaaattgttgagtgtgttggccatgagactccttcgccactatcagatcgtagtgcttcttcggatctatgcaacattagtagtg

SEQ ID NO: 178879 - DNA, 327 bp, Arabidopsis thaliana landsberg
tttttgccacgtatctcaattttgttcccgctacaactttttatcaccaggaacgccgacgagaaagggctgttgctctccgcggtgattatagtgttgaacgttatgaccttaatgatgataaaacgatggtgaagattcaaagagagcagcggaagcgccttgataaggagaacagggcaaggagaggccgtgatttggacgatagagaagcaggtcaagataacctacaccattttccagagaaaagaaagtcgtccagaagagctgaagctcttgaagcatattctggttctgcttcacattctgagaaagacaatttgaaaa

SEQ ID NO: 178880 - DNA, 574 bp, Arabidopsis thaliana landsberg
atggccgcgttcccgtggacccgctcctatgaaaatcagggacagaagctggacgacttcccgcatatgaagcgctggttcgatatcatggccgcccgccctgccgtccagcgtggccttgcggtcgggaaagagcggcgcagcaacctcgccaatgacaaggatgcccagaagatcctgttcggccagacggcgcggggctaaggcgcgaggctgaaggcgtcacgcctcgccggtgctttcgatggcttggcggggcgctgaagacgacggttacgaaaaccttgctttcgtgaagcgtttgcgtggttagcgaagtcttgaatttcgccgcaggaattttcgtcaaatttgagcggaaaccgcgggcgtccgcgttttctatccttaacggaatctcacgtttacctcttgttttgactttgttttcttccagttaagcacgccatttaacgccggattcaaagctcggcggcattctgcgaaccatcgaaagggcagccacggcaaacgacgaaacggcggctctgaggcgcagacaggggataaaaatggcacgtttcgaaatgtttga

SEQ ID NO: 178881 - DNA, 117 bp, Arabidopsis thaliana landsberg
atcgttagattcgatgtcggtgaatctgaaatcggagaaaccattattggagagaagcctctcccgtttctcgagtattccatgcctgaaggaaccttgcttcgccgccattactag

SEQ ID NO: 178882 - DNA, 86 bp, Arabidopsis thaliana landsberg
atgtataagaacgaccatgacataaaaaataatagcattaggaaattaatattacctggtaacccatttcaagaagagaagccaaa

SEQ ID NO: 178883 - DNA, 1434 bp, Arabidopsis thaliana landsberg
atgagattcttcaagaccgaccatagattgttacatcgaatcattgggtacacaagaccattccacggtctagctaaaacccaaaacggtgagatcgctagaccaggtttggttgatccaagctcgcacccgtggcccgagtggctagatttaatggggatgctagcgaaaaaaggttactttgaagaaagcttgattccattgatgagttccaaggaatctaatcatattcgtacagcttgtctcaatttcgcccgccatcgtttcactctcgttaggtaatgcaatttgattcaatattgcacaccaagtgctcgactaaatgccggagataaaaaaaatatacagatccttctttcaagtcctgcatttgttttccatttattaaaagactctcttttagttgaaattgatgagaatttacagaaaaattcttacttgcagaaacctgtcaaagaaagatatcaaagtgattgctgggtgtggttgtccaagcactgataggaaggtcgtgaactcaggaaagcgtctaagagcttatgttggcattgatgaaggaaatgtatgctttcttctttatagtcactaagtgtaactcttttttttattcacacgcttatatgagtttgcatcaaatggtctctttgaggttttacttgaaacttacttaacaaagcttaaacatttacttagtaggtgtgtggctcttgcaacttgagagggaaatgtgaaagggcgtatgcacaagcacgagatgatgaaggtgctcgaactatagatgtcatgcgtttactgctaacttacgggcttgattccatttctcctactgtggagaatcgtgcctgtcaaaccaaacttgttgaagattctgtgaggaagttgctcagagaaagtgtagcgtatagcttaacagattttgaatctgctgagactgagacagctggagatgagctccagccaaattcacaggacattgatgaaagagatccacgaaaaaggccaggggattggtattgtacagagtaagtaatcttactgcattgcttggtaatgtttatgattcgatttcagggatgttaatctttgggctcttttttgtattatgaactgggcagatgcaagtttctaaattttgcgaaaaacataagatgcttgcgatgtgatgttttttctgaggaaaggcttaaacagttgaaggaagaacaaaaagatcatctcccactgaagaaaggagattggatttgtcaaacgtgaggacaaactgtttcatcggttagtgtttaatctgattaaaaccatgaaaacatgtttaagatttttgttttacttgcacagatgtaatttcctgaacttttcgaaaaacacgagatgcttaaggtgcaaagacaagcctacattgcgtcaaatcaatcccggagagtgggaatgcgagtc

SEQ ID NO: 178884 - DNA, 898 bp, Arabidopsis thaliana landsberg
tggggattcaagtcttgtttgatacacaagttaataactctgctgataatcgatgtggttgtcgatgcatccacaaaaatggagatggaaaatgcgaaagaaagagttgtggtttacaatattcatctctaactcaagcctccttttgtgccttccctaaccctccaccgttgctcccgttgctacaaattccgcgtcctgaaactcgtttagttgatcctgcccgtagctcgtgcaaacgaacaggatcttgtcctgtaactatacttgttactgggaataaccatacccttggagaaagtactatatatgccttttaaactttaagcaaatttataaagtgaattagtcttataggatcctaacagtttcgatactaatcttcacatttttttagctttatctcggaatcttctcagtacttctttcgcggtgaactcctctgaccatttcttgcgtaatctcgcctacaatgtcttggcaagtttttctccgccagaattttggtagttttcattgccatatttaagtctctatctaccagaatttatgatgaatttttatatccagggtacaatatcagaagcagactacaccaattatcttgatccagggattcactcagatcttcccattttcaacatccaaccccagtgcaccccagccactattttgtcattgtcattccgacaaccacctctcgagtttcataaaggtattaagttaacaaaattatgtgtgaaaccctagaaaccataaactgaacactaaacccacaatggtgtatatatatgaaccctaacccaaaaaaaaagaaaaaactcttaattctaaattgaaccaagtgtcgttatttcaactagttaggcgaagcttagaggtctgccgattcgagtga

SEQ ID NO: 178885 - DNA, 506 bp, Arabidopsis thaliana landsberg
tgtctgcgttacgttgaggtatatatgcttgctggtcagtatgacagagacgtccagttgactgtggaccaaatcaaagtttatctcaatgagattatccttcctggtcatggcatggacgcatggatcttggatgttgatgatacttgcttctcaaacgtcttttactatcggcttaagagatatgggtacgtatacacacttgtttctttttactaaaactagttttaagatgttgtgattcttggataccaaaagttagaaaattgtggctaatgatgagttaacatgtagatgtgacccttatgatccaactggatttagaacatgggcgatgaaaggagagtctccagcaatacaacctgttcttgaattgttctataaactgatagaaacaggcttcaaagttttcctagtaaccggaagagacgaagagacccttcgccaggcaacaatagagaatttgcataaccaaggattcactggttatgaaaggctgattatag

SEQ ID NO: 178886 - DNA, 557 bp, Arabidopsis thaliana landsberg
atggccatcgacatagggcagggtgcgatcgacgacgacgaggtcgaaggcttccgcacgggcgcgttcgagaccgtcccggccgtcgtattcgacggccacatggtagccttcggcggcaaggccgcgttcgaggaaggacgcgatgcggcgatcgtcctcgacgacgagtatcttcatcggcccggtccttcgccaagaggcagcacgatctcgaaaagcgcgccgccttgcgagcgattgcgcagttcgatggtcccgccatgctgtgccacgatctgcctggcgatggaaagcccgatgccgaagccagtattgagcatgtcgttctcctggcgcccgcgataaaagcggcgaaagacgttgggctcgtcttcggcagagacgccgggaccctcgtcggcgatgcggacggtggcgcgccggtcgtcgttagtcgtcgcaatacggatcgtgctgccgggcggcgagtgctttaccgcaatgtcgatgccgatcatcagggcctgcttcaaacgccggaaatcgccgggcacgacgatcggccccgtcgttag

SEQ ID NO: 178887 - DNA, 123 bp, Arabidopsis thaliana landsberg
atggcggatcaagttaaagaaaagacattggaggaaacttctacatgggccgtcgcggtggtttgcttcgtcttgcttctgatttcgatcgttattgaaaaacttattcataaaattggatcc

SEQ ID NO: 178888 - DNA, 727 bp, Arabidopsis thaliana landsberg
atgaagcacagcggtgggaaccaagcctgctatgttcttggtcaaaagaccccaagcatccgagatctctactcgttgggacacaaactaggtcaaggacagtttgggacgacttacatgtgcaaagagatctcaacagggcgtgaatacgcatgcaagtctataacaaaacgaaagttgatatcaaaggaagatgtggaagacgtacgcagggaaattcaaatcatgcaccatctggctggctacaagaacattgtcaccattaaaggtgcttacgaggatccattgtatgttcacatcgtgatggagctttgctcaggtggggaattgtttgacagaattatccagagaggacattacagcgagagaaaagcagctgagctgataaagatcatcgttggtgttgttgaggcttgccattcgcttggtgtcatgcatagagatctaaagcccgaaaatttcttgttggttaacaaggacgacgacttctctctcaaagccattgattttgggctttccgtgttcttcaaaccaggtgataacatcagctgcatcatttgcaacatcttcagtcagaatttcacacttgctacatcatctgcaactttcaggtcaaatattcgaggatgtggttggaagtccgtattatgttgctcctgaggttctgctcaagcactacggacccgaggctgatgtgtggaccgcaggggtcatactgtacatattg

SEQ ID NO: 178889 - DNA, 133 bp, Arabidopsis thaliana landsberg
ggagcgtcgtgacgcgacaagacctgaaaaatcccgcgaatacgacaagatcacgctcagcaaaccagaagccacaagtgcaagattggcgacttccggccagaaacgaccgccaaaggcaaatccaaaatag

SEQ ID NO: 178890 - DNA, 8309 bp, Arabidopsis thaliana landsberg
  unsure (1)..(8309): unsure at all n locations
ggttttttcatggaggaagaatctacatcagagattcttgaaggagagattgttggaatcacatttgctcttgctagtcaccatgaaatagtaagttataagagttatactctctggagttgatccatcttgttctgcatcaatgtttatcatgggttttacataactgaaggatttcgaatagctaaaacctctatgttttggttatctttggcactaaattcactataattgtactcaagctctgtgtgatgctaagtgctacacttttgcatataaatgttgttctgcgatatatcctctgtcactattccatttctcactggactgtaattctttcttgcagtgtattcaatcgattagtgaatccgcaattaatcatcccagtcaactcactaacgcattcttggggttacctcttgaatttggtaaatgtgaatcttgcggtgcgacagaaccagataaatgtgaaggtaatccagttccgtagttgctatatttttgttcttacatcatttgttggaatacttcttcagatatcgatatttgtttctacattttcaggtcattttggttatattcagcttccagtgccaatataccatcctgctcatgttaatgagttgaaacaaatgctgagccttctgtgcttgaaatgtctgaagataaagaaggcaaaggtattacctcattgagttttcttaaattccatgtgatccacacataaataaaccatataaaatctcgactaatctttttcacctttctgagtacagggcacaagtggtggtctggcggatcgcttgttgggtgtctgttgtgaggtgagtaatggcatatacattctgattgtttccttttaagttttacctgaaagcaagttgatagatgtttcttatgtgaacctggttcagcatttagttagtttttctaagttttccttcaactagttgcatgttagaaaacttgctaattcaaatctaaatagtatttgtgcttcttttgatccattcagtgaaagtaacattaatcaatgcttgtgaagcagtagctattggtattttcgtggcatcatgaaacattcactgctttatgttattttggatgttattattgctgaacgtcttggatttttaactactatattactttattaggaagcttcgcaaatctcaatcaaagatagagcatcagatggtgcctcatatctagaactgaagctcccatctaggtcaagactgcagcctggttgctggaatttcctggaaagatatggttatcgctatggaagcgattacacgcgtcccctgctggcaagagaggtttttactttcttctgtgtgtttatgtttctgtttatgtaggattttatggtgacgttctttttgttcatttggaatcattctctatctttaagatcttttctttctggaaactgatgattatgtactttccgtgtccttttccatatggtgggaaaacaaataggttaaggaaattctaagacggatccccgaagaatcaagaaagaaactcacggcaaagggacatattcctcaagaaggatacatactagagtatcttcctgtcccgcctaactgtttgtcagtgccagaggcttctgatggtttcagcaccatgtcagtggtaagttgaaactaaattactatgttgagttgaatgctttggcttgtgttgtaacccctggatttgtgtcattcttattttcaggatccttccagaattgagctaaaggacgttctgaagaaagtcatagccataaaaagctctaggtctggcgagacaaactttgagtcgcataaggctgaagccagtgagatgtttagagtggtggatacctatctccaggtgaggggtactgcaaaagcggcaagaaacattgatatgagatacggggtgtctaagatctcggatagttcatcttcaaaagcttggacagaaaaaatgagaacacttttcatccgtaagggttcaggtttctcttcccgtagcgtcatcactggagatgcttaccgacatgtgaatgaggtagggatcccaatagaaattgcgcagagaatcacatttgaggaaagggttagtgtccacaatagaggttatctacaaaagttggtagacgacaagttgtgtttgagttatactcaaggttctacgacctattctttaagggatggatccaaggggcacactgagcttaaacccgggcaggttgttcatcgcagggtcatggatggggatgttgtgtttatcaacagacccccgacaacacataaacattctcttcaagcgcttcgggtgtatgttcatgaagacaacaccgtgaagattaaccctctgatgtgtagccccctcagtgctgattttgatggtgattgtgtccatttgttctaccctcagtctcttagtgctaaggcagaggttatggagctcttctctgtggagaagcaactgcttagctcacatactggacagctgattttgcagatgggtagtgattctttactgtctttgagggtaatgctggagcgggtatttctggacaaggcaactgctcaacagttagctatgtatggctctctgtccctgccaccaccagcactaaggaagtccagtaaatctggcccagcttggacagttttccagattctacagcttgcctttccagaacgtctgagttgcaaaggagacagattcctggttgatggaagtgatttgctgaagtttgatttcggggttgacgcgatggggtccatcatcaatgaaattgtaacttcaatcttcctggagaagggtccaaaggagacacttggattctttgattcgctgcagcctctattgatggaaagtctgtttgctgagggatttagtctaagtttggaagacttatccatgtctagggcagacatggatgtaattcacaacctaataatccgagagatttcacctatggtgtctcgcttgagattatcatatagagatgaattgcagctagagaacagcatccacaaagtgaaggaagtggctgctaactttatgctgaagtcatattccattcggaacttgattgatatcaagagtaactcagcaatcaccaagctggtgcagcagacaggcttcttgggtcttcagctttctgacaagaagaagttttacacgaagactctggtagaggacatggctatcttttgtaagagaaagtatggcaggatttcttcatctggtgattttggaatagtgaagggctgcttctttcatgggctggatccgtatgaagagatggctcattcaattgcagctagggaggtaattgttcgctcttcaaggggattagctgagcctggaaccctctttaagaacctgatggctgttcttcgggatatcgtgattacaaacgatggaactgtaagaaacacctgtagtaactcagtcatccagttcaaatatggagttgattctgaacgtggacatcaaggtctgtttgaagctggagaacctgttggagtattggcagctactgccatgtcaaatcctgcatataaggcagtgcttgattcctctccaaatagtaattcatcatgggagctaatgaaggtatagcaatatcaaatctgccttctgaatacagctttgttcatctgtattgttgtgtaattgttttctgtatttgttcttttcccaggaagttctgctctgcaaagtcaatttccaaaacactactaatgatcggcgcgtaatcctttatttaaatgaatgccattgtggaaaaaggttttgccaggaaaatgctgcttgcacagtcaggaacaagctgaataaagttagtcttaaagatactgcagtggaattcctagtcgagtaagaattgggttttagtaacttcagtcgctctttttagtgtttgtgttatttttttttatggttttactaaacctctttgcaatctgctttctctttacttgcatgaagatatagaaagcaaccaactatatcagaaatttttggaattgattcatgcctacatggccatattcatcttaataaggtttgaatctggttcctttactgttgaatctttctggaagcctctacctgtcatagaaacactttcctattatccttttcttgctgtgtaattggtgtttttggtttactagacattgctgcaagattggaacatcagtatgcaggatatacatcaaaagtgtgaggatgtaattaactcactaggacaaaagaaaaagaagaaagctactgatgatttcaagagaacaagtttgtctgtcaggtttgtacaatgatttgcttttcctctggatgtcgtctctggttgaatgttatgcataatttgtccagaaagcaagtctgatgttgatttctagttttccagttatcttctttccatcatttttgttcttcatagcataatgtctagctttggtttctacctgattatgattgatttattctccaatgaacagtgagtgctgctctttccgagatccttgtgggagcaaaggttcggatatgccttgtttgacgttctcctacaatgccaccgatcccgatctagaacgaactcttgatgttctttgcaatacagtttacccagttctgctggaaatagtgatcaaaggtatttgaataaaacttttcatttttgtatatttcgcttgtttccctacacttcgatttcttctttgatgggggagcagtgtatctgatagagtcttcctttcaaaattttgtagttacatggcttacgaaattttgttttttgccagaagtttaatgaaccaaaatattttctcaactagtctgattgaattttcctccaagttgtgatcgatattctgtgctactataaaagaaagcctatgttttagtaagatttctagatacatgtttttgatgatactcctgtatctaaactgagcaggtgattcacggatttgctcagcaaatataatctggaatagttcagacatgacaacgtggatccggaatcatcatgcatcccgccgaggggaatgggttttggatgtcnnnnnnnnnnnnnnnnnnntcaagcaaagtggtgatgcatggagggttgtgatagactcatgtcttccagtgcttcatctaatagacacaaaacggtcaatcccttattctgtaaaacaagtgcaagaattgcttgggttatcctgtgcttttgagcaagcagtacaggtacttactaacttaaaacgtgatccgtgcctggatcttacacttaagtcatgatacttcttacatatttcatgtttggtatcacatttgctcattgtttgtgtaaggattttaaacgtaagatgttgatttgatttgcagcgtctatcagcttcagtgagaatggtctccaagggagttttgaaagaacacatcattctcctagcaaacaacatgacttgttcagggactatgttgggtttcaattctggaggttacaaagctttgacccgatccttaaacatcaaggctccattcacagaagcaactttgattgttagtagttcaatcctttagtctaatacaaattattttcttagactatatactggccgtcatgttaacaggaattactttttgtgcctttaggcaccaagaaaatgttttgagaaagcggctgagaaatgtcatacagattcactatcaacagtcgttgggtcttgttcttggggaaaacgcgtggatgttggtacaggctcacagtttgagctcctatggaaccaaaaagaggtagacattctcactggaaatcataccaattgactgaggttttctcatataagtttgttatgtaattttatgtcatttgttgtcaacctatttgcagactggtctagatgataaagaagaaacagatgtgtacagcttccttcaaatggtcgtatccacgacaaacgcagatgcatttgtgttcttcccctggttttgatgttacagaggaagaaatggctgaatgggctgaatcgcccgagcgagactctgctcttggagagcccaagtttgaggacagtgccgacttccaaaatttacatgacgaaggcaagccatcaggagccaactgggagaaaagctcttcgtgggacaatggttgcagtggtggttcagagtggggagtctcaaaaagtacaggtggtgaggcaaacccggagtctaattgggaaaagactacaaatgttgagaaggaagatgcttggtctagttggaacactagaaaagatgctcaagaatcttccaagtcagattcagggggtgcttggggtataaagacaaaggatgctgatgcagatacaacaccaaactgggaaacaagtccagctccgaaggattccattgtcccagaaaataatgagccgacttctgacgtttggggacacaaatctgtttcagacaaatcgtgggacaaaaagaactggggaactgaatcagctcctgctgcatggggttctacagatgctgctgtttggggttctagtgataaaaagaactcggaaacagaatcagatgctgctgcttggggttccagggacaaaaataattctgacgttgggtcaggtgctggtgttttaggtccctggaacaagaagagctcggaaactgagtcaaatggtgctacttggggttctagtgacaaaaccaaatcaggtgctgctgcatggaattcttgggacaaaaagaacatagaaactgactcagaacctgctgcttggggttctcagggaaaaaagaattctgaaactgagtcaggtcctgctgcttggggtgcttgggacaaaaagaaatcggaaactgaaccaggtcctgctggttggggtatgggggacaaaaagaattctgaaactgaattaggccctgctgctatgggtaattgggacaaaaagaaatcggatacgaaatcaggtccagctgcttggggatctacagatgctgctgcttggggttctagtgacaaaaacaactcggaaactgaatcagatgctgctgcttggggttctaggaacaaaaagacttctgaaattgaatcaggtgctggcgcttggggttcgtggggacagccaagtcccactgcagaagacaaggataccaatgaggatgatagaaatccgtgggtttccttgaaggagaccaaaagtagagagaaggatgataaagagagaagccagtggggaaatccagccaagaaatttccatctagtggtggctggtccaatggtggtggtgcagactggaaaggaaataggaaccatactcctaggccacctagatctgaggataatttggctcccatgtttacagcaacgagacagcgcttggactcattcacctctgaggagcaagagctgctctcagatgttgagccagtcatgaggactctcaggaaaattatgcatccgtctgcgtatgcctttctagttcttacgctctgtttataaaatttccagttctatgtataattaattatgctgtttcacattccatatacttgttatgcttcatctatcgaaaactatcttctttcgatgaaggtaccctgatggagacccaatttctgatgatgacaagacgtttgtcctggagaagattttgaacttccatccccaaaaagagacaaagctcggttctggcgttgacttcatcacggtaaacaacatttctccttaacaaacttagcttctcttctaaagcttacttagccttatgcctgatgtgaaattcttggttgaacaacgatgtaggttgataagcacaccatcttctcagacagcaggtgcttctttgttgtctcaactgatggggccaaacaggacttttcataccgaaaatccctcaacaactatttgatgaagaaataccctgaccgtgctgaagaattcattgacaagtactttacgaaacctcggcctagcggaaacagagacaggaacaaccaagatgccacaccacctggggaagaacagtctcagcctccgaatcagtctataggtaatggaggtgacgactttcagacacagactcagtctcagtctccatctcagactcgggctcagtctccatctcaggctcaggctcagtctccatctcagacgcagtctcagtctcagtctcagtctcagtctcagtctcagtctcagtctcagtctcagtctcagtctcagtctcagtctccatcccagactcagactcagtctccgtctcagactcaggctcaggctcaggctcagtctccatcatctcagtctccgtcccagacgcagacataa

SEQ ID NO: 178891 - DNA, 1015 bp, Arabidopsis thaliana landsberg
gtgatatcaaagcttacggatgtgagggcttcacatgtaccatacagagactctaagttaaccaggatccttcagtcctcattgagtggtcatgaccgagtatctgtaagtcttgtttaagctgttctcaatcctcgtggtacaataaatataaaatgcacaacatgatctttatagtagtatactttactgattagtttttctctctggatatggtagctcatttgtaccgtcactcctgcatcaagcagttcggaagaaacacacaatacactgaaatttgctcatcgtgcaaagcatattgagattcaagctgaacaaaacaaggttttccacgcatatcttctttcagctcttatcttttgtactgaaggtcttttttggtttctaactctagaaaactgtagataattgatgagaaatcattaatcaagaagtaccaacgcgagattcgtcaactgaaggaagagttggaacagcttaaacaggaaattgtaccagttcctcagctgaaggatattggtgcagatgatattgttcttctgaagcagaaggtatgcttgaaatttttgttcggcactgatgttttctgagaacaatttgtcagaaagagattatggcagatagaggtcaaatttgatagaggtcattctggacacaaaatgcgacagtttttcaatactaccactgtttccgtccattttatttatattctattagacaagtgtgaggacgttttatgtcattgccttttggtttacaatcaagcatttgagagaagctgaagtaacctggttttgttgtttttggctatataacgtgatgataaaagctagaagatggtcaagtcaagctgcaatctagactcgaagaagaggaagatgctaaagcagctctcttgagtcgaatccaaaggctgacaaaactaattctcgtgtctaataaaactccacaaacatcgcggttttcttatcgtgctgatcctcggaggagacactcattcggagaagaggag

SEQ ID NO: 178892 - DNA, 964 bp, Arabidopsis thaliana landsberg
atgttgattgtccgcaacactcgtaagtcagatcgtcccgcgcttaacagaactcaagctcaatcggatcatatcttctacgcctttgagaactatgaacaacacgctgcctttgtcgctgaacaacctttaacagctatttcaccttactcaacaatgcatgaagatgtttgtagcttagcagaggacaaacgtgtctcattcataatcataccatttcaccaacaacgcacagttgatgaaggcatggaatcaaccaacccggcctaccgtttagtcaaaccaaaacctactcgaaaactcgccttgttcggtcggaatactcgtggatagaggactcaatggagcgacaagactcaactcaaacactgtttctcttcaagttgctgttctgtttttcggcggtccagacgatagagaagctttggcttatgcatggagaatggctcaacatcctggcatcactctaactgttttacggttcattcatgatgaagatgaagcagacacagcttcaacacgagcgaccaatgacagtgacctaaagataccaaagatggaccatagaaaacaaagacaacttgatgatgactacattaatctctttagggcagaaaatgcggaatacgagtcaattgtgtatatagaaaaactagtgagcaatggggaagagactgttgcagcagtgagatcaatggacagttctcatgatttgtttatagttggaagaggagaaggaatgtcgtctcctcttaccgcgggtttaactgattggagtgagtgtcctgagcttggtgccattggagatttgcttgcttcatcagactttgcagctactgtgtcggttcttgtggttcaacagtatgttgggtcatgggcacaagaagatgatatggattttcctgagagtccagtacattcacatgaaacaaaggtcacatatggtttagagaatccacgttag

SEQ ID NO: 178893 - DNA, 943 bp, Arabidopsis thaliana landsberg
atggagggaaagaagtttggagcgcagtctaccgctcgtgcgccactgccactgccacagccgccatcagcaccgccgccagaatacgtaacgtttcgcattctctgcaacgtgtctcaggccgggcatgtgatcgggaaacatggaggaatggttaagaagcttcataaatcaacagaatccagtatctgggtcgagaagactcctcttgatgattctacgtaccgtatcatcaagattttcggtcatgtaggttcagtgtctagggtgaaattaggtgttattgttaataacgttagcaacagggagaagaaggagcaagaacaagaagttgaagtctccagagcacaatacgcgttgattagggttttcgaagctctaaatttcggagattgcactagtagtaccgtctcctgtaatctgttgatggaagggagccatgtggttactgtgataggtaagaatggtgaattgatgcagaggatattggaagaaactggttgtaatgttcaactacgttcacatgatttgtcaatttgcacaaaccctggtgacgtagtgctcaaggtacgaactcgtgattttgttttctggtaaaatattagtcgttgatcaaagcacttcttttcgggtcaagttcttgtagaatcattcatggtacttatgctagggataaagttagaatcttataatttcttatgctgagtggacctaccaaatgtggcagatcgaaggaaatagactttctgcagtgatgaaggcactagtatccatatccagtcgcttgcaggcttgtccgccgatttctacggcgtctttgcatgctgaggcggttcctgatgctctacgcaggcctatggaatacaggtcacaacagtatagggaagttgatcctcatggttccttgcatagacatgttgagatcagtcaagaagatgctctg

SEQ ID NO: 178894 - DNA, 157 bp, Arabidopsis thaliana landsberg
atggggaataatcgcgactatagttatagaagtgttgctctcagttcctttctatgctccaaaagactgcgaattgcaaagaggaaatgcatatctcaggagttgagtggaggaacatatccaagtgcatgtagtccaaaggatatgaagaagaaat

SEQ ID NO: 178895 - DNA, 45 bp, Arabidopsis thaliana landsberg
atgtgccttctttcgctgtacacccatgcattcacgtcggactcg

SEQ ID NO: 178896 - DNA, 157 bp, Arabidopsis thaliana landsberg
ggtgtgctaagaatgtgaaagaggaagatgttgatgagacatcaggggaaagagacgagaaagatgtaaagatcgaagaagcgctagagaataacgaagaagagagtagagaagaagaagatcatagtgtccgaaaacgcaaacgcaagaaaagaaa

SEQ ID NO: 178897 - DNA, 841 bp, Arabidopsis thaliana landsberg
atgggaaaatgctctgctttgatgatattcctctcttcttctcttctacttgtccttcaaacactccatgttgttaacgcggtcaaatgtttcggaaactccttcaacggtaacagcagcaccttcgctcagaatcgccagaaactgttccctactcttgctgacaaagtcatcatcaacgacggattctacaacgcttcactcggccaagatcccgacaaagtttacgctcttgtcagctgcgcaagaggctacgaccaagacgcttgttacaattgtgtccaatcattgactcagaacacactaacagattgtcgaagccgtagggattcgttcatatggggaggcaatgacgatgtaacttgtcttgtacgttcctcaaaccagtctacttttgggagcgtccagcttaaacctcctgttgtatggccaagtccagatactatagagtcatctaaaaacataaccctcttcaaacaacagtgggaagaaatggttaatcggaccttcgaggctgccacgaaagctgaaggttcctcggtgcttaagtactataaggccgaaaaagcgggtttcaccgagtttccagatgtttacatgctgatgcaatgcacacccgacttaacttcacgagattgcaagcaatgtttgggagattgcgtgatgtactttagaaaagactatatgggaagaaaaggaggcatggctagtcttccaagctgttatttcaggtgggatctatattctttccataatgcttttgataatgtaacaagagttcctgcgcctcctcctcgacctcatgctcaggaaaaggagagctgcataacagtaaaaaaag

SEQ ID NO: 178898 - DNA, 84 bp, Arabidopsis thaliana landsberg
atgtattgccaaagggaattggagattgctcataaggaagagacagaacgcggcgagagcataaaagtcccgcaatatataatg

SEQ ID NO: 178899 - DNA, 349 bp, Arabidopsis thaliana landsberg
gacagttcgtagttgcctacatcgattctgataacgagagcgtcatcgtgaggtttatcgaggtcagtgacttcactttcccaaaatgtgatcccatcatcgggctttttccttttgtgttggaatctgctttcctttgatgagttttgattgagttgatcgaattgttgcagagttgagatcctcccataatgaaatcgatgtgtttcggggagaggtgctcagttacttttctgcaaaattttgagaggcgtaatgggaacatctagtttttcttttccgacgcgggaggaggcgtagtgactgacctttctgtcctgcctcctagatcgagctccgcaaagactag

SEQ ID NO: 178900 - DNA, 1173 bp, Arabidopsis thaliana landsberg
atgggaacgaaagtctcagacgatcttgtttccaccgtcagatcagtcgtgggttccgattactcagatatggatataatcagggctttacacatggcgaatcatgatccaacggctgctatcaatataatcttcgacactccaagtttcgccaaacctgatgtagccactcctaccccgagcggctctaatggagggaagcgagttgatagtggattaaagggctgtacttttggtgacagcggaagtgttggagcgaatcatcgcgtggaggaagaaaatgagagtgttaatggtggaggagaagagagtgtttcagggaatgagtggtggtttgttggttgttctgaattggctgggttatcgacatgtaaaggaaggaaattgaagtctggtgatgaattggtgttcacgtttccgcatagtaaaggattaaagcctgagactacgcctgggaagcgcggttttgggcggggaaggccagctttgcgtggtgcttctgatatcgttaggttctctacaaaggattcaggagaggtgtgtttcacatcttttttatttgctatgttaagtttgttagatgggaattgttaactaactatgatgggctcttgtggtagattggtagaataccaaacgagtgggctcggtgtcttctgccacttgtgagagacaagaaaattaggatagaaggcagttgcaagtcggcgcctgaagctttgagcatcatggatacaattcttctttctgtaaggtatgcatacaaaacttttgtgttcccgtttacaatttcaggatagatgcattagtgtttgaagtggtgtgagtttgtttttgaaacagcgtgtacattaatagttccatgtttcaaaagcatagtgcgacttcatttaagacagctagtaatacggcagaggaatcaatgttccatcctctcccaaatctctttcggttactcggtttgatcccctttaagaaggtaatggttattccttgcctataacttgatatgcggattcttttatagattgcagtttgtagttcccatatacttctcatatgatgtgactgaataatcttgagatgacgaagaaatttttccattcttcatcatatttaggcagagtttactccagaggatttttactctaagaagcgacctttgagttccag

SEQ ID NO: 178901 - DNA, 328 bp, Arabidopsis thaliana landsberg
ttccctaaagcacaatcttataaacacaacattggaccttggtaccaactatagcaaacaattggattttgtggatttacgagacaacttcataactggttataaatcaccagctaataaccccgtcaatgtaatgtatgtattcatctttgaccaatatgtaacatctttgaagaataacttacgtatgtgtgttgatatatccataggttggcagataatcaagtgtgccaagacccggcgaatcagctgagtggctactgcaatgcagtccaaccaaattccacattttctaccctaacaaaatgtggtaatcattgtggtaaag

SEQ ID NO: 178902 - DNA, 1709 bp, Arabidopsis thaliana landsberg
atggcttcagagagcggcttaaatggagatccaaatatactagaagaggtttctgagaccaaaagagacaaggaagaagaagaagaagtgaagaaaacagagaagaaagacgaggaacatgagaaaaccaaaacggtgccgttttataagctctttgcttttgcagattcctttgatttcctcttgatgatcctcgggacgcttggatctattggaaatggtcttggcttccctcttatgaccttactgttcggagatctcattgatgcttttggagagaatcagactaatacaacagacaaagtctccaaagtaaatcaaacgaatgttttttgtcttaattgggattcatttcaagatttgactttcttactagttttttttatttaactcacacaggttgctctgaagtttgtatggcttggaatcggtactttcgcagctgcttttctccgtaagttcattggatctgtcgaaggatctaaactttgtgaaaaaagatttcaagaaaacaaagagtgtaaacttttttgatgtctatgaatgttcagaattgtctggctggatgatttctggagagagacaagcagcgagaataaggagtttgtatctaaagacaatcttaagacaagatatagcctttttcgacatcgatacaaatacaggagaagttgttggaagaatgtccggtgacactgtgctaatccaagatgccatgggagaaaaggtaagctactaaaaaaaagtcaacatggcgttctaatgtttgaaactttatttgttaaaacgacgacgtttttgtcaggtgggaaaagctatacaacttctagcaacatttgtaggaggctttgtgatagctttcgtaagaggatggcttctaacgttggtcatgttatcttcaattcctctacttgtaatggctggtgcacttctggctatcgtcattgctaaaacagcttctcgtggacaaactgcttacgccaaagctgccactgtagttgagcaaacaattggttctataagaacggtaattaggcttacttatacacttttacttagccaaaattaccaaaaccacaaagacttactatctacatttttgcaggttgcatcatttacaggagagaaacaagcgataagcaattacaataaacatcttgtcactgcttataaagcaggagtcattgaaggtggttcaactggattgggtcttggaacgctctttcttgtagtcttttgtagctacgctttagcagtatggtatggaggaaagttgatattggataaaggctacacaggaggacaagttctcaatatcatcatcgctgttttaactggatccatgtaagtacctttcattagcaatacctctttggttcattaacttccctgcaaactaatttgagatatctttttgttccttccttaggtcgttaggtcaaacatcgccttgcttaagcgcatttgcagctggacaagccgcggcttacaagatgtttgagacaattgagagaagacctaacatagattcttatagtacaaatggtaaagttttggatgacattaagggagatattgagctcaaagatgtttactttacttacccagcgagacccgatgagcaaatatttcgcggattctctctgtttatctcgagtggtacaacgatggctttagttggacaaagtgggagcgggaaatctactgtt

SEQ ID NO: 178903 - DNA, 542 bp, Arabidopsis thaliana landsberg
atgcggcggaagtctccggtagagattgatgacgtcggtgggagccgaaatggaaagagaaaagagagaatgaatataacgaaagcgatcatgaatgataacttgtttggtttgggattttgtaaaacagagtttgggcagctacagaagctgtagccaatcataatattttattcattaaaaaattgttaatattatttatttatttgcaaattttatttattttttttatctgaaaattttcacattctctcaatttttttttaagtgctttcacaaattatttgtttttctaatcatatctttttaaattttttttttttttcacagacattttttaaatctattatttcaattttattgacttttcaacgctttccttctctactttttattcttccacattagttagaacctacattcctgtcctgagtctactatgcagacagttagaactagcggtcttggcaaatgtgacacttcatagatttatcaatcaaattagaactgactgtctgcgtataactctcatcgctacatag

SEQ ID NO: 178904 - DNA, 303 bp, Arabidopsis thaliana landsberg
atgagcacttcgtcgagcaacggattgcttctgacgtcaatgtcaggacgtcatgacgacatggaagctggatctgctaaaactgaagaacattctgatcatgaagagcttcaacatgatcctgatgatccttttgatattgataacaccaagaacgcttctgttgaatctcttcgtcgttggagacaagccgctcttgtgttgaacgcatcgcgtcggtttcgatacactttggatcttaataaagaagaacattatgataatcgaaggaggatgatcagagctcatgctcaagtcattagg

SEQ ID NO: 178905 - DNA, 439 bp, Arabidopsis thaliana landsberg
atgagggagtttattatccgttcggattatatgattattcgaattcggtttcggttcggatggtgttagattcggaacggtttcggatcagtttttgatttaaaaaaaaaacaaattaaaaaattgtacaattttaataaaaatcgtttaattttactaaaatttggtttaattttgcaaaacattgtataattttaacaaataaaagtaaaaaaatcggacagtaaagttatttcggatatttttgctatttagtattttttggatataaattataactaatatttttagatatataattttatttaggattagcggatatccgttcaatttttggttcggatcggatttgtttcggataattcagataggaatatccattatgtattcggattttgtgactattcggttcggtttggtttcggagccggatttttga

SEQ ID NO: 178906 - DNA, 370 bp, Arabidopsis thaliana landsberg
caactgcggtgcctacagagacctagatttctgcagagacacagctctcttaacagagaaagaatggtcatgtgcggatccacaatgtgtgaagatatatgacaaagagcagatagagagtagccttatccagatggtgagacagagggaaagaatgtaccagttgcaggatctagtgtgcaataggtgcaatcaggtgaaagccgctcatttgacagagcagtgtgagtgttctggatcctttagatgcaaggagagtggttcagatttccacaagaggattgagattttcttggatatagcaaagcgccagaagtttagactgctagaagaatgcatctcctggattttatttgccaccagctgttga

SEQ ID NO: 178907 - DNA, 161 bp, Arabidopsis thaliana landsberg
gtttattatttattgcaaattatgagaattgttacatagacgattttacaacggacaattccttccaacccttattagatccacgacagcaacaactcctcttcttcttctctatgcctttgatggacaccttcaatgatcttctctgcttagaatcctga

SEQ ID NO: 178908 - DNA, 997 bp, Arabidopsis thaliana landsberg
atggcaacccttaagtgcattgattggcaattcagcggaagcgaggcggccaaagatgctgccgcggcctccttaggctcatatacctctgcactctatgcactgtgcgatcctcatggcaaacccattttgcccccacgaaatgagatcctggagaccagcaatacagccgaaaaagcagttgttaaagctgttctttatggctcgggaaacgcctatgctcctagcttaggcctcgcggccgccaaaaggtatatataaatgcattattattgataacatgtctatataagatttcttgaaaaaaaatttattacaaacagctccgtattagtacattttatctgtaatggttatgtgttgaaagtgtaactagatccaaattattttggtagaggaaacttttgaatttggaccggtctttttggtaatttgttcacaaaacctttccaaaatcatttgtcatttttggtatatatgcttaaatgaacatttagtttggtttaactcaaatttagcaatcccaaaattttggaacttggaagggaccaaatatttttgattaattctgatttagccccattggacacttctattttgcatcctaactctatttatatatctttgacacaatcatttttgcttccgtattctcagtgccgtagcagagtatctaaaccaaggtcttccaaagaagcttacagcagatgacgtgtttatgacccttggatgcaaacaagctattgagctcgcggtagacattctcgctaaaccgaaagccaacgttttgcttccgagtcccggcttcccatgggacctagtccgctccatctacaagaaccttgaggtccgccactataatttccttccagaaaagaactttgaaatcgactttgatagcgtccgagcgctcgtggacgagaacacatttgccatatttataatcaacccccacaaccccaatggtaacacctactccgaggctcatctcaaacag

SEQ ID NO: 178909 - DNA, 305 bp, Arabidopsis thaliana landsberg
atgaaggaggagaagctttttgcttcacaaggaggccccattatattaggacaggtaacattgacaaaaagataaagattaataaaaacaacaaacacatttttaagatatgaatcataaaagttttgaaagatttttttaaaattggcgtttggattcagattgagaatgagtatagtgcggttcaacgagcatataaagaagatggattaaactacattaagtgggcatttaaactggtacactcgatggatttggggatcccatgggttatgtgtaagcaaaatgatgctcctgatcctatg

SEQ ID NO: 178910 - DNA, 389 bp, Arabidopsis thaliana landsberg
atgcctaggagtgaccgcagaaaagctgcacatgatctcctaaaagatgtttgtaaccccacaagtcatgacagtttgagaaaatctgtggagctggaaataaaagtaagatctctcatcttctttcatttgagcactagtctatcttactttaaactaaccaatgggatgatgtttgcaaattaactaggctttgaagaagctgatcagagagcttcaaaaagactgggaagaaaaacaacatgtaaagcaatatacaaagaataaatataaagatctcgaacaaaaggtgaagcatctagagaagaaaaaggaacaacttgcgggactgcgggacgaagaaagaaaaatcatgttcgggacgaagaaaacgcatgataggaagatag

SEQ ID NO: 178911 - DNA, 437 bp, Arabidopsis thaliana landsberg
  unsure (1)..(437): unsure at all n locations
atgcaccgtgtcgacgcgacgnnnnnnnnnnnnnnnnnnnnnnnnnnnnnnnnngaggcttgggataactcagtggctcatccgagcgcactcgccgtcgaaaagttccttagttacagcgatgaccaccatttggaaggcgccaatattctcctaccggagatctctgccgttccgcctcttccagccgccgtggcggcgatttcccggtgaggtaaaacaggaacaaatcaatgtatacgacgatgacgaaagaagggaagtttaaagaaaagaaaaaccataatagtgccacgtggcgagattggtcggaaagaggattaagccatgatattgccacgtggcgagattggtcgctgtcttggagaagatgatgaccttttaattctgttacttaaagaaagtgtgttacggttaaacggaaaaaacagttttga

SEQ ID NO: 178912 - DNA, 134 bp, Arabidopsis thaliana landsberg
aattagacttatcgacactccatgatgattcccatatggatggttctcatatttttaacattactttttacatagatcgaatttcggaaatgtatcgaaaaaagaggagagattcgattcaaatacccacatag

SEQ ID NO: 178913 - DNA, 425 bp, Arabidopsis thaliana landsberg
atgccgaggtatcgcgcgagaacctggctggtgcgatcggcgtgtactacctggtgctgcatcagatgaccacgcgcgcgaagggcctgcccgtcgacaatctaaaaaccgtatacaccggcttcggcgacgatgcggcgttcaatcgcggcgtgcaccgctacgccggcgatccgcatgccatccactatctagcagcagccacctcgctcagcggcaagatccgcaagccgctggtgctgcagtacaaccacgacgacccgctcatgaccgcgcacttccagtcggtctacccggccatggtgcaatccgcgcacggacgcgcaccgacggtgctgccgtcggtcggcgaagggcattgcgggttttcgccggagcagatcgggcaagcgtttcagacgttgatccgggaaggcgatggctaa

SEQ ID NO: 178914 - DNA, 952 bp, Arabidopsis thaliana landsberg
atgagaacacatatgctccaacttctcaagagtctaagatctcggactcgaggaaaagacatgaccgactcagaaatcataagctgggctaacaggaaagtcagaatcatggggcggaaatcgcagatcgaaagcttcaaggttccatcttttacttttatcaaaactcaaaaaaaaaaagttcaactgaacaagcttatgttgaacaaaatctgtcttgctaaacttcaataggataaaagtctatcgagcggattattcttcctcgatcttctatgggcggttgagccaagagttgttaactggaatcttgtcaccaagggtgaatcaggtccttactctctctaactacactcacaacctcttcactctctttctcttctctgttcaaactgaatttgtttaatcgttattttttcgctatggaaactttgtaacagacgatgagaagagattgaatgctacatacattgtcagcgtagcaagaaagcttggttgctcggttttcttgttgccaaaagatatcgtggaggtaaagaacggaatcaaatctaaaaaaacaagaaaacaacatacatcaaaatgtaaatctgatgtttttaaatgtcttttgttgcaggtgaatcaaaagatgatactaatcctaacggcaagtataatgtattggagccttcaacaacaatcatcatcgtcagagagttcaagttcgagttcagactcatcatcaactcatagcacgacgacgacatgcactagcacatgcacgagcactgatgcttcaccagctccatctgtcacgggtgaagacgaagtctcttctttaaatggcgaagtctcaagcctaacgatagaagaagacaatgaagtctcgagcctaacgatagaagaagacaatgacgcagacattttgtcagatatcacctccatctcagaggaagcagctaacgaatag

SEQ ID NO: 178915 - DNA, 195 bp, Arabidopsis thaliana landsberg
gttaggctccgacctcttgaactgcaacaactgaaatatacccttttggaggtggcattaccgctgctgctgggcccggacttgccctgcaatggaccttggttgggggacgaagattgtactccgtacaattaccagacttggctgagcccagtacttgcatctatcggcactccctcctcgtgtcatgattga

SEQ ID NO: 178916 - DNA, 4181 bp, Arabidopsis thaliana landsberg
aggtggcttgttggatgattactggggaaagacaagctgcaaggataaggagtttgtatctgaaaacgattctaagacaagacattggattcttcgatgtcgaaacgagcaccggagaagttgttggtcgaatgtccggtgatactgttcttatactagaagctatgggtgagaaggtaaagaaacaaaaacagcaaaaaaataaaatgaataaactgaagttactaaagatttgaaactttctgcaggttgggaagtttatccagttgattgcaacattcttgggtggatttgttttagcgtttgtgaaaggatggttacttacacttgttatgttagtttcaattcctcttctagctatagctggtgcagctatgccgattatagttactagagcttcttctcgtgaacaagctgcttatgcaaaagcatcaactgttgttgaacaaactttcgggtctattcgaaccgtaaacatgctttatgttcccttttgtaaggttgatgttcatcaaaagtttgaaatttttttaaccaagtttttttctttttttttctttaggttgcttctttcacgggagagaagcaagcgatgaaaagctacagagaatttataaatttagcatatcgatcgagtgttgtgcaaggtttctctatggggttaggtcttggagtagtgttttttgtgttcttttgcagctatgctttagctatatggtttggtggagaaatgatacttaaaaaagggtatacaggtggggaagtggttaatgtaatggtcactgtggtcgcaagttcgatgtgagtaatatattcatattattctctgtagtctcaagacagttaaaacggtttaaaaaactgtgtttttttttctctttttataggtctttagggcaaacaacaccttgtctaaccgcatttgcggctggtaaagctgcagcttataagatgtttgaaacgattgaaagaaagccgttgattgatgcttttgatctaaatggtaaggtcttagaagatatccgaggcgaaattgagctgcgagatgtgtgttttagttaccctgcgagacctatggaagaggtttttggcggattctcgctgttgattccgagtggtgcaaccgctgctctggtaggggaaagcgggagtgggaaatctactgtgatcagtttgatagaaaggttttatgatccgagttccggcagtgtgcttattgatggtgttaacttaaaggagtttcagttgaaatggattaggggaaagattggattggttagtcaagaacctgttctgttttcttcaagtataatggagaatatcgggtacggaaaagagaacgcaacggttgaagagattcaagcagcggcaaagctagcaaatacggctaatttcatcgataagttgcctcgaggtttagagacattggtaggggaacatggaactcaactctcaggaggacagaaacagaggattgctatagcgagggcgatacttaaagatccgaggatcttgctgttagatgaagcgacgagcgcacttgatgcggaatctgaaagggtagtccaagaggctttagatagggtaatgatgagccggactactgtgattgttgcacatcggttaagcacagtgagaaatgctgatatgattgctgtgattcaccgtggcaagatagtggaagaaggtaagtaacatttctgcattttggttaggggtttgactcaactgcaaaaatttaattttttgtactcatctaataggttcacactcggagctactcaaggaccatgaaggggcttatgcacaacttatacggttacaaaagataaaaaaagaaccgaagagattggagagttcaaatgaattgcgagacagatcaatcaaccgtggatcatctagaaacatcagaacgagggtgcatgatgatgactctgtttccgttcttggtttacttggacgccaagaaaatactgaaatttctcgagaacaaagccgaaatgtgtcgataatccgaatcgctgctctaaacaagccggagactacaattcttatacttggaaccttattaggtgcagtgaacggcactatatttccgatttttggtatcctctttgcaaaagtaatcgaagctttcttcaaaccgcctcacgatatgaagagagattcaagattctggtcaatgatattcgtgcttcttggtgtagcttctttgatagtgtatccaatgcatacctacttgtttgctgtagctggagggagattaattcagaggataagagtaatgtgttttgagaaagttgttcacatggaggttgggtggttcgatgagcctgagaactcgagtggcaccataggatcaaggctctctgctgatgcagccttgatcaagactcttgtgggcgactcgctgtctttatctgttaagaacgctgcagccgcagtctccggactgattatagctttcacagcgagttggaaattggcggttattatcttagtaatgattcctttaattggaatcaatggttatcttcaaattaagttcattaaaggcttcactgcagacgcaaaggttggtcgcacattcctgttttcatttttttattgtggaatgagttttcaagggtttaaggcttacttgttgaagaagaaacttaaaatagttttgaaagaaaaaaatgtttgcaggcaaagtacgaggaggcgagtcaggtggcgaatgacgcggtggggagtataagaactgttgcgtctttttgtgcagaggagaaagtgatggagatgtataagaagcgatgtgaagatacgatcaaatctggtattaagcaagggttaatcagtggattagggtttggtctttcctttttaattctttactctgtctacggtgcttgtttctacgcgggtgctagattggttaaagccggaaaggcaaacttcaacgatgtttttcaggttttttcttcttcttgggaatctttgtaatgaaatcttgggacgaagaaaactaatgatcttttgcaggttttcttggcgttaaccatgacagcgattgggatatctcaagctagctcttttgctcctgattcgagtaaagcaaagggtgctgctgcttccattttcgggattattgatgggaaatcgatgatagattcgagagatgaatcgggactcgtgttagagaatgttaaaggagatatcgagctttgtcacataagcttcacctaccaaactagacctgacgttcaaatctttcgtgacctatgtttcgccattcgtgctggacaggtaacatgtccaaaagactactatcatttgtttttttggttatcttgatatttcccttacatattgacacaaataaagtgaggagacatgaaacttaccaattctgattttgatatacatgtttagtcctttaattctcttgcttatttcagacggttgctttggtcggagagagtggatcaggtaaatctacagtgatttctctgttacaaaggttttatgatccggattcgggtcatataactctagacagagttgagctcaagaagctgcaactaaaatgggtgagacaacaaatggggcttgtagggcaagagcctgtactgttcaacgacacaataagatccaacattgcctacggaaaaggcggtgatgaagcatccgaggctgagatcatagctgtcgcagagcttgctaatgcccacgggttcatatgtggtgtacaacaggtaaactacaagacttttattcacttttgaaaaacagagagattacttactatgcaagcaaaaaaactctttcttatttcaatttagggttatgatacggtggtgggagaaagagggatacaattgtcaggaggacagaagcaacgcgtggcaattgcacgcgccatcgtgaaagaaccgaagattctgttactcgacgaagcaacgagcgcgttggacgcagaatcggagcgggtggttcaagacgcgcttgaccgagtgatggtgaaccggaccacagtagtagtggctcacaggctttccacgatcaagaatgctgacgtcatagccgtggtcaagaacggtgtgatcgtagagaaagggacgcacgaaacgttgatcaatatcgaaggtggtgtttatgcttcgcttgttcaacttcacattagtgcttctagttga

SEQ ID NO: 178917 - DNA, 225 bp, Arabidopsis thaliana landsberg
atgctcttcgccaaatggtcgatggtcatcgcccggtaggtgattgtgccgccccagttcctcactcatgacagtgaccatctggtccgtggtgaggcagtccggccagatcataggagcatcttcctgaccgtaccaacttcggtcggtaagcagcccgaacgccccctgcatgatgtcatccgtcgaaatcgtggaaaaggaccggtcgtcgggagtagtcag

SEQ ID NO: 178918 - DNA, 403 bp, Arabidopsis thaliana landsberg
atgttcttcaagctctttaccatcttcttcttcttcatcatcctactctcgaaacccctgaagtcctcttctcaaagtctcaacttcacttacaatagcttccatcgtccaccaactaacatatccatccaaggaattgccacagtcacatccaacggtatcttgaagctaacagacaaaccggttataagtacaggtcacgctttctacgccgaaccaatccggttcaaagattctccaaacgatactgtatcctccttctcaacaaccttcgtcatcggtatctactctgggatcccgacaattagcggccatggcatggcctttttcatcgctcctaaccccgtcctctcatcaaccatggctagccaataccttggtctcttaaacagcaccaacaccg

SEQ ID NO: 178919 - DNA, 473 bp, Arabidopsis thaliana landsberg
atggccggttcgttgtcgacgggggattttcacattcggaagaagccgaggttggagaaattctccagcgaatcaagttacggctacacattccgagaactccggagatacgacccttacgacgatgaatacgtacgacagtacatcttatactactaccagtaccataagagcgaggtacatatcttcaattctccccacaggaattaggttttaattatgacctcgattgaaacctggatctactaattgataaaaaaaaaagtttggtttttgaaaccagcacgatatgctaattttagctcacttattgttgttgtgtggtttagggtttcgtgattgattgggataaattggatttttggttcgagactaggcctatcatggatccattccgtcttgatgtgtgcaggaccaatgatgaaatgatccatggcgtggctctccgtgctattacacaacacaatgtttga

SEQ ID NO: 178920 - DNA, 3215 bp, Arabidopsis thaliana landsberg
atgcagcgacagacggatactcatttagctaggagtatcgaacctgaacctgtgaaaagggtattacgaccaaatcatgttgaagatcatagttggcagcacgaaactctgacaaaccagtcaccgaaagatgttactgcatatcatgactctcggcctgaaacgatcaccatgaatgtaagcccattatcataattttcatctggatttcttctgtgtgatggacataaccaaatgaaagtgcaggaactttctgcttccaaaaagccaaagggaaagaagaaacgtaaagatgacttgtcatcagttcaaccagatccatctgtgctgcaaggtctgtttgtcctcttttccttgttttctatgcatgtacctctaccctctcagtaattgtagtttttttttatgcctatttagagtccatcgtacaaaacttttgtgagatgttggaggacttctgtggcagagctgaagtccctggtgatgatagggatgaagcagagtggtcatcagtgcccgttgatgaagttcgtgttcttataaatgaattgatgactatacggtcaaaaatgcttctgcatatggtacctgttgatattctatcaaggttactgcgcactctggatcatcagatacacagggcagaaggcttgtccatttatagtgaacatgtgagtagttttttgtttgtctctctctatttgctcctctcttgctttacagttgtgaggattctttcatgttgcagtcgacgcaaggactattttaacgtacaatttagctttcaatcaaagttatttttttctctgttcgaagtatatttcttggacttgcaaggatgcattattggtttatttcgttctactgtgtgttaaattatgacgtttagtattataaaagtggcaaatacgttttttctttttctttttgtacctaacattttctgcgaaaaatatttcagtcagattcagattcagtgttgttggttcttggtgcccttgagtcaatccatgcatcgctagcagtgatggccaacagtgatatgccaaagcagctctacaaggaggaggtgagtgcttcttaagtgttattttccctgaaggctgtttatctgctcactgccatcgttccaccatatttaaatgattcattttttgatattttttctacttcttataattagataattgagagaattctggagttttctaggcaccaaatgatggctgttatgtctgcttatgatccatcataccgcactggaagtaaaccggcagaaaatttggcatttgaaggttggttttcctatttactttggaagttccatttgctattcatattctgtaccaatgtatggcatgtcatttcctatatttgaaacttgagttttatcctagtatgtaagcgcaaaaattgtgccttttgacatgctttgttgtttttcaatattctcatttctcctccacaaggttatgttccacttacacaaaactgacatgtagatatatgccacacgcttttataggtgatgatgatgatgataatccagatcatgacatggggtcagccagcaaaaggcggcgcatagtaaaaaacagcaaagtaaagaaggcgtcagtaaacaggtttactaattaatacccattcttttgttattttagttgcacacattttcccatctgctatttctgtctgtaggatctctggagcagtaaatactgcactacagaaactttgcactattcttggcttactcaaggacctgttgttggtagaaaggttgtctgacagttgcattttacaactgttgaagacaagtattacaacatttctagtggaaaatatccaaattctgcaacttaaagcaattagcttaatcggtggtgtaagactttccactaactccataatccatatctttactgtgttttctgttctaaatatcaatgtcttcacgtcagtaatgttcttaatattgtaaatgtcttaattgcagatttataattcatattctcaacaccgaacatatgtgatagatgaaatatctcaattgctctggaagttaccttcctcgaaacgagcattgagagcgtatcttctccctgatgaagaacagaggcagattcaaatggtcactgctttgctcattcagttggttcacaacagcacaagccttcctgaaacctcgagacaggctgccagtggaaactctatactagagacctcagttgatgttggctaccttactaagtgtcatgaagcggctacagaaacatgttgcctcttctggactcgtgtccttgaacgatttaccagttttaagggtcaggacgcttctgagataaaattgattattgagaatcttgttatggacttactgacagcattaaatcttcctgaatatccgtctgtgtctcctattcttgaggtaaatgtattgtgttactgtgttttttcttctaattacgagtcaatgtttttttccactctgacaggtcaactattgcaggttctctgtgtcatactgctacataatgcagggttgaaatcaaaagatgtctctgctcgaataatggccattgagttgctaggtacaatagctgcaaggttgaaacgtgatgctgtcctctgcagtaaagacagattctggacgttactagagtcagatagtgaaattagcgttgatcaagtttgcacaaaagattgcacattttgtttaggtaaaagggctgggaacttattggtctgtcaaatttgtcaaaggcggtttcatggtgactgtttgggtttaaaggaactagacatttcaagtcgaaattggcactgtccgctttgtgtatgcaagaggcaacttcttgtactacagtcttattgcaagactgacaccaagggtactggtaagttggaatcagaagaaagcatcgaaaatccaagtatgattacaaagaccgaagttgtgcaacagatgctcttgaattaccttcaggatgtaggatcagctgatgatgtgcatactttcatttgatgggttgacactgactcttattacatggatgttgcaaataggtgactcttatatggaaggtactacgcgcaagatttatctgtgcctgtggtataaagaagtgcgcagatctgagaataaattgaaagattacattggcagactgaaagcagaagttaataagcacgcaactcatggagcacatgcttga

SEQ ID NO: 178921 - DNA, 75 bp, Arabidopsis thaliana landsberg
atgtggtccaccagcaaaagagctgtcatcatccgtggatccctcacttcaggtgaatatggcaccatcaggcag

SEQ ID NO: 178922 - DNA, 167 bp, Arabidopsis thaliana landsberg
atggccgttcagcaaaccggggccgtgttagtgccgatttatcctacaatcagcctgcacgaattcgcgtttattctcaatcagtcggaagtgcgtattctgattctttccgatgaagagctctatctgcgttttcagccggcttttaaagacattcccacacttca

SEQ ID NO: 178923 - DNA, 159 bp, Arabidopsis thaliana landsberg
atacgatatgatggtgcatttaatgtggctcaagtatattccacgtgccgcaatggtggcttgcacaagagggtaatgccagcttcccattgcaagtacaagctcgtacgaacacggcagtgctcccgattcccgatctcatattttggctacgaatga

SEQ ID NO: 178924 - DNA, 377 bp, Arabidopsis thaliana landsberg
atggggcagcggctcctccctcggcacctccccttgagcagcaaccgcgacaacttcgcgctttggcggctccctgttttgcgcagtccagtggacagcaccacccctccctccagtttggctaaagcatgcccgaccctatacagcgcagtcctcgcagccgagatttcccccacaaccccgcaacattggcgcttcgcgggtgttcgatgtaatgcccgagtgaagctctatgtcatgaacggcagtgaagtcactgtcaccgtgacctcgcctttgtgcgtggctcgcattgctccgcgtcgtcgtcgagtctccttgcaagcttgcggtttaaccaaaaccttgtttgcgtgcgagtggagaacctcgatgaa

SEQ ID NO: 178925 - DNA, 1433 bp, Arabidopsis thaliana landsberg
taagtataagactatcaacaccgatacaagaaacaataaacgatatagttcattaatcaaaacaaagacaacactcaacagcaaggaagtaccacagtcaatatcttcaaaagtcgtctatgcctatctgtttcgtcttaccgtttctacttctacattatacgcatactcaattaagtaagcaaattaaactcaagtgtcacttatacaaataccaataattgtattttatttggtccctaattaatttaatagttttatttaaaaattaaatcttgtttcataaaatgttttatttttctttgttcggtttccaaattctaaactactaaactaaattgatatctcttctaaattaacatatttttattttttttaaacattagagataaggtgatacactgatacaatagatggagagagctcattttacgtatatatataatataagatttttgttttgttagataatctagaatatgattgttacgtcgatttaacttatccatacactcttcttttgttactcactcgcatatatatgattgtattgtagaatgtagattaccgtgtcattcttctttaatttgttcttcattcacaaaaggttcagaaagctcgtgagtttctatttgatatagtactctgccaattaaacttccttttcctatttcttcattcttcttttcaaaaggtattatttttatgtactcaacatggatacgtgcatgcaggaattaattgctggtgatcagaatatggctgatcaagactttccctccgttataaacatcgttcttctagtcaagcttctggaccatgttgcagctactcaaaaccaaaatagtgggaatccgtatactcaccaggtcataatatgaagtgatatctcgtatatatgagctttgcctttagataacatcggtgcgatagccgtcattctcacgaccgatccatttgattacaacaaataaacaaacaaacaaacaaagtagcatgtttcttatatgttcacgttgtcatgccagactattttttaggaatggctattgttaatagatttttaaatattgccattcatcgatttctcaggaaggaaataatatgccgggagaaaaagaaaagaagatcgaacctaagaaccttacagaagcagagttaataacgatggaagaaaagtcacggatggagcatgagcataccatgaatataatggaacacaaagtaaaactgtatttaaaacttcgtataggtttaaacatgttcttgacaatacgtgattgattttaatattctctcgttatctatctttcaggtggagcatgcgctaaaacaaaatgaggaaacatatgacaaagagatgcagcattgtgtgattgatgtatccaactctactgataaagtactaataaaagatcgaccacataaattcg

SEQ ID NO: 178926 - DNA, 113 bp, Arabidopsis thaliana landsberg
atggcggtcctgtccggctgttcgaatccacacgacgagaatggccctaacttggttgctaaggaaagcttgggcctgattggttgcccgcatataggccaaccaggctcacg

SEQ ID NO: 178927 - DNA, 332 bp, Arabidopsis thaliana landsberg
atggcagtcataccgtttttaggaatcgacgttgagaaactgaccttggacgataaggcggagattttgttcctggatcaagggtaaccaaaaaaatactactcttttgtgtattctttgctcttttttactctgttaatgtaaactcattatataatctcgttgctttagctgatttcacattgtaaaattagttatctctcttgaggtttggcttatgttgaataacattgtctaaatatttggcagcctaacaaccgcggtggtacttgctgtcatattcactgttgccaaaaccttcgacccacttcctgaagatattcttcgctatg

SEQ ID NO: 178928 - DNA, 189 bp, Arabidopsis thaliana landsberg
aagctcgacgaactcggcccgaagaagttcgtcgaatgggtgcgcggcgaaagccgggtcttcctcaccgactcgacgatgcgcgacggccaccagtcgctgctggcgacccgcatgcgcacgcatgacatcgcccgcatcgccggcacctatgcaagggccctgccgcagctcttctcgctggaatga

SEQ ID NO: 178929 - DNA, 847 bp, Arabidopsis thaliana landsberg
aggttggaactgaatgcgaattcgttgtcagagtctcgtttagaagataagagaagaattcagatgttggagaaagaattgttgaattgctaccaggagattggtaatggagagattctcatgaaactgaaatctaggcatatattttatatgagctaaaaaacactttctttgtctttcagattatttgcgggatcaagtaaacttcagaagccaggaaatgaacgacctgagtgaacatgtactcgatcttgaagtcagagtaactaaatcagggaaattggaagaagaagttaactatttgagggaggagttgtgttcgtcgaaatctgagcagctattgttgttgcaagaactggagagcacagaaactgagctacagttttctttgttttctgttgagaagctggaggagtcggtctcatccttaacattggagtctcagtgtgagatagaaagcataaaacttgatatagtagcgttggagcaggcgctctttgatgctcagaaatttcaaggtgaaagcatccaagaaaacgataagttaagagaaatagtcaaggagctacggttgaagtctcgagaggcagaagagaatgctgagtgtttagagaagcaaaacaaggagctgatggagagatgtgtagcctctgaaaggaatatcaaagacttacgtcaaagctttagaggaaggttggaaagtgaaagtgaagcgcctgtaaatgcagattgtttccatgacatcatcaagaaattagaggttttccaggatgggaaactgagagacaaaatggaagatatggcaagacagatacttcaatacaaagatcttgtaaagcagctcaag

SEQ ID NO: 178930 - DNA, 600 bp, Arabidopsis thaliana landsberg
atggctgcggagcttgtaagttctgcaacaagtgagaagcttgcagatgtggactgggccaaaaacattgagatctgtgaattagctgctcgagatgaaaggtatgcagagccagactgcttttttctttgtagaaagtgatatttttttaccaacttataaattctttttagccagagaatttcaagctcgcagatgttgctatgatgtttaaattttatcatccttaatgattgagatatataaacactttacttttgcttcgtcttggacatactttttttctgataatgagtctatctatggtgaacaggcacgcaaaagatgttatcatggctatcaaaaaacgcttgggaagccaagacccaaatactcaattatatgctgtccaggtaggttgtggtccagatctatcgtatacagtagaatcatgctttatgagaatgtcatacttttgaacgttttggtaacttaaaactgttgttttgcttgttcttgcagttgctagagatgttgatgaataatattggagagaatattcataagcaagttatagatacaggtgtactccctacgcttgtgaagatagtaaagaaaaaa

SEQ ID NO: 178931 - DNA, 78 bp, Arabidopsis thaliana landsberg
atgaaccggttgcaacaaggtgcactcgacgaacattcaaggaacttaaagaagttgcaggccatggagcctgacatg

SEQ ID NO: 178932 - DNA, 117 bp, Arabidopsis thaliana landsberg
atgattgatgttgcattgtttcagccagtaaagccagcaaccaagctgatcccgcagctaagcagttttcggatcttatactcggaaaactcgaacaagtgtcggctctatacaatc

SEQ ID NO: 178933 - DNA, 152 bp, Arabidopsis thaliana landsberg
ctcccaaattctcccgctgacccctaagttctacaaaatccatcatcgtcgattgagattccttatgggaaagtggaatcatcgatccagacaccaccgtcgcaggtctcctgagcggtggtatagcggacgtcaatcttcttcttcttcag

SEQ ID NO: 178934 - DNA, 726 bp, Arabidopsis thaliana landsberg
gtcgctttagattctggcaactgcaacagtatccgtatattgcttcgctttatgacttccctggtatggttgctaatcatgtttcatggttgcttcgtctatttaatatgttagttcatgtttctaatacacagaaagcgtctaaaaaataaaagtgcgaagtatatagaacagtatttgtgaaaattttgagatgttttgtctattttctaacatgttttagttgggttctttagttgtgcagtaaggttattcaacctgcttctttgattgtcgtcttcgaaacattgctatcatctgctgccactactgtggatgaagagaaaggaaatccatcatggcagccacaagctgacttttacgttatatgcatcttgtccagcctcccgtggggaggatcagaactcgctgaggtactgctcttggactaaatacattctagaaattatttacattgaaggctattagaatactggatatgcgtttccaattttataatgatgtcatccttgttggatctgcaaccaactttgttagtctgctttcatatctattatcttaacttgtatggccgctgaatttccctttggtttgcagcaagttcctgatgagattgaaagagtgttagttgggatacaagcttatttgagcatccgaaagaattcttccacctctgggttaaacttttttcacaacgcagaatttgaaagcagccttgcagagaag

SEQ ID NO: 178935 - DNA, 84 bp, Arabidopsis thaliana landsberg
atgtctgttgaagagaacaagagaaacatccagggcaatcgccgcaagatctttgatctagagaatgcggtgctctgcaacgag

SEQ ID NO: 178936 - DNA, 73 bp, Arabidopsis thaliana landsberg
acaaataaaccgaaccgaatatactaaactgaaactgaagcaaaaaacgaatcataccgaaccggaaatttga

SEQ ID NO: 178937 - DNA, 829 bp, Arabidopsis thaliana landsberg
agcgttttctccgcggggaaactcttaatacacgcttctccttccctggaccatgctgcttcctcgggacttcgtcgttagctttattcccagccatagctaaagatgctatctcgccggaggttcaaatttcgccggaaaaacagtaactttctcttggcttcgccgggaaaaacagtaactttctcttccccggatgtgggagttcagtgactcaattcaactacccaacaattcgaagttatgtcaaattttgaaacaatggatactgaatttcgtttcgctttctaattctctctcaaatctctccgttactctcttctctttttctttttcttcggtttcttcgtttcagtttttttgttttgtctttttcaaaactgaaccgcatcaactaaaccgaaaccaactgctgtagggtttggtttatgccatcaactgaaccgatacgaactgctgcacggtttggtttgtaccattattaagttttcctaaggtaatttggtccgaaattgaatgaaaagacaaaccgtaaaaaccagttctcactttgacaaacggtgagagcaaatcttttttcgtccacttttgtgaaaatttctttttaaagaatgatggagttaagattgttggaatctctggtcctgcaggcattggtaaaagtaccattgctacagctttacatggtcgactctctaacatgtttcagcgtacttgttttgtggacaatcttagggaaagctataagattggtcttgatgagtatcgtttgaagttgcacttacaacagcaacttcttgcatatgttttaaatcaggataaaattagg

SEQ ID NO: 178938 - DNA, 144 bp, Arabidopsis thaliana landsberg
atgggctggctggatgagcgttcgaccatgggagacacgggcacaggcatgggagcggcgggcttgtggtcgataaacgatgcctgctgggaacatcccggtgccgaccccggcgcacggctggtgtcctggttccaagtgacg

SEQ ID NO: 178939 - DNA, 277 bp, Arabidopsis thaliana landsberg
agtctcttcaagaagacaatctgcaaacattgaaactccgagagccatcaaagaacctgcaaatccgcctttgcatgatgacaatgttgaggagtctagtcagatatcatgttcagtttcaatggagcttaaaagagaatcaaagaagaaaccaacaggcgacgaatcagaggaaatgagaaaaacaacttgcggaagaccatcaaggcaagctgctgaaaaaatcaaatcgtacaaggaacctttacttaatgagaagatgcgagggggcttctga

SEQ ID NO: 178940 - DNA, 1318 bp, Arabidopsis thaliana landsberg
aaatgcaattgtgaaagccctaaactaaccgtgaagaagacgatggatcgcaagggaaagggtaaacaggtcgccggtagtgattcgtattccggcggacagaaaaggaaaaactccgtcgaattcagagatgaaggtttgaggattaagaagcgcaaaaaccctgaggttcttcagttcttcgaagaatcagctgaagttggctactacggaggcagctccgacgaagatgatgacggattaggtttccttaacggtaatttatcattatcttctctgggttcgttgattttcttctttgcatggtttcattgcttcgtttcttcttttgtgaggtctccgattgtgtctgtttttgtttctactgagatttttaccatctaaagtggcgatttttaggtcatctctgtcgaatggctgattccgtgactagggtttagggtttgcattttgttttcgtttgatttcgagctgttttgtctagttttaacttttaaggctttcatactcttaaagcttgaacattgcagaaagttccacactttattatcttactattcttttgatgcagatatggaagacgagcctgaggtggaagagagtagtaaggctggcaagggagaaaagggcaaatcatcctttgtttttcccaaggaagaagatttaaacgaggaggaatttgatagaataatggaagaaagatacaagccaggttccggttttcttagatatgctgatgatgatatcaaagatgccattgagatggatgctcttgctccaacctccaaggatcctcctatatggaaagtcaagtgtgcggtatgtcaaactaaggcttcttctacttatgctttatccctgtatgactatgttcttacttctgctcactccatttggtttgttcctgtagattggacgggagaggcgatccgttttctgtctcatgcacaaatttgttgagctgagaaagataggcaccaaattggagatcatatctgttttttctgtggaccatgtcaaaggtttcattttcatagaagcggacaaggaacatgatgttcttgaggtattgaacatttagcatgcctatgttggattattctcgtacttatctgacagtttggagaatgttgcttggggataatcataatgtgtatgtcattctgatttgtctaattttcctaggcatgcaagagtttagttggtatatacgctactctgatggtgttacttcctaaagctgaaactccaaatctgctaactgtccaaaaaaaaactaaaaaagtttctgagggaacatgggctcgtgttaagaatg

SEQ ID NO: 178941 - DNA, 211 bp, Arabidopsis thaliana landsberg
atggattccgccgggctggccgaatgcgcggagatcctggcgcgcgggggcggcgggccgcggggcttgcgactgcgggggctgcacgcgcacctggccagcgggctcgacgcggacggcgcgctgcgcgccgcgaccggggtgctgcggttcgcgcgcgagtggtgcgccctgcgggaggtgcgggatccggagatcacgctcggcggcg

SEQ ID NO: 178942 - DNA, 381 bp, Arabidopsis thaliana landsberg
ccaagatataacagatgggataaacaaatcagctaaagcggttcaagcagctgaagctggaatcaaacagattggaacacttgcacagcagcaaactctctgtaagcttcttctaatcttttggataatctgtaataaaagctgctgttcatggtggcaacagttcacactggtaaaaaaaaagcggaaaatatgatctgatgatgaacttgatcttgtgattcagcaatgattgaagagagagcaaatttaccagaaatatcactacaacctgttgtggctggtgcagccgaaaagacttctcacgcaatcggcagtgcaaccaagagactaatgaacattataaccggaggaaacaaggatgaagatttagacatttag

SEQ ID NO: 178943 - DNA, 70 bp, Arabidopsis thaliana landsberg
atgttgacacacgggagtggacgcactcgctcgaacaatgagatgtatgatgggcaacgacaaacgaaag

SEQ ID NO: 178944 - DNA, 105 bp, Arabidopsis thaliana landsberg
gttactggcgatcggataaagtcaggttgcctcatgtcttgaaccataagaatattggtttgatcaaggtgaatggtcaacgatatcaggtctatgatatcaaga

SEQ ID NO: 178945 - DNA, 245 bp, Arabidopsis thaliana landsberg
atgcagacatcagaggacgatggtaagatccaattacaagtgacgagtgcctctcttcagccattcacgcaggagcaatggaggaacaaccaagattacttcataaataccgtaatacacacactaatttctaacgttaaaatcgcaaactacattctttatgtggtcctccttaacacttattttcaggcgagaaaacgagcagtgacaattcacgtgtcaaaagaaaccggagagagcgttga

SEQ ID NO: 178946 - DNA, 228 bp, Arabidopsis thaliana landsberg
catcttcctatgtatgagtactttcacgatgctcaaaagatcgctaaggacataaaggtcggttacgccaacgatcctgataagctggctgaagtcacgggattagagaaagtcgcggaacgcaatattgttgctgtgaaccttttctgtcaagaccgttcgcttaaggtatcgtttgagttcacccatcatccttatttcgctactgctgttgttcgtagatcttga

SEQ ID NO: 178947 - DNA, 312 bp, Arabidopsis thaliana landsberg
atgagcaagtgcgccctgtcgccgttgatgtgcgcgttgaaggcgcagaagaaagtgaaggagaagaaggcttacatttttggagtgcaaaccattggcggtatgtgtgggaccggttttgtgttgatcggtcaagctcactgttattgtccaggctgcaccatgaaaatcaacgtgatgagcatgtcacacactgacctctgggtctatcaagagctggcaagctttcagcttaccggcaaactttccgaggaagtcatccgcaattggctttctatggcggctcatcttttgaccgtggcggtagattga

SEQ ID NO: 178948 - DNA, 763 bp, Arabidopsis thaliana landsberg
ccagttgatgggcgacaacatatgaatgaggaatggcggatgcctccaaatggatgtagtgcagatcctcaatatggagcctggataggtgtaagaaacccatttccaggctctcgtacagttaccgacggtatgcatatgcgagaaacatttcaaacctttgtatgtcagtttgctcacatacatgtctgcttgcgggcattatactacttcagttggttatgattcttcttcaattgatattggtcgttttatttgcaacgacaggtgtctttcagccacctccagaaagaccaccttcggggacagtgaggtatcagcttgctgctaataacttacaaggtggctctacgatttcaggtgagacgatctatttcaattgtaattgggggatcctatgcgtttcactgcaatgtttaacgttttaatttgccattcaaggtaatattgcttcgcagatgcttctgtctcgaccagatgtaccttccgcggctcagtacaggccatcctgaagttaaggtagactaccttttgtatattcttttacactttgattagcaagctgcgagtggtctctctctttttcgcttcttcgtctctgattttcttatttctggattgttatcaatcagttcgaaatcgagaacctgcattctcttctatgaaggactttttggcggtatattcacatccagaggcatcaaaagttcaaaactctgcagactattgtcaggatattgctatatattgtaattgttcctga

SEQ ID NO: 178949 - DNA, 218 bp, Arabidopsis thaliana landsberg
attctggagctttccctaatgttgtgtgctataatactgtgattgctgagtgtagcagaagtgggttaaagagagaagcgtaccagattttggaggagatgaggaagaacggtcaggctcctgatgctgttacatggcggatactcgataaactacatgattctatggatctaactgtggaaagagagttaatttcaaaccctgcaacctcaggatag

SEQ ID NO: 178950 - DNA, 239 bp, Arabidopsis thaliana landsberg
ctaggaaatttccggtaggaattccgtcggtaatcgatggcgtcatcttctccggagagatctctgctgtctccaagaaggtgacggtggtagggtgcgaaggcgaggatgatcacttgacggctggatattcgtcgtatatcaccggaaaatttgggtcgttggtgttgaacgctcttccaaaagggtcagttccggcgtctggacccagcaagagaatcaacgacgtcaagacttag

SEQ ID NO: 178951 - DNA, 357 bp, Arabidopsis thaliana landsberg
acaaagctcttgaaagacgttttcagacggtgtttgtggatgaacccacggtggaatgacaccatcacgattttgcggggcttaaaaaacaaatacgaagtgcaccacggtgttcgcatgaccgacgacgctttgatttccgcggcgaaattatccaaccgctacatcaccaatcgcttcttgccggacaaggccattgacttgatcgatgaagcggcggccaaactcggtatcgagatcaatagcgttcccgccgaagtcgacgagatcaagcgcaagatcatgcaattgcagattgagcgttacgccgttcacaaagagcgcaaggatgacccgtgcatcaaggacattgattaa

SEQ ID NO: 178952 - DNA, 114 bp, Arabidopsis thaliana landsberg
gaatgtattgaagaaagagagggtatagaaaatggcgagtggcggaaagggggagaagatattggtttcggtaagggtaaggccgcagaacgagaaagagaaggcgaggaatga

SEQ ID NO: 178953 - DNA, 945 bp, Arabidopsis thaliana landsberg
  unsure (1)..(945): unsure at all n locations
agagtgcggatgtggttatacaagagattgtgaagtttaagaatctgaaggctttgtggctgaatgacaatcctgttcttcagaagaggtaatcatgcatttacaaaatatatggatgtgtgtggatatataattaatttctcatgtatttcttttttatgattattttcagtgaacgtcagatggctgacgaaatattgcaaggctgtccgagtcttgagatttacaactcgtgttttacccctaattatgggttatgggcacttggtttctgtggagatatctttgggaaggataatcctggttgtgttcagcaggatcaacccttgtgcaatgtcacctcacttgacctttcaaaccggtcaatacacaatctagtcaataaggtcagttttgtccccctactttctctcagagaggcaaggagtgtagtttattgaccgtagaggctacaagcattgaccaaggcgtatgtttcaattttgtattttacgagcctaaaattatctgcctttgctttcttcattttcaggcattctctgtgcacgagatgccattactttctcatttaannnnnnnnnnnnnnnnnnnnnnnnnnnnnnnngttggagaactacttgaagtcttgaagctcttcccttcactgtcttcattagaggtaaatgttggaagttgtccttattcagatacaaattgaggttactgtacaaagttaactaaaatttatttatgcagagatgagctcacgtgttacttcttgtttgtaggttgacatacctggacctcttggaaataatgctctagagattcttgaatcgctctcaaacctttctttactaaatggcgttgatacggcaaaaattttggaaactggaaagcatgttgttgactcaatgcttcaaccacgcattcctgagctgaatcctgatgatactcttgttgatc

SEQ ID NO: 178954 - DNA, 302 bp, Arabidopsis thaliana landsberg
aatgacaaatcaaaaatcacgaaagtgatcgaggagcttgatgagaagaaaaaagaaaccctgaaagttacttgggttaaagttaaccagtgagtgtctttctaatatccaacaaagagtttgtctttgctcttaggctcatgatctcattcctcaatgtctgaaaagataatatgatattagcctttgttaaatccttcttttttattagggatttcggatcaatcttttcaactctactacctggcaccatggcaaaactagaacctcctgaagacggtcacttccttgatggtcttgag

SEQ ID NO: 178955 - DNA, 221 bp, Arabidopsis thaliana landsberg
ataatgatggaatactaaagattcctgttttcgggttggctgcgttttatgaccctaagcaaaagcaaacaatgactagtggtgttgtcacactttggtaccgtcctcccgagcttcttcttggagctaccagttatggaactggtgttgatctttggagtgctggttgtattatggctgagttacttgctggcaagcccgttatgccgggaagaaccgag

SEQ ID NO: 178956 - DNA, 562 bp, Arabidopsis thaliana landsberg
atgggttctatgaacaatccgttgaattcttcaagtcttcgtccacctccagctagtgttcctgaacaatcgcgatatcaagctgatcaatatgagaatccgcatcatttgcatacgagtgaccacgcaggtttggttctagtctcagaccgccttaatacagcttcaaatttctattcttggcgaagatctgtttggatggcattgaatgttaggaataagcttggattcatagatggaacgattgtgaaaccaccattagatcatcgtgattatggtgcttggtctcgttgtaatgatactgtgtctacttggttgatgaactctgtgtcaaagaaaataggccagagtctccttttcattccaactgctgaaggaatttggaagaatctgttgtctaggtttaagcaggatgatgctcctagagtgtatgatatagaacagagacttagcaagattgagcaaggttctatggatattagtgcttactatactgaattgcagacactttgggaagaacataagaattatgtggatcttccagtgtgcacttgtggtccct

SEQ ID NO: 178957 - DNA, 79 bp, Arabidopsis thaliana landsberg
atgctctcgtgtggtcaagccaagcttcttgaccacctcaacgtttaccaagttgttgcaactaccaccgtcaatgatg

SEQ ID NO: 178958 - DNA, 1315 bp, Arabidopsis thaliana landsberg
atgtcgtctctgcttctaagcctctcttccaaggcctctctccgtaaacttcctctggtaaatctcttctagtttttgtatataatctctgtttccttcgtcttcttcttctgatgtctatttcttacttttcaccagagatgccacactcttcggatgttttccttctctaccaccaacccttacttgttgtatcgtgtcataaactatggaagttctatggatgatattcatgtaacaagtaatatccactattttgacccggtgaaggaagatgaagttattgtccgagacaaggtattaccaatggagttgcgtaaagggtgtctggtcggaatgtcccatggttggggagttttcaaggccgtgtgtgattataatgaatataaagccatatatgttactgactactacaatccatgtggctccaaatctgtcaaaagcattcctttgcatccccttggtaaacctatagctatccaacaacaagctatcactaacgccgcaatgacttgttcacctgatcaaagcaaagattttgcagttgctgtcaagtgtttaggacctatgatcaatttcaataggcctggtggcacacacaaggactcgggttcggtcatctttaaaaccccttttcaatattttgatcaatcaaaggttatgtattcaaagagagatgaaaagttctacactcctagttttggagggcacttcttggttttttgggattctttcttcgaagaggatatgaccggctctgagttggttgagttgcggttttgcaacgttcctaagttgacccagtccgagtgggagctcttggactcatgttccaagactgtataccttgtggagtctccctcaggccaacgtttcctaatcaagtggtacgaggtttcatgttagggttgtctgtttgcttttgcggtttcatgttataacatgttctttctttttggctctgcttggtaggtacgttgaaagccctgcgaacaagtcgttagtattcaattgtggcggcacaaagcggttcatggtgtttagagaagaggaagacatgaacatgtgttacacagaagacattggtgatctctgcatattcctcggcaacaacgagcctttttgtgtcaaggccagctcattcccgggactaaaccctaattccatctatttcctcggtgaaggctatggtgaaggctacggtgtttatgatatcgccactagatccccacgttccttcacacccaagtctacaccaagttcctcctcggaacaaatagtcctcccttactggatccccccaatgtctctctag

SEQ ID NO: 178959 - DNA, 272 bp, Arabidopsis thaliana landsberg
gttatctctgcaaagggtcagaaagctgtagatacatctctcaaggctgatttgattgttcttaatactgctgtggctgggaaatggcttgatgctgttctaaaagaaaatgttgttaaagttctacctaagatcctatggtggattcatgagatgagaggacactatttcaatgctgatttggtcaaacacctcccctttgttgcaggggccatgattgattcgcatgcaacagctggatactggaaaaacagaacacaagctcgcctagg

SEQ ID NO: 178960 - DNA, 449 bp, Arabidopsis thaliana landsberg
atgagagacttgtccaataataacttaactggaggggtgccagagtttcttggcaaaatgaaatcgttgtcggtcatgtaagcttctctcaatatatatcttctaatgctttttcaaattccacctgctcagatcatagttgtttttcacagaaacttaagcgggaacaatcttaatggttcaataccgcaagctcttcgaaagaaaagactaaagctatagtaagaaactttccacatagcttttgaacgtttatcaatcttaatgatgcgtttgagaacaacccttattttgttgtagccttgaaggaaacccaaggcttattaaacgacctaaggagaaaattcctgtggcaattgttgcatcagttcctgtggcaattgttgcatcagttgtcattgtggttatttttcttgtactcagaaagagaaagtcaacgattgtacaag

SEQ ID NO: 178961 - DNA, 116 bp, Arabidopsis thaliana landsberg
atgaacttagtaactaaaaccgtcctagaccgcggtatgagccattacgttcttgttgcataccgcaacgcttttgccacagccgctatcgcacccttcgctcttctctccgaaag

SEQ ID NO: 178962 - DNA, 421 bp, Arabidopsis thaliana landsberg
atggtgttggaagcttttgaagcaagagctttgagaatggctgttacttgtgctaacaatctaagcaagtttgagaatcaagaacaaggattctcagaactcttggctgatcttgttgaggctgctactgctcattgccagttaattgttgtttctaagtaagtaaataagcttcttcactaaaattttacaaactaatcaacagactcaaatcataacttacgtgaaaattcacaggtttatagccaaagtagagggagatattgaaggaaaaggagtgaagaaacagctcaagaatctatgctacatctacgcactctatctccttcacaaacaccttggtgatttcctcagtacaaactctgttactcctgaacaagcctcacttgcgaaccagcagcttcgatcactctactctcag

SEQ ID NO: 178963 - DNA, 300 bp, Arabidopsis thaliana landsberg
atgcctaaaaatcggaggatgatggaggaatttaatggtgcttcttctggaggagagccggagtatggtgctattttcatgtccaataactcaaccaggaaggaatgccttagccgaaagcttttcggtttgccaattgggctaggaggatttgttaaacatgttaaagctggaatgatgttgtttttgtttgaattcgagaagagagagctacatggtgtgtttcaggcttgctctgatggtgcaataaacattgagcctaatgctttccgctcttctgggaaacagtttcctgctcag

SEQ ID NO: 178964 - DNA, 219 bp, Arabidopsis thaliana landsberg
aacacgaatgctgaggatgcacctatagttcctgtctcagcacaactgaaatacaacattgatgttgtgagtgaatacattgtcaagaagattccaatccctgtgagagactttgtgtcaccaccaaagatgattgtgattcgttctttcgatgtcaataaacctggctcggcgggtcatgaaatgaaaggtggtgctgctggtggaagtatcctccaa

SEQ ID NO: 178965 - DNA, 963 bp, Arabidopsis thaliana landsberg
ttggtcttttgtctgagttgaacgatgcagttgaagagcttgagagtaagataaatcctgttatgaataaggtaaacctctttactgtttcacaatttttttcaatatgtttctatattgccactttatatcaccctagttcgaaagaagggatttgtgactcctccagaaatttatgcaattatgtctccttgcagttaaaggaaggagaaatttcgttgaatggtttaacaaggtacctggaggttaagcagcttctgctacttacctattgccaatctataacattttatcttctactcaagtctgaagggcagcccatccgtgatcatccggtccttgcccgtcttgtcgagatcaaatctttattagataaggttctgcggtgtacccttttaagtttttaatctctcaacaatctacatgttgtacttctacaactagtcaagctatgtttgtttatatattaaagctgctgagttaatgtatgttttttgtttaaaattagatcaaagaacttgatgaagagcttccccctggatttgaagagtccctagcaagaagtattgctaatggagcagtgcaaaaggtggttaaagaagatcagctcacttcacctgtttctgattcagtagatagaatcacacaagacacagccaaggtagaagttaggatcttactcgctgtcactcaagttaatctcttgtgagctatttgacactttctttgtacacaaccttgctgatctctgtttattcagccgatgaaaattgacaacgcaagagaagaaaagaagaaaaaaggagagaaacgcaagcaccaggtaaatacaaatctaagcattttcctggattttctattctattggaaattgttcaacctcttgcttactggcacattttcttcgtttagcttgaacaaattctctttctttctagcagaatgatctggttgatgtgcaaa

SEQ ID NO: 178966 - DNA, 454 bp, Arabidopsis thaliana landsberg
gagttattacagatgcagtagctcaaaagggtgtttggcaagaaaacaagtcgaaagaaatcctcaaaacccggagaaattcaccataacatacactaatgagcacaatcatgaactaccaacccggagaaactcattagccggttcgactcgagcaaaaacttcccaacccaaaccaaccttaaccaaaaaatccgaaaaagaagttgtttcttcccctacaagtaatcctatgatcccatccgctgatgaatcttctgttgcggttcaagaaatgagcgttgcggaaacgagtacgcaccaagcggctggagcaatcgagggccgccgcttgagtaacggtttaccatcggatttgatgtccgggagcggaacttttccaagttttaccggtgacttcgatgaactattgaatagccaagagttcttcagtgggtatttatggaattactag

SEQ ID NO: 178967 - DNA, 124 bp, Arabidopsis thaliana landsberg
ggatataccacgagaagaaaggcttaaagatggattccaagacaacttagttcgcttcagttttggtattgaagactttgaggacatcaaggctgacgttctccacgctcttgaaaccatctga

SEQ ID NO: 178968 - DNA, 258 bp, Arabidopsis thaliana landsberg
atggcacgtggtgagataagagtgtgagtgtgtaaaaaaaaaaaacaaaaaaaaagtggcatagacaagaagtagttggaatgtcttgggatcacggattagtgaatgttcttttgggggtttaaggtattgacggcgacacgtatttcatgttactctcctcaagtgtctctccctttcaccgtaggccgtagcattttccttttctttgtgaaactttttgcatttatgatggatatttgggaccgaaatccatag

SEQ ID NO: 178969 - DNA, 546 bp, Arabidopsis thaliana landsberg
ggtaaagctgggtcagaaccaagtgctatagagttgacagaagcattagaaactcatgatctctttctatactttggtcatggaagcggtatgattcctctaacacttgaattctgaaccgtttaatcgttaatctgtctctggttgtttacatgagattgatttaaaaaaaaatcctttactgtttatgatacgacaggagcacagtatatacctaggcgtgaaatagagaagctagataactgttctgcaactttcttaatgggatgcagtagtggttcactatggctaaaaggctgctacatcccacaaggtgtaccactttcttatctcctaggtggatctccagccattgtggcgactctatgggacgtaacagaccgagacattgatcggtttgggaaagcgttgttggaagcatggttgcaagagaggtcagattcttcttcagagggtggctgcagccaatgtgagtcattagctaatgaccttgcagcaatgactctaaaaggcaccaagaggtcaaggaaaccatcatcggcgtaa

SEQ ID NO: 178970 - DNA, 795 bp, Arabidopsis thaliana landsberg
ctcaaaatcgttgtgaaggttggcctgaaaggggagaaattccatgtttacactgaagatgggtccgcaaaagttcagtggaagcagtacagagactccaaaagtcagcctttaacttggtacaaggtagaacaacaaaatggtaaaatagtactagctcaaaatattactcaaaactttcaatctctgaggtattttatatctacaggcctcatttgacacaccagagggggaagatccggtggccttgaacttaggatcaatgggaaaaggagaagcttgggtgaatggccagagtataggtcggtactgggtctcatttcacacttacaaggggaacccttctcagatatggtatgatattgttcactctccttatttaaataatcttggtatattagttggatattattttttgaagctatgttctcctactttaggtaccatataccgagatcttttcttaaaccaaacagtaacttactagtcattttggaagaagaaagagaagggaatcctcttggtataactatagacacagtgtcggtcactgaagtctgtggtcatgtctccaatacaaatcctcatcctgtcatatctccaagaaagaaaggcctcaaccgaaaaaatctaacataccggtatgataggaagcctaaggttcagctccagtgtcctactggcaggaaaatttcaaagatattgtttgcaagctttggcactccaaatggaagttgcgggagctattctattggaagctgtcactcacccaactctttagctgttgtacagaag

SEQ ID NO: 178971 - DNA, 1270 bp, Arabidopsis thaliana landsberg
acactcgttgcaaaagccattgcgggggaagctggtgtaccgttctaccaaatggcaggatctgaattcgtcgaagttcttgttggagttgggtcagctcgtatcagagatctgtttaaaagagctaaggtgattggacatatgtgtatttatacatttctgtgcagagatgttaaatagtatttgatgatgtctatgtccttgtgcaggtaaacaagccatccgttattttcatcgatgaaattgatgccttagcaactcggtatacaatattttcgtcccttgtatctagattttgatatactaccttccttgcataatttttcaacttgagacggagtttaactgatatcgctctttatattttggtattcgttagacgtcaagggattttcaaggaaaactcagaccagttgtacaatgcggccacacaagaaagagaaaccacattgaaccagctactcatcgagcttgatggttttgacacaggcaaaggtgtgattttcttgggtgccaccaatcgcagagatttgttagaccctgctcttctacgtccaggtcgatttgatcgaaaggtttgtgattaacaaaatctagacactaaatcttctgttctcaaatttttgatagcagttattcgaattaataaacaaccaaacgacaatcgcaagccatttgaatttatcttgcattaattttgtagacttaagagtaccggatagaccgttaaaaataatcttcttatcagataagagtccgtccccctaatgcgaaagggagattggatattctgaagattcatgccagcaaagtcaagatgtcggattctgttgacttatcatcttatgcaagtaacttaccaggtataaaatctacaattgatgttgcaaagaatatttgttatgctcatggtgtaccttttcccatagacaacttatgtgtttgaacgtattggcctgtataaaactttgattaaagtaattgtttatatcaattacaggatggtccggagcaaaactggcacagttggttcaagaggctgctcttgtagctgtcaggaaaacgcataactcgattcttcaatcagacatggacgacgctgtggaccgactcactgttggtccgacacgtattggtttagaattgggacatcaaggtcagtgtcgtagagccacaactgaagtcggagtggcaatcacttcacatcttttattgcggtatgagaatgcaaagattgagcggtgcgatcgcgtttctatcattcctcgag

SEQ ID NO: 178972 - DNA, 264 bp, Arabidopsis thaliana landsberg
gggttcggtgaatacatctagcagatgcgtgtgcgcacccagaactaaaaatctcaaacaaaaacattcgtgcaactccaaggagttacgtgaaagcttgagactgttgtcgggtacccaagaactgggtgctcaatataggcccaagcctcttaacgacccatttgctgaccaagcctcttccgagcaaccccgcgaggtggagcgtacaaccaagtctctactgagcaaccctgcgaggcagagcgtacgaacaagccttgg

SEQ ID NO: 178973 - DNA, 318 bp, Arabidopsis thaliana landsberg
  unsure (1)..(318): unsure at all n locations
atggtcgacattgccgtgggcatcggcaactgctcgggcgccgacaccgacaagttcgcggccttttcgctgaccgcccgcaaggcgagcaaggtcgcggcgccgctcatcggcgaatgccacgccaatttcgagtgccggcttcatgacgacggnnnnnnnnnnnnnnnnnnnnnnnnnnnnnnngaagtggtcaaggcgcatgtcgctgcttcgccgaggcatccgcgcacgctccattataccggcgacggcgtcttcatggtcgccggcaagatcatcagccggcggtcgcaattctcgccgggcatgctctga

SEQ ID NO: 178974 - DNA, 78 bp, Arabidopsis thaliana landsberg
ccactgaaaccggaagaaaagctcaagtatagagcaattgatcttgagtttcctagatataattccggcgagacatag

SEQ ID NO: 178975 - DNA, 357 bp, Arabidopsis thaliana landsberg
atgcattattattgcaaggtaaattacaattatagggttgttttagaaaatggtcttgctcaggtcctggagttaactctcttctttcttcaggtccttgcttccgaggcatcagaactactggacgtctataaggatcttcaaagtcttgaatcagcttcaaaggtttgcatttgtgctttttccgtcgtcgtcgatctactcctttggctcatcatctgattgtcttgtctatttcagatacaagtgaagtctctggctcagaatatccaagctataatcaaaagattggaaaaactgaagcaggagctcactgcatccgaaactgatggtcctgcttctgaagttttctgtaat

SEQ ID NO: 178976 - DNA, 327 bp, Arabidopsis thaliana landsberg
atggcccacgaaataatgaagaatagcgaaaaagatattcatgacgctcgagaagcagcaaaaaaggctgagaaagttgcagaactcgagagacgaataggtatcatttaatggcttttagcttcgtcgtttgttttagtggcttcgaactgattgattttttctatcgcagctgaattacctcctccatcggagccgttcgaccccctggccgacccggagatgaagaaagcaatagaaattatcaacatagccgaatctattgttgacgaagtcgtcaacaaattgcttaacgaagttgcggagaaggttctgaaggaagagtag

SEQ ID NO: 178977 - DNA, 356 bp, Arabidopsis thaliana landsberg
  unsure (1)..(356): unsure at all n locations
atggcgtggcgacgaggaagacgaactggcacccagcgatcgccggcgcgaaggtggcggcgtcgaagaggtnnnnnnnnnnnnnnnnnnatgccgtccgccgcgccggggaccagccgacgcagcagccccgccttcgcctcgtcccctgcacacccaccagcacacgaatccggctaagattcccgaatcatcaggcagccacacacgagacccgacccactcctttcgcctttggcgtgtttcgcctttcgcgacgcgcggatcgagctgaggagccgccatcagacgcaccggtgttccgcagggtggcgtggacggtgtagcctttctcgaggagcttcctgacgagccag

SEQ ID NO: 178978 - DNA, 1192 bp, Arabidopsis thaliana landsberg
atgtttgtgcctttttctgccaatctgttggagtcttttggctcaagaggttcccagtcaacaaacgagtccactaacaaaagtagacatcatccacaactgctaagattagaatcccagtgggatgagaatcatcttagtggaaatgatgaagctggagtaaagaagattaagcgacttgaaaacgacgcccttgggcgctttagcagacttgtattgcgagagagggatttgggggatgaggcatggttagatagtataatatgggactcagagaaagagttgagcagatctaaactaatttttgatcttcaagatgagcaaatggtctttgaaattttcgataacgaggaaagcaaaaatcttcaacttcatgctggagctatgattgtatcccggtcttcaaaatccaaggatgaaacctttcaagaaggctgtgaatcaaattctgggtggcaatttaatctttccaatgacaagttttatatgaatgggaaaagctctcagcaactgcaggcaaatactaataaatccagtgttcatagtttgagagtttttcattcagtaccagcgattaaactgcagacgatgaagagtaaattgagcaagtaagtggtcactcgcatatcgtttttatttccactcttttgtgtcctctaaaatgtttccacacttcaaatgcaattatgtgcttttctacatccattttagtagtttctattaaaatgtgttgagttaactcgttgcagtaaagacatagcaaattttcaccggcccaaagctttatggtatccacatgacaatgagctagccattaaacagcaaggaaagttaccgacccgaggatccatgaaaattatagttaagagcctggggggtaaaggaagcaagctacacgttggcatagaggaatctgtctcttctttaagagccaaggcttctagaaagctaggttgttgttctattttcagttttttctactgcattatgacatagattctatttggagaacacacttttttaatggtttcacagaaatatcttgaagctcacttgctacaattgttttgcagattttaaggaaacagaagcagtgaagatgttctataagggaaaggaacttgacgatgaaaagtctcttgctgcacaaaatgttcaaccaaattccttggttcatcttatacgtactaaa

SEQ ID NO: 178979 - DNA, 56 bp, Arabidopsis thaliana landsberg
cttccgttactgctacagtcattgttcgtcaaggctttggtccgtaccctatgcag

SEQ ID NO: 178980 - DNA, 141 bp, Arabidopsis thaliana landsberg
atcaaagccgtatggtgtcacttattgagaaactttgagcttgagttagtgtcacctttccctgaaatcaactggaatgctttggtcgttggtgctaaaggaaatgtcatggttcgttacaagcgtcgtcccctttcttaa

SEQ ID NO: 178981 - DNA, 37 bp, Arabidopsis thaliana landsberg
ctttattgaaccgcaaatcaatcgaacagagatgtga

SEQ ID NO: 178982 - DNA, 91 bp, Arabidopsis thaliana landsberg
atgaccaatgtggaaggaacgggtggacatgcaaggatatctggcatctaccaggacagactgcgccttgaccgtcggtgcatgaatctct

SEQ ID NO: 178983 - DNA, 1220 bp, Arabidopsis thaliana landsberg
acacttcgtcgacttgctcagaaccgggaggctgctaggaaaagtcggttgaggaaaaaggtatagtagctgattcaactgtgtttttcatcgtccattatctttgtatttacattgttttttaataggcctatgttcagcaacttgagaatagtcgaatcaggcttgcacagctagaggaagagctcaaaagagctcgccaacaggtctacttaacactgttgtcttctttaatttgcatgttctactaaattgtattacagggcttcttttgtatgcagggatcaaaagaaaaagaggagataaagcggatcacacgcatttggcagcaggaaatggtaagactttttgaatctcacataacacttcttgactctttgtgatcttttactaagaatgaagttggttttgatgttgtaggtgtcttttcatttgaattggaatatacacgttggaaggaggaacatcaaagaatgatcaacgacttaagatcgggtgtgaattcgcagttaggtgacaacgatctacgcgttctagtggatgctgtgatgagtcactatgatgaaatattcaggctaaagggaattggcactaaagttgacgtctttcatatgctctcaggcatgtggaagacacctgccgagagatttttcatgtggttaggtggatttagatcatcagagttacttaaggtaaaagaaagggttcaaaacattttcacaatcattggttttgattttttttctcataattggtaactatgttgttagatattggggaaccatgtggatccattgacggaccagcagttgataggcatttgcaaccttcagcaatcgtctcaacaagcagaggatgcattgtcacaaggcatggaagctctacaacaatcacttctcgagacgctttcttctgcttctatgggtccaaactcttcagcaaatgttgcagattatatgggtcatatggctatggctatgggcaaacttggcactcttgaaaacttccttcgccaggtaagaaaaaatgaacagaatgtctcttgtcaacaacaacatttgttattacaaatcaaagagcttaaaggttactatatctttgcaggctgatttattgaggcaacaaactctgcaacagcttcacagaattctcaccacacgacaagctgctcgcgcctttttggtcatccacgattatatttctcggcttagagcacttag

SEQ ID NO: 178984 - DNA, 288 bp, Arabidopsis thaliana landsberg
gtgccaaaacgacgcgggattcgacagcacaagcggctttccatgcatcttgaaatgctgccgtatcgtcgcatgacccatcacccactgctccaaacgacgtaacgtcaaagacgcatcctgagtcagaatctcccggagccgggtctggactcgggtacgggtcggaagggacttgatcaggtggattggccgtttcaagaggaggaggaggaggaggaggaagaggatgcgttacgccgtgacggcccttgtggtaatgatatcttgctcgtgccacgttggtga

SEQ ID NO: 178985 - DNA, 71 bp, Arabidopsis thaliana landsberg
gtgatcaatgcaatctaattgaaactgatcgggtatacatctgtgccccttggactcatgttttaagataa

SEQ ID NO: 178986 - DNA, 139 bp, Arabidopsis thaliana landsberg
cacgcttcataaagccgatgcggagaacttcctgaagttcagacaacgatcaaagattgacagtgagaaacataaacgggaactcatatatcgaaaaacaaaggaagtgattgcccaagaagctcatttttcaagttag

SEQ ID NO: 178987 - DNA, 199 bp, Arabidopsis thaliana landsberg
atgctaaccgttgaaaattgggttttcgtcgagaactatgccagtggaggttttcgccccacgtcccatctctacaagatgttctttatcaatggaacttcagtaattccaagtccctcaaagtcagattccaactatctgattttagccagttttcaaaagatccaaagtggggagcttaatcccaccatgtcggttg

SEQ ID NO: 178988 - DNA, 434 bp, Arabidopsis thaliana landsberg
atgaaagccttgtttcgattcaagtcttgcttgtttgatccaacacgaaggaggaaccaactcgtttctttctcaggtttctcaaagtcatctaaatctaataaaacccgtgagactactaccacatcgaagatccaagcagaagctactgcaatcacttcactattcaacgagattactgagattttaggaacggatgttgtcaaactagatgagaccacgcggctcagatcccatgtgtcaggagctgtctctgataatggagtatcggtttcttgcacggaaggtgttcgtcaaaatgctgcaatgggattttcaggtgaggatgaaaaggctcagaaagttcttcatgaagaagttgacttcagccccgtggttcatgagattacgagtgtcgtcaggggagatgatgaattagtttcgatggaggacag

SEQ ID NO: 178989 - DNA, 414 bp, Arabidopsis thaliana landsberg
ggcatcgtcttcctcaccaccagccgcgtcaagcgtttcaacgaggccttccacagccgcaattcggtggcgctcaagtaccccgcgctgaaggcgaccagtcgcgaacaggtgtggcagacgctgctggacgcggccgccatccgcaccctggcgcccgcagacgtgcaccgcctcgccgcctaccgcctcaacggccgccagatccgcaccaccatccgcctggcccaggccaccgccaagggcgagcagagtcccatctgcatggaccactttcagcgcaccatcgccgtctccacgcagttccagcacgacctgctcgacggcgcgctgccccgctggaagctcgccggtgccgccgccgccgcctcgctgctcgctgccgccctcctgcgcggtgcccgcatcatctga

SEQ ID NO: 178990 - DNA, 2578 bp, Arabidopsis thaliana landsberg
gtcgtgctaaaggaaaacttagtcgtgacgttattccgggatgaggtgagtttatatcaaatggtctgcgaaaaagagtttggtattggaattagttttgcatcagctgactctattaatctaactatgcagtacattctgttgcacgaagactaccagttgtatgttttaccccgagtgttagaatcaaagaagatggctaagtctggacggactaaacaaaaggaagctgatctagaatatagtgtagcaaaacaagttgagaaaatgatcaggtaactccaatttttaatagttcagtactttgtaatcctcatctgatactggagaatttttgtgactttagctctgaatttatagatttacttttgtttggtcgctaaattcagtaaggtgcatgagcaagcattgcaattatgtgataccatacaccgagaaaggagaatattgctgaagcaggaaatagggcggatggtttattttttcactgatcaaccaagtttgctggctccaatcattcaggtatcggtttagtctgtttcatattagggtttgaagctattggtttgtttgagaagaaaaaacaaattgcttctatagaatttaatctaccaaaagtgtcaaatgaaaagttttacaagatttctgtgtcaactacgtatcattgatgctctgcatagatctatccattatactcataagagttcttcccttccctaaactttcccaataattgatttatttacttttcttcccttagatggtattctctgcgttggctttggcccaatctgaggttctctggtattttcaacatgctggtattgcatcctcaagatccaaagctgctcgagtgataccagtagacatagtaagttgattgcttgaactttgaaagcctctcaacactgtaacttttgactttcagtgaactcaaaatttggttattatttactgatttatcattccttatttcctaggatccaaatgatcctaccattggcttcctgctcgatggaatggaccgtctctgctgtttagtgcgcaagtacatctcaggtttgttacttttagatatcacatccttgaacattggtttttaagtatatgagcttgaaactctggtgttggacccgttgcagctcattgatcagtaccgatgttcaaaatttggtaaccttaatggtgtttgttatttgaaatgcagctgctcgaggttatgcactatcatacctttcttcatctgctggaaggattcgttacttgatgggtactcctggaattgtggctctggaccttgatcctaccttgaaaggcctttttcagcgtattgtgcaacatctcgaaagtatacccaaggcgcagggagaaaatgtttctgcaatcacatgtgacctatctgtaagatggactatatccacttattttcaagtcagatgatgcaattacatttttctttcacagataatcaatatacactatatagttaattcactcatgtttccatatgtttcccatttggcctgtcttcaaatcctagttgtagtctggtcccaacacaattaatatgtttaatcttccaatctattttctaatgctcagtgcctcttgttgtacaggatttccggaaagattggttgtccattttgatgattgccacttcttctcgatcatcgataaacatcaggcatttggaaaaagccactgtctctactgggaaggagggcttgctatcggaaggaaatgctgcatataactggtccaggtactgttcccggccttatataccaatacttggttaacttctagctagagaatcaaagtgactaatatcctgcagaatttcattaatgcagatgtgttgatgagttagagtctcaattgtcaaagcatggaagtctgaagaaattatatttctaccatcaacacctcacaactgtatacttcctgttgttgttcactgtctactattttcccatgtcatcttatgcataatctaacatttgagttttgtaaaaggttttcagaaatacaatgtttggaccagaaggacgtcctcagcattgttgtgcatggctcagtgtggctagtagtttcccggaatgtgcttcactaataattcctgaggaggtaaatctataatccaaatctcagtgctttttgcactctttctgtattaacatctgtggatcatgagattcttgtagtgttaagaccacccaacgagcaccatagtactctcaatatgacaataaacaataaaagtggttgtaaaattgaatctgactcctttttatcagttttgcatatgtgctatagcagacaaagttattgattccataagctacttttggattacaaatctttagtatgcatcttttttatttaaacaaagcaacataatgtttctttttttggtgaaccacgaattctcattgtctatcccgtcatgtctcacctctctatatcagtgacaccttctattaaacggaaatgtcatgttcttgtcttcctccacaggttaccaaatttgggcgagatgctgtgctttacgtcgagtctcttattgaatcaataa

SEQ ID NO: 178991 - DNA, 110 bp, Arabidopsis thaliana landsberg
cctgggaagccacctgctcccggggccgacaaagcctccgctcatgtcgatgccgcctctgttcgcgtcgctgctgcctccgacttcaacccgtcgcagagcaaccgaag

SEQ ID NO: 178992 - DNA, 105 bp, Arabidopsis thaliana landsberg
tgacttttttacatgcgactatcaattttacttacaaaagttactggtttacaacggcgaccatggtttgaattcagataaagataaagaaggaaatgcagagag

SEQ ID NO: 178993 - DNA, 121 bp, Arabidopsis thaliana landsberg
tgtataccgcggaacgtgatgtagtggcggattcatcttgtctaaatccaatcgtgcactatattgacagtagcagtatctcgctggctcgtgaggctattattgcggctgtgactgctcg

SEQ ID NO: 178994 - DNA, 2784 bp, Arabidopsis thaliana landsberg
  unsure (1)..(2784): unsure at all n locations
atgaatgttcaggctcacatgtcgggacaggtttcaaaccaagggacgatgtggcagcattatgggaactcccaaatgcagaatttagttggtggtggttcagctcctgctactggtgctggtttaggaccttcacgcgtttctcccgttgacaatgacatcttgaaacttcggcaggctatgcgaatcaggatgtaagcctttgcttttctcaagcttttgacttttggtgtcttcccaccattttgcagttatatttccttgctcttgttatacggctatttattttggattggattcaatatctccagtttatcgccaatcaaatccgtgtatttctcttctttcttttcagtttcaatatcttacagcaaaagcaaccatctccagctgatgaagcatcaaaggctaaatatatggatgttgctagacgcttagaggaggggctgtttaaaattgctaacacaaaggtatttatttaatatacttaaggaaaggataggcacgtatttggcatttaaaattttgccactagatccagcttgttggctaatgtcctaacttgaaatttcttgttaacgtgctacacttccattttgaatcgcaggaagattacgtgaacccgtcaacccttgaacctcggctggcaagtctaatcaaaggcaggcagttaaataactacaatcagcgacacgctaattcttcttcggttggaacaatgatacccactccaggattacaacacagtggtgggaatccaaatttgatgattacttcctcaggtgatgctacaatggctggaagtaataacatcacaactagtgctatgaacactggaaacctgctaaattctggtggcatgcttggaggttctttcactacaacttatataaaatatgggcataaaattttctgcgcatattttttctgaacacctttacttctctttgcaggtaacctgtctaatggataccaacattcatcgagtaactttggtcttgggtctggagggaacatgtcatccatgagctcccagagaaataccggccagatgatgcctacccctggatttgtcaacagtagtactaataacaacagcaataatggccagtcttacttgagtgttgaagcttccaacaatagtggtggattttctactgctcccatgatggtacctcagactcagcaacagcaactgaggcaggatattggtggccaaaatagtcgtatgctgcaaaaccatggaagtcaaatgggtgttggccttagacctggaatgcaacaaaaattgtctaatgtgtctaacagctccataaatggtggtgttggaatgaatgcaaaaagcgtagattcaggtacatcctacaccaatcctatcagaaattcacagcaggcttatgataatcttcagcgttcaggaatgcagggtaaagtctttatttcccatccctaaattgtagtttctaacctcttgttgttgtgcgtattcatcagaatattttaattgttatgttattttaccgtttcaggtgatggatatggcacaaacaactctgacccattcggatcgggaaatttgtatggtgctgtaacatctgttgggatgatgacaaatactcagaatgccaatacagcaagtttccaggctgtgtctagaactagctcttctttggtaagcaatccatggaattcactttacatgcagcaaagtgcaccagtgaaacatcaatctgagaataccgatttgtaatcatctttcgtaccttttttgcagtcacatcaacagcagcagtttcagcaacagcctaatcggtttcagcaacaacctaatcaatttcaccaacagcagcagcagtttcttcatcaacagcaattgaagcagcaaggccagcagcaacagagatttataagtcacgatgcttttgggcaaaataatgtggcttctgatatggttactcacgttaaacatgaacctggaatggagaaccctagcgagtctatccactcccaaactcctgagcaatttcagctttctcagtttcagaatcaataccagaacaatgcagaagaccgtcatgcaggttctcagattctccctgtcacaagtcagagtgatatgtgcacatcagttcctcaaaatagccaacagatacagcagatgttgcacccgcatagtatggcttcagactctgtcaacggttttagcaacctctctgttggagtgaaaacagaatctgggatgcgtggtcactggcaatctcagtcacaggaacatactcaaatgtctaatagtatgtcgaacgaacggcacattcaggaggatttccgacaaagaatgtctgggacggatgaagctcagcccaataatatgtctggaggctcaattataggtcaaaatcgtgtctcgactagatcanaatcccttaatccccaaaatcctactgctaccacttgtagaaatggaaatggcaaccgggatccgagattcaaaaatcaacagaaatggctcctctttctacgccatgctcgccactgcaaagcgcctgaagggaagtgtcctgatcgaaattgtgttacggttcaaaagctctggaaacacatggacagttgtgctgcacctcaatgttcatatcctcgttgcctccccacaaagacattgattaatcatcatcgaagttgtaaggaacctaactgccctgtctgtattcctgtgaaggcctacctacagcaacaggcaaatgcacggtcccttgctcgattaaaaaatgaaaccgatgcagccag

SEQ ID NO: 178995 - DNA, 139 bp, Arabidopsis thaliana landsberg
ttgcatgtgactgcttatctgatggagagcgatatgatgagtcgcgatcagccctggacagacgagcggcctccacttcctacagatttatcaacaagactcgctaaattgaaagacttggaggctgtgaaagacgagg

SEQ ID NO: 178996 - DNA, 558 bp, Arabidopsis thaliana landsberg
  unsure (1)..(558): unsure at all n locations
aaaaaggagatcgggtaagagttacgactgttcccaaccttgcctgtggtgttggaccgctgatttgctttgctgcgtatatcgggctgcttcagccccactctgatgatatgtcccgagttgtggaccaactattaaagttgttcgccacctttataggtttgtatcgtttaagcagatctgtaatcatctgatgtataaatgtgtttactagcctcctgggactagaaattgtatcacatttgagtcccagaggattggggcgcttcaggtggtatcagagctgttaggttggccacaggacgtaacccttagcctgatcaaaagtttttgagtcaaaactattttcttaaaaaaatctttctctcatcccttcatttcaaaaatgctttccccctttccttctctcagaagtcagatggaggtccgctaccaannnnnnnnnnnnnnnnntgaagatggtttccccaagttgctgaaagcatgcacagtccgcctcgaaatcaggagccagccagagtatgatggtcgtgaattcatcgagcatggcacagagaa

SEQ ID NO: 178997 - DNA, 1099 bp, Arabidopsis thaliana landsberg
atggagtactgtggtgaagtaatatcatggaaagaagcaaagaagagggctcaaacttatgaaactcatggtgagtagaaactttacagagatgatgagagtgttgtaatgctataggtgatgttaggtgatgtgttaattatgtgttacatgagcaggtgtcaaggatgcatacattatatctctcaatgcatctgaggctattgatgccactaagaagggaagccttgctaggtttataaatcattcatggtaaaacgaacaactggctttttacatgcttcaaagaaattcatatctataaaacgttccttatcgtttctttctctattttcctgcagtagaccaaattgtgagacgaggaagtggaatgtactgggagaagttagggttgggatctttgcaaaagagagcatctctccccggaccgaattggcttacgactataattttgaatggtacggtggtgccaaagtgcgttgtctctgtggtgcggttgcatgctctggatttcttggagccaagtctcgtggctttcaggcaagtccttacgttatcatcctcatagtattatttgtcaaaaattgggaggaatgaaattaatcatactggtctatacctaaccttatacctttctatcatttcaggaggatacatatgtatgggaggatggtgacgatcggtaattttcttttcacttattttatgcggcataaaaatggtcatggatcttgcgagaaaggaatgtttttcatcttggactggcgatattttagcccctctcttttctttgtctccaggtattcagttgataaaattccagtctatgattctgcagaggacgagcttacatctgagccttctaagaatggcgagtccaacacaaatgaagagaaagagaaagatatctcaacagagaaccatttggagtctactgctctgaatattcaacagcaatcagattcaactccaactcctatggaggaagatgtcgtcacggagactgttaaaaccgaaacatctgaagacatgaagctgctctcacaaaattcacaagaagattcatcgccaaagactgcaattgtatcacgggttcacg

SEQ ID NO: 178998 - DNA, 89 bp, Arabidopsis thaliana landsberg
cggtatcagctactcaagcggaatacgtatcacaatagggatacgcagaagaacatggacaaagccacaaaggcggaccgtaaaggccg

SEQ ID NO: 178999 - DNA, 88 bp, Arabidopsis thaliana landsberg
attttggtttttgattctggtccggttatcggactcggtttaccaactggatatattcggattcaagtagtgggttggtcaagttttg

SEQ ID NO: 179000 - DNA, 93 bp, Arabidopsis thaliana landsberg
atgggcaacctgatctactccaccatcgcctcggcggacggctatgtcgaagaggcagatggcgccttcgagtggacggacccgactgatgag

SEQ ID NO: 179001 - DNA, 93 bp, Arabidopsis thaliana landsberg
aatgtatcagactttgaccagctgactatcaacaaccgtagaagtagatttacggctgtaactgagttcaagccgaagaagactcaaccgtag

SEQ ID NO: 179002 - DNA, 360 bp, Arabidopsis thaliana landsberg
agagatgaatgggctggcacttttgagaacatcttacaaatccgaaaggagcctcgaactgattgccccgagacactacctgaaccggttaagataagaatgggagaggcaaatgagaaagctcttttgactgagtttcagcaagagcttgtacaactagctgcggttctaaaaggtgataatatgctcacaacatttcctaaagaaataagcaaaggaatgacagtgattgaagggaagaggtacatggaagatgctatgaaacgattcttagaggctggtcgtatggctctttccatgggagcgaataaagaagagcttgtccatatgaaaacttccctcaccggaagaagaccttaa

SEQ ID NO: 179003 - DNA, 510 bp, Arabidopsis thaliana landsberg
atggcggtccttcgggcagtttgctcgtggcagggaaacaacttaagtccggagctgtcacagtttctcctatggcagcgtacgacctcatgttcgtgcccgggctttcatacgttgatggctccgcatcttcttccaccgccgttctcaacgtcgctatgccatccatcgtactgcaagttgtcgattcttgcggtgatgccgacaagacacttgtcacgggcgtcgtcatcactgcaacggccaccactgggcaagcaggaggtacagtgactgcagtggttaccgatggtattgcagtcttcgataacttgatgattaccagcgcgtccaataatgcagcgacactgcaatttactgcaggatctcaaggaaacctcgctctcgcagggaagtgggttcaggctgacttcactgtggaacctacacttcgcgccaacacatacatgcgcttccaacaaacaaactccgcctacactgaaaagaaccaggaggtcgtgattcggcaag

SEQ ID NO: 179004 - DNA, 1342 bp, Arabidopsis thaliana landsberg
gttatgttcttctccaaggctgatgtttttcagaaacttgctcagcctcttgaagatattgcaagaaaatttaaatcgaaggtaaatctcttatgctgaatcttaaagcccagcaaaaatattgtgtttagactttagactctatcttaactgtatatccttttcttgcagcttatgtttatatatgtcgatataacaaatgagaaccttgcaatgccattcttgaccttattcggaatagaagctgggaataaaactgttgtaagtttctgatacttgtttcattatgtgtaattgacactttgtgatcaactgatggtaaagctacaagcctatgtgggactaatctgtagtttttatcaacaggttgctgcgtttgataacaacctgaactccaagtatttgctcgagtcagatccatcaccaaacagtatagaagtatgaatttgctttaaccttttttcttctttccttttcaaatattcgtatggtatctgattcatgtgattctcttttcgattagaaatttaggagttttgttcaggacttgctcaaaaaactgtttcacgttactataggtcagagccagttcctgataatgtaagtatgagatattgaatcctcttttgatgttctttttgtgatattgtctagtctgaagagacttggaacatttacgagctaagctcaaatgactcggtgcatctgcaggaaaacgcaagcataaagactgtggtaggaaagacttttgatgagttggtattaaacagccgcaagaatgttcttgttgaggtttgttatcccaaataacctttctgctaaaccaaactgttttttactaactgaaaccgacattaaaaccgaaaacagatacatacaccgtggtgcgtgaactgcgaggcattaagcaaacaagtcgagaaattggctaagcatttcaaaggctttgggaatcttgtttttggaagaattgatgcatctgcaaatgagcatattaaactacaggtgagtcaaatcttactgcaacaagactagcacttcccgaaccacgataatcttattgattgttaatgacaggctgatgatgaatatccgatgatcttgctctacaaatctggcgaaaaggagaaaccggtaataaccattttgaaagagctcactagctcaatcccttttagacatcattacttctgtttttgcttataagctttgtccgtagtgtatcttacccgtttttcatttgcagctaaagctatcaacgaaattgagcgcgaaggacatggctgtttttatcaacgaagagttgaaaccaaaggatgggtctgctaaagatgaattgtag

SEQ ID NO: 179005 - DNA, 676 bp, Arabidopsis thaliana landsberg
catttttgtgaaactgcttgctttttgtggaatcggaagttctcatgtagagacgcgcgagatcgtagaagtaggcgagggagatgaagttgtcagatcaaggtatctgccgttggagaggtttattgaacttctcaaacaacaaactgggcaagacaatatcgagattgggaaaatcagacccaccctttttgatgtctttggtgaagattcgagcccgaagataaagaagttcatgaaagtgattcttaccaagctaaggaaaacaaatgaccaaagtacgctacttggtaagatcgaagaaagtgctcgagggtatatagaagagacgctgaacgatgaacactacatgaaacccgcaatgcaggcacatgtgaagagcgatcgtgagatttatggaggaagatcaagcaacggattgtttcctgaccgagggattctgttgagtggatgtcaaacagatgagacatcagcagatgttaagaagaaaggagaagcgtttggagcgtttagtaatgccatccaaatggttttgtcagagactgatcataaagataagattacaaacaaggaaatggtattgagggcaagagagattctgaagaaacagatgtttattcagagaccaggattgtattgcaatgaccgctttgtgaatgctccgtttatatgctaa

SEQ ID NO: 179006 - DNA, 137 bp, Arabidopsis thaliana landsberg
aaaatggggaattgagaaaactggcatatagagacgtcaagaaggttccaagacgggatcggaaatacgcggtccagccggagaatgtattcgcgataggcgtacacatgtctcagaatctacaagggaagacatag

SEQ ID NO: 179007 - DNA, 96 bp, Arabidopsis thaliana landsberg
aaccactctatcgctctgagacgatccacctgaactgcacgacggagcgagccgcaagagctcctgcatcgtcgtcgcaaacccaagaagacctag

SEQ ID NO: 179008 - DNA, 113 bp, Arabidopsis thaliana landsberg
ctgtaggtttctctctcttcataactctctccatctgtttctgcaaattcaaccgcaaacgccgatctcccgccgccgtagcctcctcctttacaccggcgcagaaacaaccg

SEQ ID NO: 179009 - DNA, 511 bp, Arabidopsis thaliana landsberg
atggtatttggaagctccttgtatatctgcatcaactggttccacatacactttgatgaagctttctcttcactccgcattgccaattacaaatctttcacccgtttccacatcctagaagatggagatattgaagttttcacgctcgcagttgataaggtaagaaaaaactctacttgcgaccgttgctacctgataatgctgcttgctgctactaatgatccaatctttatgtcattagttcttatttattgatttattagtagttgagtgcatggttaaagaactttaaccaaagatgtgttatattatatgattttaggtgccaaaagactggaaactggacaaagattgggattcagagccgaaacagagtttcaagatgagctatgagagagagtttccaagtaaatggggtgcctcaacagcacaacaagaccctgttaataccgtaaagatagtggatcgtttcgtcattcatagatcacaaaaggaaaacggagaatgttag

SEQ ID NO: 179010 - DNA, 264 bp, Arabidopsis thaliana landsberg
gttaaaaagtctatggaaacttaccaagagcaagtgatgaaaactcttcaagagttagataacatccacagtcaaattgtgagtcagaaccaaggcaagaaagaaggatctttgacatgcacaccagcacaacaaacacagattaagacgacaattactaagtgggaacaagtcacaacccaattcgtagagaccgctattcagagcgagacaaagtcatcatcaactacttcatcttctgttggcaaaatgaacacaaattga

SEQ ID NO: 179011 - DNA, 2548 bp, Arabidopsis thaliana landsberg
atggacaacttccaaggagatctaacagacgtcgtacgaggaataggatcaggccacgtgtcaccatctcctggaccaccggaaggtccatctccgagcagcatgtctccgccgccaacatcagatctccacgtggaattcccctccgccgcaacttctgccagctgtctcgcaaatcccttcggagacccgttcgtaagcatgaaggatcctctcatccacctcccggccagctacatctccggcgccggtgataataaaagcaacaaaagttttgcaatctttccaaagatttttgaggatgatcatattaagagtcaatgcagtgtcttcccaagaattaagatctcgcaaagtaacaatatccacgatgcctccacgtgtaattctccggccataaccgtctcctctgccgtcgcagcagcttcgccgtggggcatgatcaacgttaataccactaacagtccaagaaactgtttacttgtcgataataataacaacacgtcatcatgctcacaggttcagatctcttcttcccctcggaatctcggaattaagagaaggtaaaaaaattcgatctacgtgatttaattatcatttttcccttcttgattaaacgagatcatttattagaggttcatgataaaataaaataacaccatgtgattaaattattttcccttcggagattttcatttattgacgaattacataatttttttagtctttcagatttacatatttgaaaacttgattaggttcctcgccgttctatatttttgaaaattaataaatgaaacaaacaaaaaaaacgagtggaaatagctagggtttcgttttgtgtaatgtattatatatgtatatgaaattttctgaattcttacattacattcgtcctttttctgctgttcaattttaattctgtcgtttgcttttgttaaacttattattttactcttttttttttgcttttatatgattttttttgtagacatatttatcttttcaaaactgaaaaaggtatgcgcagtacgtagttatgtatgaagtgtaaacatcataaacaaacaatgaacatctacattatgcaccatatctaaaactgaactcatcatgtcccacactaaaattgacctcaaaatcagctttacattacaacagttagacgtatacttacatatatatgtctcaaactctcaatatactgatggttcatgcaggaagagccaggcaaagaaagtggtgtgcataccggctccagccgctatgaacagccggtccagtggagaagttgttccgtctgatctatgggcttggcgaaagtacggtcaaaaacctatcaaaggttctccttatccaaggtatatatttactcacatgtgtttatataaccctatgtctgtgactccgtttctacatattaattagaaacatgaaatttatatagatataaaatataagtatgttctttcaataggaatgttttctaacaaattggatataactattttatattacaaacgtatatataatatatatatgtgatgctaaaaaagtgaattttagtaagcggaaaagtttttttttttttttatcaaccattgaaaaaactcacaattaagtaggatctacaactatgcttttcccttgacaaacaatattgcaggtgcaatcattagcatggaactacaaaagtataaagttccttcaattttctacggcgcacattaagccttttatatgccttattgtgacatttgatgcaaacttatcttataaatcataatatatatatatatatcccatcggaaaagctaagatatcattaagattcgtttattccttgatccaattgagcgtaagtgatcaaatgggcagttacttcttatttgttacacatggttacctaaaatatggttaatgtaagtctttgataacttggattaggattaattatatgtttcgcaggggttactacagatgtagcagctcaaaaggttgttcagctaggaaacaagtcgaacgtagccgcactgatccaaacatgttagtcattacttacacctctgagcataaccacccatggtctactcaacgcaacgctctcgcaggttccactcgttcctcttcctcctcctctttaaacccttcttccaaatcctcaaccgcagccgccactacttctccctcatccagagtttttcaaaacaacagcagcaaagacgaacccaataactccaacttgccttcctctttcactcattcttcttttgacgccgccgtaattaaggtggagatcgtggattatcgtcaggaaaagatggagttcgattataatgacgttgaaaatacctatagaccggagttgttgcaagagtttcaacatcagccggaggatttttttgccgatctcgacgagcttgagggagattctttgactatgttgctctctcacagtagcggcggaggcaacatggaaaacaaaacgacgattccagacgtttttagtgatttctttgacgacgacgagtcctcaaggtcgttataa

SEQ ID NO: 179012 - DNA, 35 bp, Arabidopsis thaliana landsberg
atgttgatgtcactcatcgaaccactcttatcaaa

SEQ ID NO: 179013 - DNA, 164 bp, Arabidopsis thaliana landsberg
atgacggaagacgatttggagcgacaaatccattgtaagtaatcttccaattctcttgatttctagtgtttctaaatttaaatatcatcaactctttctctgtttcccatgtttctgtcgatcgaaacatttatggccgaagaagatttgtagcgataaccact

SEQ ID NO: 179014 - DNA, 372 bp, Arabidopsis thaliana landsberg
  unsure (1)..(372): unsure at all n locations
gtgggcagcttcggcagcaccttcaaccgtgagacattgcgcgtccgattgcgtacagacgcgccccttaagttttcccgggcttccacnnnnnnnnnnnnnnnnnnnnnnnnnnnntccggcctgtacgatgagcggcctgaaagaggagcgctcgcgaaaacttccttggaaatgtgggtggagcctgatgggcaaaatcagtcggttgattgaaacctgacgcagcaaacgaccgacgagcgagcggggaccgtcggcaatctgcagaactgcgcgctgcgaagacaacagccgtccgagtaaccctagccttgggtagaccgcttcagcgcaagggcacccgcattagcggctgtctccgcaagacgg

SEQ ID NO: 179015 - DNA, 95 bp, Arabidopsis thaliana landsberg
ggaaaatgtatatcgatgattcgattcagttggcaatgtatgagcacggccacgatatgtcgatatggagcatgaatctacctgtttccacctga

SEQ ID NO: 179016 - DNA, 373 bp, Arabidopsis thaliana landsberg
gcgaactgcgacttcagaagcagatcctgaaatttctcgctgtacaaggtctctttctggcttctctgggcactgaagttacatcatttgagttgcaggagaaatttaagtggccaaagacagctactcctgctgctctttgccaaatgtgcatcgaacagcttcagctgttgctgtcaaattctcagaagattgagaaaccactatctaaaggaaatgccctggaacagcccgatgatcctgtttcatactttatgaaattccttagcacgttgcagaatattccctcagtttccctcttccgttccttgaatgaagcagatgaaaaggctttcacagaattacaagaaacagaaagtaaacttttaaggag

SEQ ID NO: 179017 - DNA, 292 bp, Arabidopsis thaliana landsberg
atggtcacggacggtggtaataactagataacctacttggtagtactagtgttatgacttatgaccccaagttagtacatgtaagctttccctagtaatcaaattttatcccacaaccgtatgaagctggatgatgaagacagtatacacttggaagtaatgttttcttatagaagatattaaacacgatcgattaaaaggcgagtaccgagtaagaaatgaaatatgtcaaactaagcaagtaaacgagaatctacggatatttaagacacgagatacacaaataaattag

SEQ ID NO: 179018 - DNA, 203 bp, Arabidopsis thaliana landsberg
catccgtagtgagtaacgaccagagatacgagttccttgcaggtacttaataacctctgaagtattcgttttatgagttccatgtggtttacgaacagcattttaatacctgtaatatcttgaatgcagatagtgttcccgagaaacttaaagcagaggccgcgttggaggaatgggaaagaggcatgacagatgcaggctga

SEQ ID NO: 179019 - DNA, 364 bp, Arabidopsis thaliana landsberg
cgacagatcggcttatgggtccagcggaacaatccaaagagaccatgatatgaactcgtatctgaaagcggttaggagtgtaataagaaaggaagtgaatcagataaggagagcaaaaagggagcatcgccggagtctttggtggccaattctggtggctagagaaagtggaagctcagggattgcggtcagtaacggccaaatcaacggtcaggatttctctgggatgatgcagacaggaagaaagtcgttgcagaggtttagccgccttgtggcgtctcaacatatgccgttgatcgttgttatgttgtttccggttaagttgttgttccttggagctttcaacgtctttagtttccgttga

SEQ ID NO: 179020 - DNA, 309 bp, Arabidopsis thaliana landsberg
gacgatgcacacatattttgtttagaggatcagatcaaagatgagatcagaggtgttctagatctcacagaagagatattgtcgaggtttggattcaacaagtatgaggttaacttatcaactagacctgaaaaatcagttggaggtgatgatatatgggagaaggcgacctgtgcccttagagatgctttagatgataagggatggagctatgaggttgacgaaggaggtggcgccttttacggcccaaagatcgaccttaagattgaagatgcattgggtagaaaatggcagtgctcaactattcag

SEQ ID NO: 179021 - DNA, 99 bp, Arabidopsis thaliana landsberg
atgaatatcgctcgtcgctcaaagcgcattcgaggacagtccctcctgtgtgcagcacgagcgcaatttcccgaggatgccggcccgctggcgcacccg

SEQ ID NO: 179022 - DNA, 702 bp, Arabidopsis thaliana landsberg
tgaccggagttgaaccgacccggggacataatgcccatgtgaccgactggttattactggcccgtacggcgctccaacccaacgaccgtattgatcaccgatcgacgtgggcgccgtgtgtactgcgcgtgatccgttgacctggagggtcttaagccagctttcgccggacacgaggagtcggatgcccctgtgctcactctgtgtagttattaagtaacttgggctcgacggtccttgatccttttcaggcttacccctacggactcccctgctgagcgggtatccggcggctctcatgtccgctggagtgggggctgtgatcttgtccctgtctgccctgttttgttcttgtgattcaagagtgctccgttcttgcgagggtgtcaagcgccacacgcagaaaagttccgggacttccttacgcggcagtaacgacgcacgcctcgcgcaagggtgcgcgcgcgttgccatcaaggtccaggcaagaccgtccggaccgtttgacccgctcacccgcaagccggtagacatgttgtaccggcctaaaaagggccacaacgccacccatgggggtaagcagggcatacgatggatgtcaaccaagaggacaggttcgctcaatggttgaatacgatgatggaaaacgagggcatacgtgctgttgacctagcaaagaagctcaaggtcaccgattcggct

SEQ ID NO: 179023 - DNA, 412 bp, Arabidopsis thaliana landsberg
atgacggtattcaagtgtgtgtcttccattgaccggaaaataaggtaagaaaaccctcacctttcttatcatgtgttgcgcttggaaatggaagaatctctttatgcttcttttcgccacctctaaatcctccaactgcatgaacacaattctatatcagatatatgagtgtgcaccatcaactaagtaacagtccaaaaccatctaactgactaatgcgcgaagacacctacattggctcaatctttggctgaccaggttttctgttcctagcatcaaatactatattctcgagaaaatccatattgctaacaccagggatctcaactggagtttggagactcaagaagagaaccgcaagagatccttacatatcatgcagatgctcggctttaaacacaatgatttatga

SEQ ID NO: 179024 - DNA, 314 bp, Arabidopsis thaliana landsberg
gttcttgtcttcaaagtctcctctgattcgtgcctatggaggtcttcgatttgatcctacagggaagatcgctgtggaatgggaacattttggctcgttttactttacagtgccccaggtactagaatttgatttctttaagataattgttgtaaccatggactaataatgactttgtttggttgatatacacataggtcgagtttgatgagtttggaggaagctcaatgctggctgcaactgttgcttgggacaatgagctctcatggacgcttgaaaatgctatagaagcacttcaggaaactatgcttcag

SEQ ID NO: 179025 - DNA, 126 bp, Arabidopsis thaliana landsberg
tattccggtaaagttgtgttgcctaagattaggtcatcgttggagtacgagcgtctttgccggcaaggaagtgatcgttctgcaaccgtaacggtggaagcaccggccagttccgatcaacaatag

SEQ ID NO: 179026 - DNA, 117 bp, Arabidopsis thaliana landsberg
agtaatggtttgtcgacattgatcgaccggttgcagaaccatgatctttacgcgcacattaccctggagaaaggtgaacgcagcgagctcgccaacctggcgaacgagctcctttag

SEQ ID NO: 179027 - DNA, 117 bp, Arabidopsis thaliana landsberg
ggtatcaactttgaggggctattgaattgttatgtgcccgagagagacaacgacgggtaccacgataaaagaccgctgtcggtccttaatgagaagatccagcgcaaatctacatga

SEQ ID NO: 179028 - DNA, 79 bp, Arabidopsis thaliana landsberg
atgaatggtttttacaagtctttgcctcaggtgttcttcacggctcggtggtcgtttgagaggtggcttcgagcaaacg

SEQ ID NO: 179029 - DNA, 171 bp, Arabidopsis thaliana landsberg
tggtaacaatggctacacggaggaagcactttcatcttctctccttcttcgaaaccacctagacatatacaacactccttctcctccttctcctccgccctttctctccggcaaagcaccaccggcaagctccgaatctccgccggatcaagccctccgctacggcaacgc

SEQ ID NO: 179030 - DNA, 20 bp, Arabidopsis thaliana landsberg
gtgaaaatgatattgaatag

SEQ ID NO: 179031 - DNA, 656 bp, Arabidopsis thaliana landsberg
atgaaatatcggcatgtaagcaagatgggcaacttgatcttgcctattatggaaggctcaccaagctttggggagaactgcaaaaattacaaaactagcagaagatgacaaggttcatcaattcttgttaaatttaaatgaacgcttcagacctattcgctcaacaattatggatcaagatcctttactgcctctcacacaagtgtactcgcgtgtgatccgagatgaacaaaatctcaacgcctctcgcgtaaaggatactatcaataaaggatactcgcatgtgtctcacatcgttttttcaagaacaaagtattcttcatcaagcttcttgtgtagatacaccgcaacaaaacgggcgagtcgagcgcaagcaccgccacgtatttaatgttgcacgtgcatgtctttttcagagctatctacctcgcaaatttttgggcgaaagtattttgactgctaaccatcttattaatcgcacacctacactgattttacaagggaaatctccatatgaagtactctttgggtctcatattcagcattacatatgttgggttgcttgtgctatgttcatcatcgagcccgtgaaaaggatatatttggggaacgaagtagacgatgtgtatttgttggttatccttatgggaagaaag

SEQ ID NO: 179032 - DNA, 792 bp, Arabidopsis thaliana landsberg
atgaatgcagcgaggatcttgcgtaatctttgtgcatatacagctcctggtcagttcaatgaacagatgaaggaagttattaaatctgcaggagcaacagtaagtcctttcatatgttcttgattcatacgaaattgataagaatcatgaatcactagttatcttctccatgcaggttcttaaggcaataaagtctgaagagaggaaacctcaagaagttatggtgggattagcaccacatattctcaagttaatgaatactcccgaagaattgagagggatgttcgaggaagccggagtaaccgaggaagaactagccaaggcattaatcaatatcctcaagagatatgaacagccagttccaaaggttccaagaatcaggaggtttgcaatagagctaaccattgcgatgatgaaagctaacgttgagactgtcaagaccttccaaaaccttgagatgaagaatgaattagagaccgtctttgagaccgcggctgagcttgagaactttgatatattttctggcacggtcggtttggcacgccatggttcaactatcaatgaactcattgaagaagcaatgctgttgttgaggtagacaaaagttctcatatgtaacaattttaaagacattgactgtctcaaccccaaattgtattgaactaattgtctttgctcaacaagtttatcaaatggactattttctcttcttcttcttccacagtattttctctgcttcacacctacaagtcctgaaaattcttaacaaagacaaacatgatcaaaacacat

SEQ ID NO: 179033 - DNA, 303 bp, Arabidopsis thaliana landsberg
atgcggcagaagccctggctcgcgacctatccggatatcgtaccggccgaaattccgccgctggaatacgaatcggttgccgaactgctggaaaagtcttgtgagcgctatgccgatcgcgtcgccttctccagcatggggaaggcactgacctatcgcgatctcgaagtgcagacacgcaagggcgccgcctggctgcagagcctcggcctgcagaagggcgaccgcgtcgccgtgatgatgccgaacgtgctgcagaacccggttgcggtctacggtatcctgcgcgccgggctaaccgtg

SEQ ID NO: 179034 - DNA, 930 bp, Arabidopsis thaliana landsberg
atgaactcccaggtaaattattttgtgatcatacaataatatataaactcgatcgtgtaataaatcaaaattgttgcattagccctatcacgacgatctccgttaagggatatgacacttcgcttcaaaagtatcttctcgagctcatcttggaaaaacatttcgattcatgcggagagattagacatgtttatgttcccacagactatgaaaggggtgtcctcaagaggtacttactctctggcttcttcactcccagctaagtgctaactctcaaattaataccactttgttttttgtatcgttggtgttacagtgttgccttcttgaggatcgagggagaaggtgccgaagacaaggcattgcaacttagtggaactgacgttgtaggatggactgttatcgttaagccatccgaaatattctatgataattcttcgcgtgctcctgcaactactcctgaggcatccaaaatacacaggtaatttttgataatattatcattctgtttattatttagcatattctgtaacatgtgttgtagcttgtcatgttaataatatttatcaagttattgtttaggttccgtgttacgggatatgacgcttcgcttcctgagattgatatccagatggctctgtgtaaacatttctcttcatgtggagagatctggcaagttacagttctctctaggtttgcgctttctttcttgttccaatttgtgaatatttttttcccaaggctcagaagttattgaattatataactaaagagactctctttaatttcgctgttgaattttacagtacagctttcgtttctcttagaggagaaagatgtgtagacaaggcgctggaactaagtggatgtaacatgggagaaaggactcttgtagttaatgaacctgttgtgccgcaacccgaactctaa

SEQ ID NO: 179035 - DNA, 5236 bp, Arabidopsis thaliana landsberg
atggatggtccttttataacagttggtttactcaaagaaaaaatttacgaaactaagcatttgggaagtggtaaagaccttgacattgtcatctctaatgcccaaactaatgaaggtttgtcttcctccttcttatcctattcacctagaagatattgtgcaatgtgttttgttgttatctaggttggattctggtctgattgtgatcagtattcacttatcaaaatatatggttattacttgctttgtcaaaatttccatggtttatggctttcttccgaagtaatcacatttagcactgttaatctggccatggattgttcagtatctaactgcttcagtaaaatggatgttatgtacctggtacttccttgttagttgaataaaaaaaataaaagtgaagttcttgcgtactgtattagcttatatgttaaatgtgattacttctgagactactgttcttgattggttgtggttgtgaatcattagaaagaaacccttaactacgattctctgttggtatagttgctatatgtggtggccttcatacttatttttttttttgcaatttcagaatatctggatgaagcactgttaataccaaaaaatacttctgtgctaattcgccgggtccctggacgccctcgcatcagaattattaccagagaagagtaatttctatataactttaatacctaatttctcaactgagttgttcaatctttgcgttctttcgctctaagctgcgcatttcattattagttgtgtgaaattataccagattcccatgtgtcatgatgtaaatgactacattttgcaggccgagagtcgaggataaagtggaaaacggtcaagctgatatgaacaatgttattactgctgatgcatctcccgtgagttggctttctcagtttttattggcatggaatccttctacacatatattgatttacaacttaatctaccttataggttgaagatgaattcgatgagtttgggaatgatttgtattcaattcctgatgccccagcagtccattctaataacctatgtcatgattctgcaccagctgatgatgaagaaaccaagctaaaggcattaattgacactccagcactagactggcatcagtaagtaatcttcttgaactgatggacattagcatgctaaatgagatcttgacatacattttgcataacattcgtatttttctttcatgttacagacaaggtgcagatagttttggcccgggtagaggttatgggaggggtatggctggaaggatgggtggccgcggttttggtaattatatttctgtatatgattgacttatatgcttcagtctccccaagtatttagctttgagactcggatgttctgttaattattattgtccaaatattttgtttgctctttccttgaaatgtaagatatagagactgattgtatttgtttgagtaggaatggagaggacaacaccgccaccaggctatgtttgccatcggtgcaatgtttctggtatgactgacttagagaatctttatatatttttaatttggttaagtaatgtctcgagtgtgtacggttattaccgagaaatgaatgttctgaacatcattttctgtctcaggacattttattcaacactgctccacaaacggtaatcctaactttgatgttaagagagttaaaccacctactggtatccccaagtcgatgctgatggcaaccccaaatggctcttactccttgccaagtggcgcagtagcagttttaaaaccaaacgagtacgttgtcactaaattaacatggcgagttgtttgttagtaccttcacataaattattagtaatgttgatcacttatgtcaattgacaaatctagggatgcgtttgagaaggaaatggagggattgacatcaacaacacgatcagtcggggaatttcctcctgaattaaaatgcccattgtgtaaagaagtgatgagagatgctgcactggcaagcaaatgctgcctcaagagctactgtgacaagtgttagttctcttgtcaaattgccaatacttctgattccttttgctgttccacaaacgcctttttatgtaatcattatctacaattcaggtattagagatcacatcattgcaaagtcaatgtgtgtttgtggagcaactcatgtcctagctgatgatcttctacctaacaaaaccctaagggatactataaaccggatattggagtctggtaacagtagtgctgagaacgctggcagcatgtgtcaagtccaaggtatttcatactctcattcgcagtcttttatatttgtgtgtaccatcattggtaaactaatgagtattaaatctagatatggagtctgtacggtgtccacctcccaaggttctatctcctactacatctgctgcatctggaggcgaaaagaaaccagctcctagtaacaacaatgagacttcaactctaaagccgtcaatagaaatagcagagatcacaagtgctcctcgggcgtctgcagaaatagttaaagtggaaaagccagttgatgcatctgcaaacattcaaggatcctcaaatggcaaggaagcagcagtttcacaactgaatacgcagccccccaaggaagaaatgccgcagcaggttgcttctggggagcaaggtaatcactggctattgtcccattagcacgagaaacttatgcatttaaagaagagaaagcatcaccgtttacacattatataatatacattgatgtttggcgattagtatcatcagtaaagtaataatgcatacttttgctcttcagcaggaaaaaggaagaagaagaaacctcggatgagtggaaccggtaggtttttcttattttgatgtggactacccatgctctttcttcccagactatgttaactgtatagagaggcttaacagattgtttgtcttccttttcctttgccagatctagcaggccctgactatatgatgcccatgggcccaggtcccggtaatcagtacttcaatggtttccaacccggcttcaacggcgttcaacatgggttcaatggcgttcaacctgggttcaatggctttcatcatggttttaatgggtttccaggcccttttcctggtgcgatgcctccttttgttggctatggatttggcggtgtgatgcatccagatcctttcgctgcacagggctttgggttccctaatataccaccaccttataggtactgagaagctgagacttgctctctcagttcatagatagtttgtgattttgtatcttcattatagctattagtaaccaggacatgtgacttgagcagggaccttgcggagatggggaatcgtatgaatctccagcatcctataatggggagagaagaatttgaagctaagaaaactgagatgaaaagaaagcgtgaaaacgagattcgacgatcggaagggtaaagcactgtctgtgcattcactagtttcaggcttatgtatgtatactgcagcatgttgactagttgtttgtttttgtgtggtacagagggaatgtcgtcagggacagtgaaaagagcagaataatgaacaactcggcagtcacttcctcacccgtgaagccaaaatctgtatgtatcattttgttgcctcagttctctctcgctctctctctctctctctcggccaattggttttgggtttgcaagagatgacgttttctcagcaccctctttctctctttttatttctatatttttcgctctctgcatatccttttacgttaaaaaagaaaggggttgattccacaattgctaaataggcgtctgctttatagttgatttggtttaggggtaaaactcaaaggagagacatttaagattagaatgaggtagatgtagaaattgaattgacaccataaaatgtattgacttgcgatagaatatatgcataaatgaaatgaattgaaagttatttccacatagtcttctccttggcagtttggtcacaagtaatgctcgactgatcccataatttttggcctcttcaagacagaaaaatttgtagggaacaaaagacttaagtagaaagtcgtaggaaatgtttttaatttcagggtagtatatcttatcgtacgggttaatatggctctatagacttacatgaagcgtggtcccaaacagaccagttggctttatattgccgaccttataaaatattatttttctaacattatattttacttaaatagttttttttttttttttttttgacgaaattttttgttacaatattaaatttttgttatctattaaaatgtagatatttgatctactttatttttaaagtaaacgttaaatactgatatcaaaatcatattaaatcaggactatattaaatacgtctttttatattttgaaaccaaaacacgtttgtaatccacgtgtaaggatagtagtggtcactctttatcctgcaaaattaagattttactgggaagctataaagtataaacctttgtttgctttctcttttctttgtttcttcgttaaataagctatttagagtaaagtaaaagataaatgggttgggcccaatatatctcttattgggctcaagatttaaatttcttttctgttattttaccaataatggccttgttcttgaataaacagagacaaggacctccgccgccgatttcgtctgattacgaccgtcgcaggcgatcggatagattgtcaccggagcgtcagtcatctcgaaggttcacctctcctcctcgatcatccagcaggaaatctgagcgtgatcgtcaccatgacctcgattccgaacacgaccgccgccgtgaccgtcccagagagacagatcgcaagcatcgtaagagatccgaaaagccatcatcggatccaactgtagagatagacgataacaataagtctaacgtgttcactcggataagctttccagaggaatcttctggcaaacaacgaaagacatcaaagtcttctccagcgcctccagagagctcagtcgccccagtttcatcgggtcgtcgtcatcacagtcgaagagaaagagagatggtggaatacgattcaagtgatgatgaagacagacatttcaagaggaagccatcaaggtacaagcgatctccttcggttgcaccttctgacgccggtgatgagcatttccgtcattctaagcgatctaaaggagaaagagcgcgagcttga

SEQ ID NO: 179036 - DNA, 37 bp, Arabidopsis thaliana landsberg
atgaagacgtttcgggttactcgggcttctcaggcag

SEQ ID NO: 179037 - DNA, 1346 bp, Arabidopsis thaliana landsberg
  unsure (1)..(1346): unsure at all n locations
gagtattctatcagtagactcctagctgtcccatcgatgatcagagctattcttcctactttacaacatcgtggacacaacaataagcttcaaagttgcctgaagctggtagttttaagtggcgaaccctttcccgtgagcctgtgggattcacttcacagcctacttcctgaaacatgttttctgaatctatatgggagtacagaggtgcgaaaaatatgataattgtaatttagtcttagaaaatcttcttaagctggtgtaattgaaaagttcatagcggtgtcagctggttgctactggcttggttttatgggttgaaaacatgttgataactacaacctgcttttggtttggaagatgttgataccttgaagacttcttaatttcacttatttgatacttaggcatagtctaacttgctgtagctggtcagagttgtaatatatcctctctatattctcttaacttatgnnnnnnnnnnnnnnnnnnnnnnntgtatcgattagccttttgttttgtttaggtatcaggggactgcacttattttgactgcagtgagttgccaagactcttgaagaccgaagagattggtagtgttcctattggcaagtcaatttccaattgcaaagttgtacttttgggggacgaagataaaccttacgaaggagaaatttgtgttagtggtctctgtctttcacaagggtacatgcattcctcgatagagtctgaaggctacgtgaagctacataataactcactctgtaatcatttaacaaatgattgtggaagccagctttattatagaactggtgattatggaagacaactttctagtggtgatttgatttttattgggagaagggatcgaactgttaaactcaatggaaaacgcatggcccttgaagagattgaaacaactctagaactaaatccagatattgctgaagctgttgttctacttagcagagatgagacggagcttgcttcactcaaggcctttgtagtactgaacaaggaaagcaactccagtgatggtatcatattttctatcagaaattggatgggtggaaaacttcctccggtgatgattcctaaccattttgttttggtggagaaactgccacttacttcaagtggaaaagttgattatgaagcactagcaaggttgaaatgtcctacaaccggtgctcaagatatgatgcagagcaatggaactaatagtttactgcaaaatattaaaaaggtcagacaatttccatgctgtgcttacacacgttttgtttttctccttacgagccctctttggtatctaattgtttctttctccctagaccatatattag

SEQ ID NO: 179038 - DNA, 32 bp, Arabidopsis thaliana landsberg
atggtaaaaagagaagaagaagaagaagaaag

SEQ ID NO: 179039 - DNA, 395 bp, Arabidopsis thaliana landsberg
atgactcgtactgcaaccgctaccgggtcgcggcccgcaactcgaacactccgtcctcgtcggccagcaattgcggctttcgcgtggccgccaatccgctccaaccaccggcttgaccggcccggcgccccggacatccggcacgcacgccgcggcccagcagtatccccctttgggttcacgactttccagggcgccggcgccgcatggtagtacagtggagaaacgggaagcagaaaccgaaccggaacatcccgcgagcaatccgcccacaaccttccatcggagctgccgcatgagcacttacaccgtcgcactcaaagccagccacgaagtcgccgaccgccccatggccttccatttcgaaaagcccgacggcatcaccttcaagcccg

SEQ ID NO: 179040 - DNA, 160 bp, Arabidopsis thaliana landsberg
atgaacggagttacgctctttgtggaggattttggaaacggtgagtatgagggaattaaagacgttgactcaatttaaactacgccaaatggcagccaggaattcaaatcagacttgtgatccaaaatcgggacgacataaaagcattgtaaaaggatga

SEQ ID NO: 179041 - DNA, 254 bp, Arabidopsis thaliana landsberg
atgggtgttttctccaatcttcgaggtcctaaaattggattgacccatgaagaattgcctgtagtagccaatggctctacttcttcttcttcgtctccttcctctttcaagcgtaaagtctcgacctttttgccaatctgcgtggctcttgtcgtcattatcgagatcgggttcctctgtcggctcgataacgcttctttggtcgatacgttaacccattttttcaccaagtcgtcgtccgatttgaaagttgg

SEQ ID NO: 179042 - DNA, 166 bp, Arabidopsis thaliana landsberg
aaattactggttgttcacattgctgcagcgctaccgttacatccaggcataccaagtcgatcttaggcttcagaaaatcgaagaggctttcgtatccgacaatcaaattggggaagaagttatgttcagaatgcgatcacagagtcattggagaaaagagttagtt

SEQ ID NO: 179043 - DNA, 335 bp, Arabidopsis thaliana landsberg
cgacctcgagaccatcaagggaaccgacgggctcaaggtcttctccatcgcctcgtcgcgcctcatctacctcgccatcgattccgaccgcgacaacagcccgttcgtcaccgacgtcaacggcaagccgatggacaagaatcctttgaaggacgcgcgcgtgcgcaccgccatgtcgatgatgatcgaccgcgacctcatcatcgaccgcatcctgcgcggctcgggcgaggcggctggccaggaagtcccgcaaggaatgggcggctatgtcgaggaactgccgccgccggcctacgatccggaaaaggccaaggcgctgctggcggaagccg

SEQ ID NO: 179044 - DNA, 154 bp, Arabidopsis thaliana landsberg
atgtggtcgagtgacatagttatcgctaacattacaatgcgtgactcaccgttctggactctgcatccatatgactgcaaaaatgtaacaataaggaatgtcaccatcttggctcctgtaaccggagcaccaaacactgatggaattgatccag

SEQ ID NO: 179045 - DNA, 125 bp, Arabidopsis thaliana landsberg
caacagaaagtgaaacacatgctgtctctgttgtaactgcttctggcaaaaccggtatgatactagagcttgaagtggatggttgtgatgatgttgtggatgacgatgatgcagatgatgcatga

SEQ ID NO: 179046 - DNA, 306 bp, Arabidopsis thaliana landsberg
ccttaaacccccggcaccgggcgggcccaacacccaatacaaggtctgacgacacaccggagaccaaagaaaatggaaaacaaggacccgggccaggaaaccgcgaccccggtcgagaagaggcacccccccgccgaaaaaaactgggccatggtgaacaaatcctcagacagagacgactagcgcccctacggatccactacccacccacccgtgtagattatgggtgccgaaacccactactggaaggccaatccagcgaccccggggaggaaaacatggaccacgtcaacgaccgaaaccccg

SEQ ID NO: 179047 - DNA, 274 bp, Arabidopsis thaliana landsberg
cttttgtaaatcgaatgaagtcgcatattacaaaagagatccagataacgcgatagatgtggttgggaaaagcaaaaggagttctgatgtatctggactgaaattccgcgtcttaagggagttcttgcagcttggttatggcgttcttctatcggatgtggacattgtattcttgcagaacccttttggtcatctgtccatagactctgatgtggagtccatgagcgatggtcatgacaataacacagccttatggcttcaacgatgtgtttga

SEQ ID NO: 179048 - DNA, 880 bp, Arabidopsis thaliana landsberg
atgagagatgtgggaacgaaagatcaaagaagacacaattcttgtgtgggacagagtttattgcccaaaaccaagttgctcagctttaatgtcaaaaaccgaaaagagaacacgtctttaggatcttggttatggaaaaagattctaaaacagagagacaaagctcgtttatttcatcagatggaggtacgctcgggaacaactacctctttttggcacgaccattggagtccgcttggcaggctacatcaacacttggggtctcggggaacaatagatttggggatagcgactcaagcgacggttgcagaggttttagatactcacaggagaaagagacatagagcagattttttaaatcagattgagaatcacattgagctggttcgacaagctagaagccaagagagtgatcgctcattatggaaacaaaaagaggacagctttaaaggctctttctcttctccaaaaacttggcaacaaatcagaacaataagcaacgaatgtgaatggtatagaggggtttggtttccgtcttccactccaaaatattcatttgtcacatggttagcttttcacaatagactagcaacgggtgataggctctacaaatggaattcagaagctcgggctacttgcgttttctgcgacgaggaactggagacgcgagaccacctctttttctcgtgtccctattcttctcaaatttggatcgctttagcaaaaggacttctaaatggcagaaacgtttcgagttggagcttaatcactcctcaccttcttgactcgtctcagccatatctccatgttttcacccttcggtatacgttccaagctttgattcacagtctatggcgagagagaaatggtaggcgacatg

SEQ ID NO: 179049 - DNA, 81 bp, Arabidopsis thaliana landsberg
atgaagatccctgcggctcttgtctttatccctgttggtgtcctcttcttgatctcagggctcatcgtcaacatcattcag

SEQ ID NO: 179050 - DNA, 128 bp, Arabidopsis thaliana landsberg
atgattgaaaccggtttaggtgtttcgagaacagagaatcttggattttgtatggaagaattcaagattgagaaatacgaaggatcttttgatgtgtgtatgattcttgagtcgtcctcgttgattcg

SEQ ID NO: 179051 - DNA, 678 bp, Arabidopsis thaliana landsberg
atgattgatcaggccgaagctttccttatggagcttgattcggttgctgcagacactggaagtgatggaaatggaaatgtcgatttaggttctcgagtgtctaacagtgaaacggaatctagattttgtgaaatgaaaagagagattagagactctgatcaccgattttatgagctctgcaacgaagctggtgagaagaaaatggagaaaaggcgagttccggactacaaatctttcttatccgaatttgacgattatgttgcgagggagaaaatgggttctagaaattcgaaggcattgagctatggttttgaagtgggagatatggtttggggaaaggtaaagtcacatccatggtggccaggtcaaatattcaatgaagcttttgcgtctccctctgttcgtcgtgtgaagaagatgggttacgttctggttgctttctttggggataatagttatggatggttcgatcctgctgagcttatcccttttgaacctcatgtgaaggagaaatcacagcaaactagttcggatcactttgcaaaagctgtggaagaagctatgaatgaagtaggtagaaggtcagctcttggcttgacttgtaaatgtcggaatcagtataactttaggcctattaatgctcaaggttactttgctgtagacgtgcctgattacgag

SEQ ID NO: 179052 - DNA, 145 bp, Arabidopsis thaliana landsberg
atggctgcagttgtagatgagcaagtgcaactaaacaacataggtgcaggcgatgcaccacgctaccataatcagcgtaatggcatagagcctccactagtgcagaacaacaactttgagatcaaaaacagtctcgttgccatgg

SEQ ID NO: 179053 - DNA, 151 bp, Arabidopsis thaliana landsberg
atggtcgtcggtaaattcgacaccgatatctgcgataacgtcgtccgagaactggcgcatgagattattcaaaggagtgaaaatggcatccacgatgctagaacagtagcggaagctgccgcaaaaagtacagacgccgaagggcacatag

SEQ ID NO: 179054 - DNA, 1470 bp, Arabidopsis thaliana landsberg
aacgcaagcgatcgccttcttcctcggagagccgaccagaggtgaaaacaccacagaggagaagaatcctaaacgacacaagtacagggattttgtcatgttagttcagcttcctcgcttgacaagctctcttagagagcctttcgacatcgatcaggcttaccttcgccgcaaaactatactccaaactcttaataagcctcgcaggtccgtttttttctttccgaactgattccactcgtttactaagttttcagcgagttctatagcatctgtttggtgctatatcgaatttgatagttgtatagtctggtgatcacaatgtctaagtagaatttggaaagcatttggaaatacttgaattgaattggactattgtgttacttgtgtttgccatttcagctccggtaatcgccttgatgaatctgaccttgctaagaggatagttcatcaatgggaaggaggtgattttatgatgatatctattttttcccaatttctctataaaagatggtgttgtgtgtatattgattggaattggtgtgacagcttctctcgaagtgcgacaagcatacaagcagtttattggagctgtagtggaattgattgatcgggaagttccatcagatgagtttcgcgaggttgctttttccgcttatcgtctgtttaacaatccagtggaggaagatgatagtgatatcaatgataatataagcatttccgggaagaagtaagtactgttaattctgttttttcattttatgtatattcgtttatttatcaaccatgctgatgcaagattgttgaagattatgaaagtggccaagatttttgcacttctttatggtgttcagagataattgaggctttcttatattcaacaggttagagttgcaaaatcttgtcgggcatgctgtctcagatgctaatgtaaaaagacgtggcctcctatgctcacccactttactcaatacagcctactcatcagtctgagacatatgctgatgaagttaatgggggagctgagtttggtgccgaccttgttttcaatctaccagctcgttttttggtggaagcatctcttgacgaaactgggtttgtggatgtagaaagcaatgatgctcatacatcgttttctgaaggatggagtggtgttagcgacacgaaaaataatctcagtgcaggaaaattcaatttaagttggctaagagatgcatgtggtcggatggttagagaaaccaattcacaactttcccgtgaagaattggctatggctatatgcagatttctggattcggataaacccggtgaggaggtatgttattttcgaacctactatacctgttcctagagcatcatatttgcaagtgaaagtagatgagattttaaatatttgttctgcagatagctggggatctgctggatcttgttggggatggtgcatttgagactgttcaagaccttattatg

SEQ ID NO: 179055 - DNA, 178 bp, Arabidopsis thaliana landsberg
atggcccaaaggttggaggcaaaaggcggaaagggagggaatcaatgggatgatggagccgaccatgaaaatgtaacaaagatacatgtacgaggtggtcttgaaggaatccaattcatcaagtttgagtatgtcaaagctggacaaacagttgttggaccaattcatggtgtctcgg

SEQ ID NO: 179056 - DNA, 661 bp, Arabidopsis thaliana landsberg
atgttcttattggcgtttaagactatgggttacagtatgacacaacaaccggaggttaaaacattcgtcaaaagtggggttatagtactgatgaaaatgctgcactttaatcaacgactgttggtgtgcataatgaacagtatttatagagtttgctcgtagccatttcttcgtccggttctcaccacatagtgaaagcgtgcaatgcttataaagatggagctcctgttggatcaatagataaaggcggagtcaaaaaacaaactagacaacgaggctccttgaagtttaggatcaatgtaactagctttatgaagacagtggttgatgaattcgtcaacttaggagcaataagagaagcaaatcatagaggtgagccaaacccaacattgttttcttgtttttttttttgttatcttgaattgattatttgtagtgtttaattctctgaatagtgtgattgattattattcaattttaagtctaattattttatttttatttttttctcaggttttctttatgggatctctttctttatcacaattgttgccttttttggcagttggtatagcatcaaaaaaattctagcaaatattggttgctgcatttttcagcagtaggatttgagtcgcaacgaagactcgagaaagaagacttg

SEQ ID NO: 179057 - DNA, 810 bp, Arabidopsis thaliana landsberg
atggtgtttgactcacaccttagcagtctgagagatgcaaacattaagacattatgggaagatgatgttcatcctcactatgtcatgaggcgttatgctgaattcacggcttcgtttattcacctaaacgttgaatatggagatgggcaggttcgttataagaatgcttctgtctctaatgatatgtattacctgttctcgtcactcaaatcgcttgacactataatgaaccgctgcagcttgatataaatctggagcggttaagaatggctgtagatgggttgattctcaagcttgcaaagttgttcccaaggccaaagcagcaaattgtgtttctcataaataactacgatatgacaatcgctgtactgaaggtgagttgaatccttggccgtctcatgttaagtgcacccatgtggaccagtgttttcttgatttgaaatggctttctacgaatctcaaggcttaactaattgagtctgacctaccaaaagaatctgttttgatcatcttcctgtattttaggaagctggaccagaaggtgggaaaattcaaatgcattttgaggaaatgctaaagagtaacacttcattatttgtggtaagggcaaatactaggttacctttgtaatttgcttcatgggtataacataaaactggctttgtagtagcctaaccttaatctgatgtcaactcgtaggaagaattgctggtggagcatttcagtgatttgatcaaattcgtgaagaatcgagcttgtaagcaacttgtttctttcttgtcttcacgtactcatcgtgtgttaagttga

SEQ ID NO: 179058 - DNA, 159 bp, Arabidopsis thaliana landsberg
atgcccgcttcgtctagtcatttggcattttgcacaacgaagacttggtatgatgccgaggaaatttggcttttgggtggacttgatcacttgggcaaaaggaacatcatatcacaaagatctccaactctcatcagcaagctggttatgcatgaggtt

SEQ ID NO: 179059 - DNA, 345 bp, Arabidopsis thaliana landsberg
atgccacttgataaagcgaaacctttttacgcctctttagttaagaaattccagaaagcatataatcctgatgctgtcaaaggtcaaaacacactctcattgatcttttcttaatcaaaacttctcattttctctagtcttcttgactaaattggttctcttttttaaaatacagatggtgtgtttggagctatgatgcaggtaaggagataactcctttcaatagcaaggtttgattagtatcttgtgtgattaaaacatgttctctaatcatattcaaaggtcaatcttgtaaacgatggtccggtcacgatgcagctcgactcacctcaatccaccaagtaa

SEQ ID NO: 179060 - DNA, 148 bp, Arabidopsis thaliana landsberg
atgctcaacctacgacctgcactgcaattcattctgtcgtcgtctcgacaaactacttacatcgcaccgtcgcatcctccacaggatgtgatcgcgaattgcggaatgctcatcggcgtacaatcctcaccgcacgcagtccgtccaa

SEQ ID NO: 179061 - DNA, 133 bp, Arabidopsis thaliana landsberg
  unsure (1)..(133): unsure at all n locations
anccaagagaaggagcaacaacagaagtggtaccagaattgcggtcaccattctcccattggataacaacagagcgaagagatcgaagggactgagaaggaggccaaggcttgatgtcatgaatgtggatcag

SEQ ID NO: 179062 - DNA, 2331 bp, Arabidopsis thaliana landsberg
atggaaaagtttgtgaaaacattggaagcatcagtgtctggtgcgttttattctttcttgacattctctctttttaatcgtcatgatgcataatgcaagtttttatttttgtgttactcttagcttatagaactgtgatcgaaaatagtgaggctgagagtgattcaaaagaaaggttagtatcagtaaatgtgtgatctttctttgtatatcttatatttgttgtttttcttccaagctgtttgaatgtaatcttaagctggtttttaaagttattgtgttgttggtgatctataaaaattgtgaattgtagcctagaactctctgttcgcaagatctatcaagttttatctcaaatcccacctcctgagaaacaagctgagaagtctcaacacgagatgtggagtgggtcaggtgattgtttccgagattttccaattttgtggaaaggactccctatgtgtttagatttgctaataagagttattgtgcagatgaaagtattagtgagaagccgacagataaaaagaagaaaactgagaaaggagacagcactgtaagtttccagttgcaagtttgctgaatatactgaatccgtaatctgtgaataggttttcttccaggcatggaattcctaacatttgcctctttatttattctgttaaatctccagctcctttctccggcaacaattagcaagaggatgaagttgaagttcactaaagcatggatttcatttctcagactgcctcttcccattgatgtgtacaagcaggtaaaccaatttacttttccaactaaccatttgtctggaatatggattggatgaagaattaccaatatattatcttctgataaccaggttcttgccagtattcacctgacagtcattccccatctatctaatcctacaatgttatggtgggcaaatttaccaaagcttttatcatttctgtatatgtgattgtccttcaataagcgcttacttatgtttcaccgtactttgcagcgactttttaacaaaatcgtacgacattgggggtgttgtcagtgtgatggctcttagcagtctcttcatcctcatgacccaacatggtttggagtatccgttcttttatgaaaaactgtatgcgttactggttccttctgtctttgtggcaaagcaccgagcaaaatttcttcaggtattgccatatttgagtaaccgatcaatgactgattactttataatatgttattcttccctctatatctgaaacgctttctgcagcttcttgacgcatgcctgaagtcgtcaatgcttccagcatatctggcagcttcattcacaaagaaactaagcagattgtcactttccattccccctgcgggatcgttggtcataacagctttgatctacaaccttttacgaagaaatcctacaatcaaccatcttgtgcaggtacggcctatctttgttagtgcaaagaacatattaacagatgaaaatgacgtctgtataataccactcacaactacgcaaaataatgtatataaaagcatggacttacaaagaggtcactcttgttcaggaaatcgttgaaaatgccgatgaagccaacacagaggctggtgaacacaatgagagccaaccaaagaccatcaaaaagcgaaagcttggtattgactatttcaacaaccaggagagtgatcccaagaaatctggagccttaagtaagtcgttaacattctattcccagtcttttttatttttcctttccatgcccctagcacaaaatcacacccctatgtagaagcttgattcatccaacaaaaaacaatgatgtgtatgctttcagatttcctgatttgtactttcataacagcggctttgtagcataattagatttattagtttgataagaaattaagaatgccaaggttctctagattcatcgataaattcaaaaagtaaagttttaactgttttgaaagttcaagaacaatgtgttgttttgccttctgtaagttgttagcttgttaaataactttgtaatctaactgatgaatgatgatattcgttttactggaaacctacagaaagttctctttgggagatcgacactttgcgccatcattactgtccaccagtttcacggtatatttgctcaccaaacaattttatccgatttttttaaaatttttacatttggtcatctccttgatacctcttctcacttttgtaggtttatctcatctctagaaactaatctaaccatcagatcgaaaaccacggaaatgaaaattgaagattttagctctggttcatatgccaccatatttggggacgag

SEQ ID NO: 179063 - DNA, 326 bp, Arabidopsis thaliana landsberg
atgaagctggtggttctcatgtcgttcttgcttctgcttccattgtgttcatcgggtaaatcaatttgcatatttgtatatagattatattttcaaacatctaattaagtaaaggaatggttacagttgcatgattaaaggtgtgaaaaaactgtttattttatattcaatcgtgttacatttttaacatatatccaatatctctctagtcagctagttatggatttcaatcaaataatatggttgtttattgcatttacttgttttttgtaggatttggagagggccatggagttactcacaccaaccaatattccttaaacaat

SEQ ID NO: 179064 - DNA, 980 bp, Arabidopsis thaliana landsberg
agttcatacattgcgaacgatctttacaaagcttcaaaaccaaacagtgaacatcgaaagaacttcttgttcggaccgaaactggaactttgttgtcgagtcagcctccaaccaaccaaccagtaacattacctgcgactgtactttcaacgccagctcagtctgtcgtgtcacaaacatgtaagtaaaagaaacttctcatctctgtgactttcataacaagaaactgagttagggctctgaaaaaactttctttacttcttgattttcttcaacagacagcttaaaagtttcagcttgcccggaatattcccgcctgagttcggaaacctcacgcgtcttcgagagatgtatgcattttcgttcttgagtttctgtcagtggatcatagcaaaaatgtctgagacttggaatttaagcaatctctgtttttgttttcttacagagatctttcgcggaactttctcaatggaacaatacctacgacattgtctcaaattccacttgaaatcttgtaaccattctctgcaacacatacttgtttcttgtgatgattaagttttagtgattctcacgttttgttttgttttctgcaactaataggtctgtaaccggaaaccgtctctcaggaccatttcctcctcaacttggagatattactacacttactgatgtgtaatgtttaaatatctaatttgtttttcatcaaaccagaattgacaagattctaatatgtaagagacaaattgcaggaatttggaaactaatttattcacaggaccacttcctcgaaacctagggaacttaagaagcttgaaagagttgtaagatcagttactatatactctgttttgtcttatatattgttgtttcactttacttagtgatttggtctatttatattacagacttctctctgcaaacaacttcacgggtcaaatccctgagtccttaagtaatctcaagaatttgactgaatt

SEQ ID NO: 179065 - DNA, 879 bp, Arabidopsis thaliana landsberg
atgccttccactttatccagtgtgaccccagcaacaggtgggactccatgggattggatagttcaaggagttgatatacatatatgcatgcccttcaggctacagctccgtgctattgatgatgctgctgaagaaatgctgagggctttgaagcttgtaaccaacgccaaaaccaaactcatttttccaataaaaaaggaaagctcaacacctaaaaaacctgggtcgaaaaaagttgggcgtataagattcggcattcgcaagttaatatttgatattgaggaagaacccctccagggttggcttgatgaacattaccatcttatgaggaaagaagcttatgagttagccataaggtcgaaattccttgatgaattaatgtccagtggaaaccaggttcctaaaactgggggagatgagtcagacggtgagaagaaaatttctttcgagggagaagaaattgacccacaagatcctgccattatccagatgatgaatgaaaaattatataaacagtcgttcagttcatattacaagtcttgtcaaagtttaagactttcagatggttcaggtgcctgtaaagaaggttttcaggctggttttaagatgagcacttctaggacatctctactttctgtctctgttactgatttggatctaagtttgacagctattggtggaggtgaagctgggatgatagaaattgttaagaagcttgatcctgtagctgaagaaaaagacatacctttttcgcggctttatggaagcaatcttcggttaaacactggaactctcgctgttcaaatacgaaattacacatttcctcttctctcaacagctttcggtaaatgcgaagggtgtcttgtgttggctcagcag

SEQ ID NO: 179066 - DNA, 643 bp, Arabidopsis thaliana landsberg
gaagaaaatggaagggtaaaggaacaagagagggctattgaagctaataccattgcggaagcaaaactagctctagtaaaggaagagttacaaaaagagcacgagaaaaacatgcagaaaatggcggtaaatccatattttcttcaaatatcagtcgacatatttccttggatcaaatttctcctactgagtatttgatttgttcgagcatataattaaataaatatgaatcatgtatcatgggatgaggttgacaatttatggacagagatttttagttagaaagtattcttgttttttaggaagaaaacaaaaagcgtagggaacaagaaaaggagattcaatctaagaaccttgaagaagcagaactagcaaggaggcaagagaagatacgaatggatcaagagatgattgcactcgcggtaaattcacattttcaactttgtatagttattatatatttgtgctttttcttgcattcaatcctgccaaataaacaatctatttagaagagctatcatcttaagaaggcgtgtttagataccacatctgaatgtagaataaaccaacaatgatatatctgagaaatgtgctaatcgacaaatgtttaatttacttgcagttggaagttcatgaaacttga

SEQ ID NO: 179067 - DNA, 550 bp, Arabidopsis thaliana landsberg
atgagcagagctgaagcactccttaaggtcatactatccccaatcgactcagtggcagacacttatcgtgcactgtttccggagggaacgcccatggagtttcaacgcatcttagaacttaaggtaattttggcatgtcttaacccatttcctcgctctcaatcgaacaggctcgaggctcgagtctggttcacaacagtattctagagtgacagtctgctgaaactttttctggtgtttggtgcagggtcttaagaaagctgatcagcagagtatactagatgatttcaacaagcatggtccaggattcacacagcagtcggttgcagcagcaatgccacaaccaatgccaaccccacctgcaccaccattggcaatcactaatccggctacagctgcagggttcatagcaaacagcgaggatgttttaaccagagcagctgctcttggcagaggagctgcaagcactggcttcaagaagttcattgctcttaccgaagctgccaaagaccgcaaagatgggcctttaaggagactcttcaacgcatga

SEQ ID NO: 179068 - DNA, 642 bp, Arabidopsis thaliana landsberg
atgaagaaatatgtcttgttaggcgtcacggctctcattatggcaatggtcatttgtgtagaggccaacgatggcaacagcccgagtaggaaaatggaagaggttcaccgtgaaagcaagctgatgataacaaagacgacggtgagtattatatgtgcctccaccgattacaaacaagattgcaccacgagtctcgcaaccgtgaggtcgccggatccccgaaatctaataagatctgcttttgaccttgctatcatctcgattcgaagtggaatcgacagagggatgattgatctaaagagtagagcagatgccgatatgcacacaagagaagcgcttaatacttgtagagagcttatggatgatgcgattgatgatcttcgaaaaacgagggataaatttaggggatttttgttcactagattgtcagacttcgttgaggatctttgtgtgtggcttagcggatcaatcacataccaacagacgtgcattgatggatttgaagggattgatagcgaagcggccgtgatgatggagagagtcatgaggaaggggcagcatctcactagcaatggattagcgattgccgcaaatctcgataaattattgaaggctttccgtattccatttccatttcttagg

SEQ ID NO: 179069 - DNA, 299 bp, Arabidopsis thaliana landsberg
ctgaagatcctgttcttcttgcggagaagcttgcacacgctgaagcagctcttcaagctcaggcgacacaactacaaaagagtgccgagaagatgcaccaagtctttgagtaccttgccaagaaagatcctgtgtttgctgcaatgttagagtctgaaaacgagtcaacggccaccaacacagaagcaaaccgagttagcactcctcagacttcaccggtgacacctttgacgggagaaaacatgggagacaaccccggtaccgcaaccgcaaccgcctctttatctaagtccttttaa

SEQ ID NO: 179070 - DNA, 75 bp, Arabidopsis thaliana landsberg
atgataatcgaggaagggcgcagcggcagaaccctgaaaatgttcttggagctgacaggaacgagggatgggatg

SEQ ID NO: 179071 - DNA, 873 bp, Arabidopsis thaliana landsberg
atgcattacaaagaaaagaaccgattagactactttcatgttgttcccctaataccctccgcagacacagtaacaagtaaaagtagaaaatcaagacaagataaaaacagatgatcatatgtatatccacttaccaatgatgtactgaaggataaaactataaaagatgaagtgccagatattagagtattgatgcaatatcataggaagaaacatgtaatgcttaccgcggcatttgatgccctcgctggacggtttcctttgtgcagcatctttgcgatctgagaggctgccgttcttgtctttgtgtttcttttccgattatgtaacatgtttggtgaagagtagtacaagtatgagcgaccatgcaatttgggcctcctcctaagcctatcactggttctaactggcttagtaactgaaccatctccttgacttgatcgcttgggatgcatggataaatgctacctctgatggttatctccttccataaacaactacaaacccaagagtcacaaatcaaatttcacaaatcaaaagaatcccagaaggaacacatctaacattctctcacatacacggccctttccaggtacgccaactcctaatagacatgcattcatagagataaaacctgaagagaaagccactaaacctccgagcaaaacaatgaaaaatctaaaccaaaccctagaaactgaagcggaaaatgatcatcctcaatcaaatctacggttactgttgagaaatataaacaaatccttgcaaataactgctaaaacgactgtttatccgattgcattagccaaagaactggaggagacaaatcaactgacaaatgaacggagagaatgcaaaaacgagaaagcgtaa

SEQ ID NO: 179072 - DNA, 486 bp, Arabidopsis thaliana landsberg
atgttaattcaagagttccgatcggatttgattcaaataaaagagaagaacatgatacgtaacgtgtccgtcaaagattttagtgaacttgatgtaagtaatatcctttgaccatgcgtttatgtttgagttcattttattctttaatgaattttatacattgaattgcatattgtgacatgctcttggtgattttatttttgtcaagttagaaatcacttggaaacaatgtaaaaatttagatgattaagggtatttgccttttccgtgcgctcgctctttctttgtgttcttagtgaaatcttattcattgaaattaggggtgggaattaggttgagagttataaaagataaggtaatgattgtttaatttgcttattctgtctaaatctatactatataaaagttgaagctagctatttacttctaaaggcgtccacgtgggatttagagcgaccaatcgagagctgccacatcaataattaa

SEQ ID NO: 179073 - DNA, 334 bp, Arabidopsis thaliana landsberg
cttagcttcggctttggcccggacaatgaattgattgtggccgattctggcagcggctgtgtcacggtgcgagacgtgccgtcattcggccagaagcaagtgctgttcgatgccaaaggcggcgacgtacgcgttcgttggtcgtgttccaatctcacccacatgactataggaagcgcggggagtgatgcgaatgtccccgtctggtcgactgctcctccttgacgccggtgacagcgacacgacgactcttttcacgtttgacggttccatcttgacgcgcgcggccaacttgaaacttcgctgggaccccgacgcgtcccttcgcactgaa

SEQ ID NO: 179074 - DNA, 394 bp, Arabidopsis thaliana landsberg
atgccatctgatatattggaaccgagaggtgtgcctacaccttctcattttcatgaagacattcgcatcactcctgaggtaactccttcttcgattttggttccacatacgctgcacaagtgttttcatgtttagaacggtttttctcaagactttttgatgttttattttgcagaaacaatttggtttcatgaaaaacaatccaatgcctgaaggtggtgtggatagaagttcaaatctaccgactagttcttggacatctgacagttaccagctctctcaacaatcaagcttgtctggggcgcttccctcctttatccctaatggaagaacaactacaaatgatactcactgggagagcagtctattctcaagctctctgtctgaccactac

SEQ ID NO: 179075 - DNA, 171 bp, Arabidopsis thaliana landsberg
atgccggaaattctgcgaccaggtaatgcttttttttgttgtataataataagagatatacatggcagatcctgccattgacatgaaggcaggctgtaccacgacccacaaccggagtgccgaaccaaggatggtgaataaaccgtcggattataccgccttccatgcccg

SEQ ID NO: 179076 - DNA, 199 bp, Arabidopsis thaliana landsberg
gaagaagaacccgttgttctcccagattcgagatacccataaatgtggcttgtttgatgtggaagaagaagaagaagatagtggtgttgataagttaagacctcagatgatgcagagaacgacaggagtttgtgataggcgtgttgcggttaagaagtttggttctgaagcgttgcagctcaagaatgctttgactaga

SEQ ID NO: 179077 - DNA, 970 bp, Arabidopsis thaliana landsberg
atgagcatcaaaaagcctgcccttcaaggtcagttttttttttcttacagttcataatttccttttcttgtagtacagagaatttcatttgttgaaacggattgaattgaatattcctgcgagctatagttttttcttttcatatttttgtttgcagatagaacaatttatgaggttgtatcctgaggcagatcaatacatttcctctcctggattatatctcccgacttttggaagattttgctaaaactacctatggtttttacccgtattatttcaccgctcactaatttttcatgttcataaaattcttcaaaattacatggattattttcaccatatgtgaaacgacatgagattatgttaacatgatggtcaaaacataatagatcaatgaaattttgtgcatatattacaatatcacagcaagaaaggagttatagttcaatgattattaccaaaaaaaggactataaaagaaaacgaagacacttcaaatgtgagcaacacaacacttcaaagtggaactacttgacttgcaggaaattcgactttgcgcttcttcttattcatttttcaagctactttcgtgttagcgtttacgagttaggttctgtgtatttgcaactctgtgacatgctctaccttacagaaaaccgcaagtatgagaaccttgttgatccttcaactttcattcctcgattctcaaacaagttattgaaaggtgcacacaataagcaagtcgtgctaacggctacacacattatagctagtatgaagagagattggatgcaggtgtgtgtgactcctcctgttacgtacatgttgtttgtcttagagttttgtttattttattatggctctgtgttaatgttggcttgcagaccggacggaaaccaagtggaatatgtggagcagctctctatacagctgcactttctcatggtatcaagtgctctaagacagatatc

SEQ ID NO: 179078 - DNA, 924 bp, Arabidopsis thaliana landsberg
taccggtaaagagaagaaacaagaagaaaactactgggtggttggcttgaatacaagcagtttgtactgtatagcttgcaaatacgcggagatgttcccacaggtatatattatcactcttgatattaaggtgtttacttatctggaaaatattggctcaccactattcttcctgccatttcaggtgacaccaaaaccaatccttaccatactagacctttctctcccgcttgcatcctcagatttaggagcagcatctctagaaaatgagttaatactaaagcagctgcgtttatacgaggtttttctctctccttattacaccattttaatttgctgttatttctccttttctggtcaagttttgttaagcagtatattgtgtcttcaaagttcttaactaccaaaatatatgtgaaatagtcttaagtttgttgtgggtaagcaacagagatgaatatataccaggagatttcgtgttcttgctataagtaacaaaatatgctgaaactagtatcaatatcgatatatgagaccatttccaatatattatttcctcctaatctcagactcaacgaagagtggacgatatggctttggtcggggtagacacaacagcacttgaagatgaagcttttgacctggaagtttctcaagataaatgcatactaaggctcatcagctcgtgttgtagtagtaagttaaatatatatctgcttgtgttgtgtgtgaactcatattctaagaccattactgtccagatttttacaacaagattctttacatctttcaggtgatagttttgcaagggccagtgaacttatggagcttttaactctagaaaaatcaatgagagctgcaataacactggttaccaaactcaagctttcttttttggcagagaaattcagcagcatactcgag

SEQ ID NO: 179079 - DNA, 54 bp, Arabidopsis thaliana landsberg
atggaagaagcagatcagttatgtttagctgctaaatccggcgacttgaaaaag

SEQ ID NO: 179080 - DNA, 189 bp, Arabidopsis thaliana landsberg
atgacagacccgtttattccagaagacgtatatcgatttatacaagaagagatcgatagcatcgtacagctcgagggaatgctgctgttccgttccaatcccgacaaggactgggacgcgactatgttgtccgagcgcctttatgtcacgcccgaggaagcgaaggcgctgatcggatatatgcgcggc

SEQ ID NO: 179081 - DNA, 19 bp, Arabidopsis thaliana landsberg
atggatgatgaagatgcag

SEQ ID NO: 179082 - DNA, 195 bp, Arabidopsis thaliana landsberg
atggagttcccgccaagagcgttttatccacggagattccaggcctctccggcgcaatacacggcggaggaaagtgctgcagcagtatcggcgccagatctccgagataagctcgcgacactggtcgatcgcaccaagaaagtgaaaatggcgtaccatcaactccaatcgcagatcgcgttcggccttgtcgaa

SEQ ID NO: 179083 - DNA, 479 bp, Arabidopsis thaliana landsberg
gcccttgtatttccaacatgaagggcactcgaggacaattgttgggattcagagacggttgcaaggaactacatttactcctcagtacaatctcctgattttggacccggctgatgtgagtatacatgaacatcagcttttactaacgttgaatgtgattaatgattgtgagacttgaatgtgaatgcagtttactagagctatagagatagcgcttatagagaagagaggatgggagggatatcttaaaagaggagctcacacactgaaatgccccgagtatcaggtctcagcttcgaactctgatatcaatcatttctttgttattttgcataaagctaagtgattttgtctgagtgtgatttgtgtaatattgtgatgatatatacatacagatgttgtacgttgataatggaattgctgatggagaggagttggagaagctcaaaaccattgatagtcactttgttgaattctaa

SEQ ID NO: 179084 - DNA, 354 bp, Arabidopsis thaliana landsberg
gttggaccagtagcttttatgtctgtggcaaaagcagagaagggagtagaggttgcaatcaaggaggctcaagaactctttatgtttcttgagaaggaagtcactggaaaagatttcttcggtggcaaaacaattggatttttggacttggtcgcaggaagtatgatcccgttttgtcttgctcgaggttgggaaggtatgggaattgatatgattccagaggaaaagtttccagagctaaacagatggatcaaaaatttgaaagaaattgagatcgtgagagaatgtattcctcctagagaggaacaaatagagcatatgaagaaagttgtagaaagaatcaaatcagcctaa

SEQ ID NO: 179085 - DNA, 329 bp, Arabidopsis thaliana landsberg
ctatgcccttgtttatgtcgaactgaaaaaccaaggagaggatgctttcaagcctgaaatatatggtgatactctgattattgaacgcaggatctctgattccactagtttaacggttctcaaggatcatcaaggtaaacaaattctttgatgttatcttcgtagtttgtggctttgtgcttctgcttgatttgtatatctacttacttgttatgtcattgtataaatcaagtaattgagttaagaggttttcttcttaattgtgttgtgcaggaagaaaaatatctagccgaaaggaggagctacgggaactagttgaacattataat

SEQ ID NO: 179086 - DNA, 1770 bp, Arabidopsis thaliana landsberg
  unsure (1)..(1770): unsure at all n locations
atgcatgaagaaagactccaggctgttgaggcgtttggtgattcccttgtaagccgaacatcttttccaatagaagtgaatatcgtttggttatctacaaaacaaagtttctataaagataatgtttcataacaaatgtgtagatgtgttgccttgctatatatggtgtttcttctatatgctcttgcgttatatctagacccttacagaaaaaggaaaagaaaaaacatgattgatcgctttttatgttttgttcattttgttgtttgtctaataaagaacccatcttttgccctttgaatttcagaacgttcctggccaattggagaaagacatcttattatctggtgaggtttaaaattctgtctctgatgaatatnnnnnnnnnnnnnnnnnnnctagatttttctgtcatctaattctaagtttgaataggttggaagagaaggataggtgcttctagttttagaaacctatcatccatacatcccttgcttcttattttcctgattttccaaaggtgattgcagacatgtcagcattcaaagcggcaaacccagatgcagtgtttgaggactttatcagatggcattcacctggagattgggagagctttgaacctaaaaccactgaaccatcagcaggccccagcaccgaaggctcgaaagatgaatggcctcctcgtggccgcctttctcaacggatgtctgatcaaggaaacttgtggagaaaaagttggaatgatgcacccgctttgccagccgatgaccaaaagcctctcctagacccgaaccgagagggagagaaggtctgtctctcattcatgctgatacctcttggagggttaagattgactcaatgtcgtgataaatttctcagaatgttcattacctggaaacagtacggcctcatcagcttcttgagcaaatggtctgcacagccttcagaggatcagctgacactcttaaccagacaaacgtcggtaacatgagacaaatgacctctaaattggagcaactctacctcatcatgaaatttactttgggggctctacaacgtaatatttttgtttctccctaattatccaaacccttcgagccatcttctccttccgtccctcttgcctctatataacagatatttggatgcaggaaacaatcttccggataaagcaaagaccgtcaaagacctgaaacgtctctgcatggtctttgaaaacgtggagaagttggtagcggttgcggcatctattcacagaaagttcctggacgcatcacgccttgctcaagtaatattcagcgacttctatggcgtttatgctccaacaatgggaatgagcgcaaatgatgaagagaacaaaagcaggacggtgagtcatcgttaaaccaacaagaatttctctgatgggaataaataaaagtatgatgtaacgcctgttcacttgaaacacaggagatggaagtaagtagacaggaagtgagtttaagagaaagacaagtggtgtcgaatctgttctcgcctccatcggctaaccagtcttggagaaaagtgctcagtatgggaaatcttctaaacggacacgaacctattctcagggagatcattttctccaccggagacgatgtcaacaacggaatccattacgcggcagctgctgatgtggcggccacaagtgaccggaagggagaagaaatcgagacacaccgaatgtatgtgtctggaacatctaacgatctccgggttgggctctctgttacttcctgcgattga

SEQ ID NO: 179087 - DNA, 195 bp, Arabidopsis thaliana landsberg
agtgtacagacatcgggctataacagcaagaggaagaagacgcagagagtgttatggatctgtgtcgttgaatctgatgaacagattcaacggtttcgattggagaatctcttggactcgagacatgaaccaatgagtttagaagtggcgttgaagcgcttcgtagaagcatctctcgttctggatctgaattag

SEQ ID NO: 179088 - DNA, 404 bp, Arabidopsis thaliana landsberg
atgcatattcaatcaaagaatgaaaatacttttacatcttcaaaccacgatagtagtgatcaaacacctttcaagtttcaacaaccaaggtaagtttggcgtaaatcgatttcatcaccataaaaatggtagatgtgatttgggcctcttattaaaagggaccatgtttgatttgatgtcttattcaacggtcgtaaatgcctaaccgaatgactatgcttggtcattgtttttagtttcgcaaggccaatagccattgattatacccttttcattgcctttttcgctttgtcctcttctttggtttagaatgttgttgttacgcgtttcttttttctttttctaggcacaattttgacgacactcgggttccagattttattgttcaacttttgtttttctag

SEQ ID NO: 179089 - DNA, 514 bp, Arabidopsis thaliana landsberg
atggagaacggccatgaggaaagattggcggagagattttccggattgggtttcgaagattcttctcttttgcctgagaacgagtttaagaacgacaacttgtttcaggtcatcaaagctgttgaagcagcagaaaccaccatcaaggagcaggtctggttctccgtctgtgtctctatttgaaattgtttcgattcgtggggaagtacttcctctatcaatccatttccaggagttctgtctaaatttctgtattgacatgtctgctttattagagaagtagttgtgaaatgcaaggttttattaagtctggttgatgcataggggataattaagtatctggagtgtaggatctgtctcttgtttgttagcatttgccaatgcaagatggtttttgtttgtcatcgaagtattttaggcatctaagaatgtgtttttatcctctaagcaggtggaagagaatagccgattaaaagctgaacttcagagaagtgctctggaattggctaaatat

SEQ ID NO: 179090 - DNA, 175 bp, Arabidopsis thaliana landsberg
cattaggtataaccggatgtgtcagcgtatcatttcccgaaccggattgttcaccatcggcaatgataggaaaagattcttttcggcaattaccagacaggatcatgagcaataatattaaatttaatagccgcataactatgatctgtaactatattaggtctatgagctcaag

SEQ ID NO: 179091 - DNA, 189 bp, Arabidopsis thaliana landsberg
atggagtacgagatggatgagtatgatgcaaaagtacacaagaacttgtcattgttgctatcaagttatacaaatgtaagttttcaaacaatttataatactttctgaaattaattttaaaaaccttttaaaatcttatcacaaccttaaccttctaaaaaccttttatagattttacaaattgtttaa

SEQ ID NO: 179092 - DNA, 360 bp, Arabidopsis thaliana landsberg
atggccaacatggctccggggacggggccgctgctgctgcagcacccttcgcatgagtcctcccgcagcggcatcccggccaccgccagccgccgcacgtccactgcgtccgccacccgcgccgccggcgtcgcccgcatggacgccgtcacctcgcagctcacatccctccagcgcttctggctcttctttggcatctttgtcgtcggctacgcctacggcctcgagagccaggtccgctccacctacgccccctacgccacctcgagcttcaacctgcactcgtacctcgccaccatcaacgtcctccgcagcgtcgtcgccgttgccgcccagcctaccgccgtcaagattgccgac

SEQ ID NO: 179093 - DNA, 1775 bp, Arabidopsis thaliana landsberg
aacaatgtgatcgtttcttctattccaataatcctcctgatgcagttaatcatttggattacttgggagtgcaggttgcatggatctctggcccatggttcctatctatttttgtcaacattattccttgggaatgcggtgagttcttatgttatgtcaaaggaaggacataggaagtctttattttccttttcttagctgaagttgtattttcaatcttgttgtttttgagtccagttctgcggatgtgggatgtgcttctctttgaaggaaaccgtgtagtgttgttcagaacagcatttgctataatggaactatatggtattttgctgatagaacttttgtatgtatcaagtgtgtgatgattgaattagctttgtggttcaaaggaaacaaaattttcagtcactctttgtatttccttaggtcctgcaattgttgcaacaaaagatgcaggagatgctattacttcactacaaagtcttgctagttcaacatttgatagtagtcaacttgttttgactgcatgcatgggttatatatcgacaaatgaagctagactagaggagctgaggaaaatacatagacccgcggtactagagattgtcgaggaacgaatacaaaagggtcgagtatggaaggacaaaaagggattggcttctaagttatatagctttaaacatgaaggttctatcttagatcatgaacaaaagtctactcaaaggaatgatggtgagaatcaagatgatgatgatgaatcttgttcgccttttctgaatcttgatggtgcaaatgttgattccgaagtagattctttaccagatcttcaagaacaggtgacttactcttttgattatgttttgagggatgaaaataacagagaaccatatgcttctatcaacaaatttcttgagtagtttattaagtatgaggaatatgcaactctctttaagtttcatcgataacagttattgtgcaggtggtatggatgaaggttgaactatgcagactgttggaggagaaaagatcagcggtgatgaggttattgttactctacttcaccttccatttctcaagtcctgagaaacttaaataactgatcctaatatgtgttattactctctacagagctgaggagctggagatagctttgatggagatggtcaaagaagataacagactggaattaagtgcacgggtatatttaaacttccttcaaacagtgttattagctcatcgaggaaggctcatagattgtttttttgggtgcatattgactaagaatgtatagttttgattaaactaaaaagtgaaccttaaattttacagattgaacaactggaaagggatgtaagagaactaaagcaagtcctttctgacaagaaagaacaagaaacagcaatgcttcaggtgttgatgaaagttgagcaagaccaaaagctaacagaagatgcccggataaatgcagagcaggatgcagctgcacaaagatatgcagtacatgtgcttcaggtactgatttggtcatcttcttactttgtatcttctaagatatttacttcttaagtaaagataaaacatccaagcagagatcagcatctttgattttagcttgatgatcctttgtggaaacacttaattaaacaggaaaagaatgagaagcttgtgactcaactcgctcaaatggagaagaaactagttacagcagaaacaacactcgaagctactttgcaatataaatccggtaaaaataaagcactatcatcatctccaag

SEQ ID NO: 179094 - DNA, 251 bp, Arabidopsis thaliana landsberg
atggagggtaaaggaagagttggatcatcatcgtcttcttccttcacagctcatctctttggccccaaggaaccttcctcctctgccaacttcaactccattttccctccttccaaggttcgattattcctctatagtttcttctgttactttttatgatggattcttgaaattcattcttcctttctcatttttttcgtgttttcagggaacagcaagaaacatcctaagctccaaacatgggtccctag

SEQ ID NO: 179095 - DNA, 1087 bp, Arabidopsis thaliana landsberg
atgtcttatattccaccacataagaggcattcgaaggatccgacaaagcctacccctgttccagattctcttgttacaaaattcaagaagaaccttgactttaagagtagcactagcagtgttaaacgcaacaagattatctattcaggagattccatttccaaatggtttcttgttggttcaaatggaattgaggacgatgttccttcgtatgttaagtttgtgcccttgtcctcagattctgtcgagtgtagaaaaggagaaaagccttcaatactgatgaacaacaatgtccaaaatggtaagaaactattagtagaccttggctatgtgtttgacaaaatgaatatcatctagatgctgaaataaacaatactattaactattttgtttgtgctattatcgtttttgccaaaagaagatgcattgtatctatgttgagtatggttttttatatgtttatattcagtgaatatgaatattggagagaggaaggatgagagaactcagtggctattagtagctgagaaggttatggaggatcttgtgttggcatatgagcgagttaagactgaaatgaaggagcatcatcatgtatcgagactggttgctcggtttggtaaaattttcttctatgggtaagcgattcaccgtctgatctcacattttgctgttttcaggaatgggtttatattttttctaacatatacaactttaaaccaggagtcaagctggtcctgtggctgaatgttcactaaaaaacttgaataagatgttctctactgatctcccaatgtcttacttacaacacataaaatctaatgttgtaccaagccatggattctctattgataaggagaaggaaacatacactgtgaaggtactcgtttcattttcttagatttagatctatatttcgaatgtcatttgaatgtgctaatttgggtttggcttctatttttaggtatcgcattattctcgtcctaatgcaaccatcaactgtaaatgtacccgtaaggaagatggacggctcagtatgtacaaggcaagtctcgagttttatgtgtgtagtgactacaaccaatag

SEQ ID NO: 179096 - DNA, 140 bp, Arabidopsis thaliana landsberg
ttcatgcatatcacaagtattcaacatgtcttgaaaagattgaaacgaagaaggtactcttctcggacccctctctttcccgttttcgacttaatatcattgaagtcacctatcatacaccaagcttgcttccgatgtga

SEQ ID NO: 179097 - DNA, 102 bp, Arabidopsis thaliana landsberg
gacgctgggcatgtggtccatgtggacgtccaggataacgtcgtccaggttcgttgggaccagggtctggatagtccatcagattctcaatactatttttaa

SEQ ID NO: 179098 - DNA, 314 bp, Arabidopsis thaliana landsberg
atgtctggaagagggaaagtgaaatcggagccgatgaaggttgtgttcattaacacacagtatgttgagacagatgctcgtagcttcaagaccgttgttcaagaactcaccggtaagaacgccatcgtcgccgccggtccttttgattcgccctctgctttcgacggccgttgttacgatggcggtagtaaaatcggtgaagataccagacagctccacggcggtggcggcggcggaggacgaatggggacgacgacggagttcgatagattattcaaagagatgcctcacatggaagaattgtataaactatg

SEQ ID NO: 179099 - DNA, 180 bp, Arabidopsis thaliana landsberg
ggactttccgttaatgtcgccggcgacggaaactcaggaatgtcggatctctgtgatctcgattccgacgaaaaggcagcaaatttgcagccgtgtcagccgcagagagcatccccttcttctcgtaaccgcagcagccgcagaaactccgacaaaaacgccatcgtttcgatacagtaa

SEQ ID NO: 179100 - DNA, 884 bp, Arabidopsis thaliana landsberg
atggctgtgaaagaggttatatgcaatgaccccaaggaaagggagaagtacaaagaagctttagtggctatcactgtggatgagtctctgaaacggtgagtcataactcataagaattcattcacactcaataccacttttcagctaaatggcattgtttttccttatcacgttaagcatttttcttcagcttttgccagcggattggaagacacgatttctggggaggagagtccgagctgctagtgagtttcctgcatttaaaattgccatcatagagaaatgatctaatgtcagtgttttgcttcaacaggttctctccaagctatgtaaacagcctatcatcgtctacatacctgagcacgaggtaaacgccctttgaatttgagtcttatgtaagcaagactaggtgtttcttttgttctagtaactgtattcagaacttgagttatttggtattgtttatctagcatggaagaggaggagggtatgggccgggttttataccgattcaagagtatggaagtgaatttcgaggaggctggggaaaggggaagacaaacaagaatgttgttaggcttctttacagtggtagaaaccactatgatttgcttcgttgaccaaattttttttttttgcctctgccgttgacatttattgatatggtcagagaaattgaaattttttacccattagtgtatgtgtatcacataaggagtgctttgggagacaaagttactgaaatttctgtcaatgaccttaaactctaagatggatttattaacattgttggacagctataaggtatttaccttaactgtaaggttttggcccaatcaaaagccaaagttcggtgtttatatggtcaatccgacaatgtgtaa

SEQ ID NO: 179101 - DNA, 67 bp, Arabidopsis thaliana landsberg
caattggtttgcatgtgaagatgatgggtctgttgaagggaagattgagtatgttgttgagaactaa

SEQ ID NO: 179102 - DNA, 90 bp, Arabidopsis thaliana landsberg
atgcccaaaagggccaaaggagcagtgggctcaatagaaataagcaaatttatctttttccgaacaggaaccggaagaatgaaggggagg

SEQ ID NO: 179103 - DNA, 80 bp, Arabidopsis thaliana landsberg
gctggctaaagcctaaagaacaagcaggaaccactattcgaaaggatgagatagaacaaggaaagaagaaacgaacgtag

SEQ ID NO: 179104 - DNA, 436 bp, Arabidopsis thaliana landsberg
atggatcctgtcagagacagtcgatccgagaagaacttgagtcgaaaaatctcggtatcaggtcacatccggcccataggccggggcaaccataccaccgaccatgccgtccacggcatccgcgacactggaacgacgcgcgcgctctgcttcgaccaatcgccatgcgctgcggtcagccagcagcgcggtcagcaccgcatgattgagcttgtggccaccgcgtaccgagcggaacgaggcaaccagcggtaacccggccagcgccagatcgccgatcacgtcgagcaccttgtggcgggcgcattagtcggcgtagcgcaacccttcggcattcagcaaatgggtctcgtcgaacaccaccgagttctcgaacgacgctccccgcgcgaacccggcttcccacagcttggcaaagtcgctgacgcagccgaag

SEQ ID NO: 179105 - DNA, 414 bp, Arabidopsis thaliana landsberg
taatcaattaccagatccaagtcctatagtaaaattccaatggattgatgccgaaaagggacccgatacctccccaataccacattggatcggccaaggaccctacggcaaagcctatcgctgcaagttcccagaaggtcacaaggtataaacccaaaagtcttgttctttttagttaacatccgaaactgaattactaaatttagcaactttggtgtaattaggttggagctgcaaagattcatagtaatggtatcacagatggtcttagtgagaccgtagcagagactacaacgttatatgcagctgatcacccaaatgtgattaaacttgtcggcaaatattatgggatggaaaaaagtgtcctagtctacgaattcatgcctaatggctctcttgaccaccatctctttg

SEQ ID NO: 179106 - DNA, 500 bp, Arabidopsis thaliana landsberg
attatagaacatattgaaaaaatctccactagtaggaaatgcagcttcatttcagcggcaagtgatatcttcaatgccaagatttctggtaccttcaagaggtattgcttgatgaaattcattaagaaagcaatataatactgctttagttttaattctgaattgggaatatcatttgcttttaggttttctaaccaggacatagatacaagatttctcatataagtgtgtctgcttttatacatgatccatactatagcgatacatatgggtcgttttgtaatccagatgtaagtagtattgtgtgtatatgtgtatatacagattctaagaataggatgctgcacattatattccctcagtattgttatttttattcatgtttgtctcctgttaagcttcttaagttagtttgaatttgaattaaccacaggagccagcttacccagggacgcaaagttttgcaaactcttgacatggtagcaaagctggttgatagg

SEQ ID NO: 179107 - DNA, 318 bp, Arabidopsis thaliana landsberg
atggcttatgataatgtatgtggtgaaaggcaaacactgcttgtggtggctaaccggcttccagcttctgcaaagagaaccggggaacattcttggtctctggaaatgagtcctggtggcaaatttgatcttctaggtaagtcataagacatatagatatatattaacatagtgtgataatgttcaatattttctgtgatctcttgaaggtggtgtcaccgatcagtttgataccaaatggattatattggctggcctggatttgatgtgtatgatgaagttgaaaaagatgcagtctctaaatctctggctgaaatg

SEQ ID NO: 179108 - DNA, 164 bp, Arabidopsis thaliana landsberg
gaagttctggaccaatgtcggtaatcctttcatgcacgaaaccacatcgtgtaatattagtttcgttccaagcgttactcaaatcggcgttctctaagcttcgtttacggtctttaccaattgagctaacgacacttggtaataaagaacaattcaccaactaa

SEQ ID NO: 179109 - DNA, 1367 bp, Arabidopsis thaliana landsberg
gtgggctatgatcctgagagtgaatcatatccatcatggttgctaaatcagccttattcccagttattacccaaggtgcaagctcctggaacgtcaataggcaatctgaaagaaagcattagaatgcaatttggtaagtttttcttacatctaacaagaaatcaatgaaaataaacatagatttttagttttcttttttgcttgaccaggatttccggatgattgcattgtctgcaccggtactactgatagcatagctgcatttcttgcagcacgcgcgactgaacctgggaaagcagtgagaactctgcaatactttcggattgctaattatatctcagctatacacttaaccttttcatgtgaaaaaactgtactgtgagggacatattgatgtttccatgaaatgattcttttctatgattatttttcgtaggtaacttcattgggttcgaccttagccatcaaacttctcagcaccaaaagagttgatgatgcgaggtatggagtctacagccaccgcctggatgacaaatggttggtcggaggagcttccaacactggtggagccattctcagacagctctttagtgacgaacatttagagagactgagccaagaaatcaatcctatggtcgcatctcctctagactactatcctttgcaaagcagcggtgaaagatttcccattgctgatcctaacttggctcccaggtttgtctgcctttctcatgttctcacaggtgtctcaaacgtcccttaaagcacgtaaaacacttttctttctgtgtgtattcatcggaaaatatgtttacctattgcagattacttccacgcccagaaagcgacgttgaatacttgcatggtatattggaatcaatcgcacgtattgaggtatgaacaatcatttccaagcggttgctactgagtttcagatgactcatggaaacagtcagaataaaatgatttataaaactccacatctgagcaggtctcttactttatatcaactttatatttctaagtccatgctcttcaagaatcacaagtttcaggcttaaactaggcttaatatagtttttgtttagttaccaataacgatcaagtaagtttggtttaaacatgagaagtaactaagagtgactcatgatggtgttgaatggtaacactatcaggggaaaggctacaagttgctgaaagagttgggagcaacggaggccgaggaagtgttgacagcaggaggtggagccaagaatgacaagtggataaagataaggcagcgagttttgggtttgcctgtgaaaaaagccgtccacactgaagcttcctatggagcttctcttcttgcgctaaagggcccaaaataa

SEQ ID NO: 179110 - DNA, 333 bp, Arabidopsis thaliana landsberg
atgtacgatcttggcggcgacatcaacggctcctccgcgagcctcatcatcattccagcgactccttcatccgacgtgtcaaactcactggctgagggtaaaaccgtaattcctgtactaaactccggcggcctgaacatctccgctgcttcggccgccgtgcgcctgatcgtgtccggatcagtggatgccggcaccggcaacctccaagcagaatcggagaaattcaaacaccggatctcccgcgcagagcaagaaccgccacgtcgtgagcacgtgcggccatatccgccgtcggataagttccgagccagactcgacgctgatgaatcg

SEQ ID NO: 179111 - DNA, 622 bp, Arabidopsis thaliana landsberg
gaatcatgtcgagaagttgaagctgtaatcagcgccttgaaaccacaggttcttatcctaacagttcattgaggactcaactgctatatcctcatgtgttattttactcacttcttagtacgtggctgatgcttgtaggctgtctttttggagttgtgttcaagtcgattgtctattctcacacctcagactgtgaaggtttgttgtcaagtcttataacatgtccagttcagttgatttcttagcatatatattatggtcgtcgacataacttataatgaatctatatctcttctatccatttttttttgtttattcttgaaaggtgcaatgttttggtttgacaggaaccaccaacctggatggaaatgatatacatgtggaagaagaaacacaacctatttgaaatagtttacggatatattcttgcaaaggcatgcttctgtggttaagatctactttgcttgtatcttaaatttccagactaataatatacatcattttcttatgtgtgtaggccgccaagaagcttgaggtttttcctggtgctgaatttcgtgtgggatttgaagaggcaaacaaatatggtggcagagtgtttcttggcgatcgctcagtacag

SEQ ID NO: 179112 - DNA, 127 bp, Arabidopsis thaliana landsberg
agaatcggaatagttctccaaatcttgggatcttatcttcgagagatcttctgcgcctttcttacgcttgttgtgcttctttgtttaaaacatttatcaatcctcagattcttcgactacagagaag

SEQ ID NO: 179113 - DNA, 230 bp, Arabidopsis thaliana landsberg
atggatagcaacataagcaaggatcttagcgtcttcttcctcggtccagagacctttcttgacattggacttgtcacaacaaggaggtcttcccattttttggtattcaaacacaggatagaagatgaagaagaagaagaagctgagacacgtctgaaaggacaacaacataggctgtatggaaatagagtgatgcaatgcaaaagctctgagagagaaagagagagaag

SEQ ID NO: 179114 - DNA, 101 bp, Arabidopsis thaliana landsberg
atggagaatacctccatcacaacaagctcagcaattccctttcttgatcaacactaccggattggtgcaatcttcaaacgcgttatatccattactagaag

SEQ ID NO: 179115 - DNA, 168 bp, Arabidopsis thaliana landsberg
ggttcaattgtgtccatggacgaaccctaaaagttgatgataagattaatggtggtcattatgatagcaagacgatgatggcattggcaaagcacaatgatatgatggttgatgacaaggcaatgcagttctcgccgccaccaccaccaccgccgtcacaatcgggag

SEQ ID NO: 179116 - DNA, 389 bp, Arabidopsis thaliana landsberg
gtggatcaagaggtgacaatcatctatatgatcatgtggccatcggaactaaggatatcttgatgggacgaaaggtatatacaatttacacaaataacagctacgagtactttatgattacttcagtaattacatattttgttcttaatgcagtgcatccatatatacaagtgttatcctgtgatgtcatgatttattttcacttgcagttaaaagatttgaaaccaaaaactgaatcgttgaaaatgatcaatcccaaaaagaagaacgggtttgagtattcagatcaagtatctagtgatttatctggacaagaagtatttgtcgatatgatggctagggactaccaaggcccaaaacccagaagcaagcccctcaaaaacaactga

SEQ ID NO: 179117 - DNA, 46 bp, Arabidopsis thaliana landsberg
atgatcacattgcgcatgtatgctcaacataaagaaatagacttag

SEQ ID NO: 179118 - DNA, 280 bp, Arabidopsis thaliana landsberg
atgaagtccgaatttgaaaaatatgatgtgtttcgagttctagtgggttaaacccgataaatagaacgatattttttgatgtaaactacctaaaatatgctaacaatcaagagtttttatggcactgatcaaaatgattacattatattggttacagttattaactagccatactataatctccgaaaatgttactatggaaacaccaaaagccaaacgcaaattgatcaaagttttctactgttcttcattacttcaaattattcaacataagacataa

SEQ ID NO: 179119 - DNA, 97 bp, Arabidopsis thaliana landsberg
ggcccgcagacgcttcttgaaaccggccttgcgttccggtgtgtcgagcggttcggcctcggcttcgcggccgaacaacacctcgacgaacggccgg

SEQ ID NO: 179120 - DNA, 176 bp, Arabidopsis thaliana landsberg
gtatgaacaaagagtcaagtttcatgaacactaaccgttttgatgaagtaaaaggaagagtagtgagattagctccagccttaatggattgtgttggaaacaaggatatcctcaagtttgttggcttgccatctggatttttcaatagtcggattgagtttaacctgcagcattag

SEQ ID NO: 179121 - DNA, 533 bp, Arabidopsis thaliana landsberg
atgaggcggctaccaccgtggatgctcggtggcgcgtcaaccggtgaagcagctgcacgcaatggttcacaacccgaagctcccaaaacaaagggtgaaaaacgaccaaaaagagtccaaaaacccaaagagaaagacttaaatctcaagtcagatgaacctaaacgagttcgcaggaagattagggaagaagctaagcgtagcccggaggtgattcaatcagtgactgttcctgaagatgatgatctcacagttgatgacttattaagctttgctaatgaggtaatgtaatacttcagttccacagtttttactattaaggatttgtgaatttacttaacaatgaatctcagtatgtccaacgtgatgaggaaggaacaagaaaggagcgtgaaagaagcttgtcagtgtctgaaactacgctagttctcgatgaaaccaatatgactacatcatctcaaggaggaaccaaagattcaacagcagaagacatgttacaattgctaatgggtcctttttacaagaaacgttag

SEQ ID NO: 179122 - DNA, 571 bp, Arabidopsis thaliana landsberg
atgggttgcggaggatcaaaagtagataatcaaccaatagtgattctctgtagagaacgaaaggagctgcttaaagcggcgtcgtatcatcgttctgctctcgctgtcgctcacctaacttacttccagtctctctccgacgtcggtgaagctattcaacgtttcgttgacgacgaagtcgtagctggtttttcttcttcttcttcgccggattctccagttcttacacttccgtccgacgaagggaaaccgacgaaacacaagaggatttctccttcttcaaccacctcaatttctcattccgtcatcgaagaagaagacactgatgatgattcgcatttgcatctaagctccggatccgaatccgaatcagaagttggatctaaggatcatatccaaattactagcactccagaacaagagcggtcaacggaatcatttccttccggttatcatccaacaaactatgctccaccggtttacccacctggttatccacccggttacccattcagttacccgaccggttattcatcgggtaattatcaaccgggttacccgaattacacag

SEQ ID NO: 179123 - DNA, 98 bp, Arabidopsis thaliana landsberg
gtggacttcgaaacataggaatcagtctgggagaacaagacataggagaagacagatttcgcacctacatgatagtgccagttacgcacgtactttat

SEQ ID NO: 179124 - DNA, 65 bp, Arabidopsis thaliana landsberg
atgacgttgaaattagaaaagcaagttggaaacaaacattcctgtaaatcaggacatgacccaaa

SEQ ID NO: 179125 - DNA, 112 bp, Arabidopsis thaliana landsberg
gtgcttgcacaggatcagtcgcaggctgcgccgtcgagtgccgagcaggatccattgggcgcattgctggattccgctccggcatcggacagttcgtcctcgacgcccgcaa

SEQ ID NO: 179126 - DNA, 94 bp, Arabidopsis thaliana landsberg
atggaggaatcttttgatcgctttggaagcaatcttgatagttggcgtttttgttgtgacggcttgtttatggaaatgggttttgacatgcggg

SEQ ID NO: 179127 - DNA, 78 bp, Arabidopsis thaliana landsberg
gatttggaactaaaatttgcctctgaaattattggagtaaaacggtgcaacgacggcgagtggcagatcctttggtag

SEQ ID NO: 179128 - DNA, 78 bp, Arabidopsis thaliana landsberg
caacttgctttaaaggaacaacaaaagccatatgttgatgatacttttgccatgtactggaaagaattaagagttccg

SEQ ID NO: 179129 - DNA, 378 bp, Arabidopsis thaliana landsberg
  unsure (1)..(378): unsure at all n locations
gacgttgaggagtgcctgaacgatacttggctgaaagcctggaacacgattccgccgaagcggccgcagagcctcttggcctacctggggcgcgtcacgcgcaatggagccttgaacatggtccgcgaccaaaagcggcagaaacgagctggggatcaatataccacctcgctggatgaaattggagagttatccggcgcggtccaggggcaggcagagctggaagggattgagagnnnnnnnnnnnnnnnnnnnnnnnnngattttctggcaggcctgccaaaagaaaaaagaattatttttgttcagcggtatttttacatggatgctgtcagcgatatagcggcagctaaaaggatgaccgtgtcggctgtcaag

SEQ ID NO: 179130 - DNA, 989 bp, Arabidopsis thaliana landsberg
ggaggaaaaggactccattcaacactcaattttcactccaagaaattcattggaatcctcaacggcattgacacagattcatggaatcctgccaccgaccccttcctcaaggctcagttcaacgctaaagatctacaagggaaagaagaaaacaaacacgcccttagaaagcagcttggactttcttcagcggagtcaagacggcctttggtaacttaatgtttccgcgaatactgcgagagtcttgagcatacagattcagttaatttattacacatttattttggtataggttggttgcataacaagattagtaccacagaaaggagttcatctaatcagacatgccatatacagaacattagagttaggtggacaatttgtacttcttggttctagcccggttccacatattcaggtaacatcccggtcccttagatgctcttgatttcttctatttaatctccagtttcgtggttttgagctttgaggcattttggttttttgtagagggaatttgaaggtattgaacaacagtttaaaagccatgatcatgtccggttgttactgaagtacgatgaagctctgtctcatacgatttacgcagcctccgatttgttcatcattccgtcaatttttgagccttgtggacttacacaggtaccatacaaaacatgatctttttttgtgtgcaaaacatgatctctagaaggaaatcgaaccagtggtgtgactaaatgtctgctaatatcattgtcggattctctctttgcacagatgatcgctatgagatatggctccattccaattgcgcgaaaaactggaggcttaaatgacaggtaaaaccaaaaacttaagaactgatctgatcttcagatgacattggtttcaaagatcatttcttttgtttcagtgtcttcgacattgatgatgataccataccaacacagtttcaaaatggatttacatttcaaaccgcggacgaacag

SEQ ID NO: 179131 - DNA, 431 bp, Arabidopsis thaliana landsberg
atcgcgggcgtggtcgcgtgggtgccgctcgaccgcccggacgagaccgccaccgcgctggacggcctctccggccgcctgaagctggccggcgtccgcgccctcatccatgatcagcccgaccccgactggctgatgcgcccggaggtcggcgaggggctcgcgctccttgagcagcggggcatctcgttcgacgtcgtggccgtcctgccccggcacctggagcacgtccttgtcctgtccgagaagcacccgggcctgcggttggtcctggaccacctcgcgcatccgccccttggcgccggcgactggaagccgtggcgctcgctcctgcgcgccgccgccgccaaccccctggtctgcgccaaggtctccgggctgtacccgcccgaaacgaactggaccgcggccgacatccgcccgttcgccga

SEQ ID NO: 179132 - DNA, 189 bp, Arabidopsis thaliana landsberg
cgggcagcctacttcattacgagtttacgacttgatgtcaaaccaagtaagactgaccaagcatttcaatggccaacaactactatgcacacctctccatcaaaggagatgttccatctatacaaaacatgtcaacccactactatagtccagtcttatcgtcggcgccagtacaatattatcgaatga

SEQ ID NO: 179133 - DNA, 741 bp, Arabidopsis thaliana landsberg
atgggcatcaatctcggaattgcgccattctgccactctgaaacggatcaagtagctcttgatgaggccgaaactgaaactatcttccatcttgaaggagcaggtgagaatatgaacttctagcaccttcataattttaattctttgaacaagaaactttttcatgtttatattcttagcttaaatttagtggcaccattcaagttttgagactaaacaagtatcttcaggaatgtggcttagtatttctaaaaaaacttcttgttataatgggaaagtaaattgaatacaattaagtactgccaaatgataactgcaccgttacgatcttacaagtgaatgtggtacatttttcttagttctgcttctgtggaagttattatcttgattgcttaaaatcatcatctcatggcattctgaatcttagacaaggaagcacgttaagaaacatgaaagcatatttatttcaaaattcaaaagtttttttaattgctgacattcacttgtaaaaaagagagattatgacatattcatagaaaaaaaaatgacatattcatagaaatgttttttaaaatgttgtaacctttttgagactgacgaaataattgtatttgggaattgaagatgtgttatctagaagaatggtctcttttggacagaaatcactcaaattctttgtccggagcaactgaagccttgaaagaaagcacacttcgtcttccagttagtggtaaagccgtg

SEQ ID NO: 179134 - DNA, 802 bp, Arabidopsis thaliana landsberg
atggccttgtctgcatttacgtgcacaacactccgtctagcgaaaattcaaaaatttcttatagactatcgggggatagaaccagttccattcacattatttactcgttttggatttggtaaagactgcgttacggggaggtataaactagtttggctgtaagaagaaggtaagatgcgaggttttggatttagaggaaaaaaattggagattcgtgaatactactcctcttgatcaccatcacatcttgtttgatcaatgaccagtatttgcaaacggatcacttcactggctcacaggagatgaagagggagatccaacaagagaaacaaaactcgtagttttcgatattcacacagagatgtttcaagtcatccaaacaccgccttttattacacgtaatgtctctgctgacaagattggtttatgcaatcttgatggtcgtctctgtatctctgagttgaagaaagattgcaagcaagagttttggtggagagttgaagacaacaacaacacatgggaaaagatcttctcggttgatttgcattctacttccacttggtttggtggtatcacctcgcggcctctcacgcctttaaccatttccaaggacaccaataaagttatcctctcacttacgtctcaagaaagactcgtcgcctttgatcttgatcctgactcaatggtttatcatttgtatttctctggttactatggcttagctgttccttatttgccaagtttttttatctccattcaaactttaactgagatctcatcctatttccaagatgttgcatga

SEQ ID NO: 179135 - DNA, 112 bp, Arabidopsis thaliana landsberg
agagagacaaagggagggaaggcaaaattctgacgtgaaaagagcaaagcaaagaagaacacgaagcaggcgagtggggaagcaaaagcgagtgaggaaccaaggagcgtga

SEQ ID NO: 179136 - DNA, 484 bp, Arabidopsis thaliana landsberg
atgatctatctaggatatagtagccccggtggtgacacacccgcccttgatgttatagctgattccaacaggactgattatatatgcagtcatctctgttttctccgtaaggccatcaagtgagtggattctactcttcttcctctcttcttctacttaatttatatatatggatgtatgatcaacaggaaaattgtctctaatgattgttcctgtttttagggagtctggttgcaatgtgaaaggatactttgcttggtgtcttggggataattatgaatttggcaaaggatttaccgtgagatacggacttagttacgttgatttcgcaaatatcactgctgatagagacctcaaagactctggaaaatggtataagaatttcttaaacggtacaaccaaggtccctgatgagaaccaaaatttcctccgctcaaggctcttcttcgagaaccgtgatcagaagaaagtcgcagatgcatga

SEQ ID NO: 179137 - DNA, 1349 bp, Arabidopsis thaliana landsberg
aacagaatacacgaaggacggaagtcacaccagactacagactttccgcagttgtcaatggagagacttttatgcatggccgccaacaggaaaggacctgttttaaagtgggagaataacgttgcatggcctggaaaacttactttaactgataaatccctctatttcgaggtaattattgttctttattttctaagtcccttgggaaggagcgagcgagtgaacactcttttctgtttgcttttatagatgaagaacacttcagttttacatatttcctgcatagatatgcaacgttagctggaattctaatcttttaaattttaaactttgtgaacccatctcttattagaatgttcttttggtgtagaaatgagaaccctaaacccttctcatggaaatactcttttggtttcagccagttgacataaaaggaagtaaaggggtcttgagacttgatctcgctggggacaagtcaacagtggagaaagcgaaagtggggcctctggggttttctctctttgattctgcagtttctgtttcatccggccccgggtgagttcatatgttcatgtagctgatcactgatatggttctgatacgtctctgacggtgccatatgtctgggtggtcgtttacctatatgctaatctgtaaaatattcatttaggttggccacttgggttctggagttcgttgaccttggaggtgaacttagacgagatgtttggcatgcaattattagtgaagttatagcgttgcacacatttctacaagaatttgggccaggagagggtgataagtcgctgtatcaagtgtttggtgcaaagaagggtaaggaaaaagcaattacaagtgcatctaactgtattgcaagacttcaagctcttcaatatatgcggaatttgcctgatgatcctatcaaactagttcagttctcttttcttcaacaagtagcctatggtgacatcgtatgtcaaactttagccgtaaatttttggggtggaccactattgaccaaagttgcagacaaacgaggtgatattgccagggcttccagagagtcctatgaaacttttgataacgtgtctgatctagatggaagtgtttacttgaaaaggtggatgagatctccttcctggggttcaactgcatccatgaacttctggaaaaactcttctctaagacaaggcttagttctgagcaaacaccttgcggttgctgatctcacacttgtagaaagggcaacagaaacatgtagacaaaaatacaaggtggtcgaaaaaactcaagccactattgatgctgcaactatcaaaggaatacctagtaacattgacctctttaag

SEQ ID NO: 179138 - DNA, 301 bp, Arabidopsis thaliana landsberg
atggtctgtgtccctgttacctgtgaccaaggtgtcagtttggattgtcaagggatttatgacagcaaagtatcaggaatggagtctgttgaatccatgaaaagcgtttctgttgtaatcaacaataactcggacagtaccggggtgtcatgtgaggatgcttatgaaaatgttgtcggagcctcccataacaacaaggcaaaagacagtgagatttccagcatatctgtttccgcagaggatgattcttctgacagattatttgatgttccactaaccggagaagaaaaccactcagaag

SEQ ID NO: 179139 - DNA, 148 bp, Arabidopsis thaliana landsberg
attatcagttattcaaacttgtcgttatgtaattgttattgaagtaaacagaaactctggtgcgatgcaggacgttactcaaactgagtcacttcgatcggatgtcttaattcaagcaggacaatctagctttgctactgaaatttga

SEQ ID NO: 179140 - DNA, 96 bp, Arabidopsis thaliana landsberg
agccacaaatacatcgatgggaaccataccgccgtcgacggaggagagtacctactcactcatgaaacttctttaagaaatcttgacatgcgatga

SEQ ID NO: 179141 - DNA, 611 bp, Arabidopsis thaliana landsberg
atgctccaatctcaacattttagcgattatggcttcgatccccagatccattactttcaggttctcttcttcttcttcttccacattgttcctagggtttcgatataaagctaactctgtttttttttgtttttgtatatcttaaggttttggaagaagcaaagaaacacaagtcttcctccattgacacatttcagttcaaacttcaaaaacctatctcgaaagacgatttgatccgaaccactctccacaacaagaacaagaacaagaagcgttggttatggtgcaagaacgctttgttcttctttaagtggcggaaatggccaatctcctctgccgtcgttggaagatgctccggcgaaaacgacggagacaatgagttcgacgatcgtagcgatgttcattttgctagagctagaaattttcgagctggttcgatatcaggtccggtttacgtgacagagagttggagcggttcgagtacaccataccggccgatgactacgacgtcggcagttcagtatttgagtctacgggagcttaatatggagcgacagcagaggatcactacctcttcttctatgtccggtccaatttacttggtcacgtga

SEQ ID NO: 179142 - DNA, 553 bp, Arabidopsis thaliana landsberg
tgtcccctgtgcaacaaaatatgtagcttgagagatgtccggaaaatctatgcatcacgggttgctgcagtagatgatgaagcacacaaggtcttacaatgagtgttgtttttccgaaatacattcgtaaaagcaaatcatagtatcaaaatctgatattcttttgttgatatttgcagagaatcttatttctggaggccaagttaaggtcaattgaacagaaggtaggataaatttactgctcagatagttcatgatattgctagtattagtccgcattattttgggcttcgttatttgaaatgctttcaaatcattcgcaataagattttcctcagtactaaaacctctttatgtgttcattatataagtcgtctatgtaggttatgtctgtgttagatgacaggaacatatgtgtgtagcccgtcgtactagtattgtagcttttaatatgttcttatttgtcatgcagactgcgagttggagtaacaaagaagttcaatggaaaataactgaagctgagctacgattagaagttactaagctgaagaag

SEQ ID NO: 179143 - DNA, 157 bp, Arabidopsis thaliana landsberg
gacgctgtaccggagcttacatctccgactaagcaaacttccggaagatataacagaatttgagttgaaaacatataataataaccctaacgtgatagtcacggaaacgacaactagcaggatcaatgatttcgacttggccttcgtgactgtgtag

SEQ ID NO: 179144 - DNA, 231 bp, Arabidopsis thaliana landsberg
tattgtatgagaaagacaagaaaagggccacaggtgtggaagtgctggatgcggaaacgaacaagacctatgtatataatgcaaagatcatattcctgaatgcatctactttcaataccacctggatactgatgaactccgcaaccgatatatggcctgatggtttgggcagcagcagcggggagctgggtcataatgtaatggaccaccacctgggtgtaggagccagcg

SEQ ID NO: 179145 - DNA, 105 bp, Arabidopsis thaliana landsberg
gaacaagaaaaaatcagaggcggagaaaacctaggatcgatagattcacctggcgaagcaactcgtgcaattgaaaacggattcgtcagccaaatccagaaaaag

SEQ ID NO: 179146 - DNA, 161 bp, Arabidopsis thaliana landsberg
ggacgttgtatttgatgaaacaaaacggaggcattggcaccatattaatttcggaacaagatcaagatgaaggtttcagctttgcgttcggagaatatggcaaccgtggaatccaagaaacaagagaagaagttgtgaccgagcaaaccaaagaaggataa

SEQ ID NO: 179147 - DNA, 842 bp, Arabidopsis thaliana landsberg
atgacgacgacgagggcgaagtccaaattccagtctctctcagcatgtcgcttcacgccgttaccggaacccaatacctcaccgagcacttactccaagactttaccaaaacccaattcctcgccgggaaccgacggaactttcccaacaccgtttcccttagctgtcatcactccaatcaaaaccctaaaatccgtcacattatccgattggtggctaacaaagaaaggcaaagatttgtgtattaaaggattcgaatcaaatggtgcatctggagtaagactgttttcatcaggaacaatctcaaagcgacatgaaagtacaactcttgaagcaattgatgggattacaatttctatcaatggtttcatcaatcgatctcgttgtctagagaatggtatttcgattgaggtttgtaatcgttttcgtttagggtttccttatgattgggaagattacaatgaagaagaagaagagaagaagaagaagaatgttgatatttcgtttgatgatattcctgtgaataggtatcaggatctttattctcttgagggttgtttgaaagataagattttggacgatgttgttggtagtttaagagatttggtttgtcagaaatctgataaggcatgtgagaaatcaagagttggtgatgttgatgatgatgatgatgatgatgatgataagagtttggtttcgagggttgtgggagtgaagactagaggtatgcttagaaggagagaagagtatgaagcttctattgggaaaagagttgcgaccatgtctgggaaaagagttgtgacagtgtccaagaagaagaataggagaagaagtttcggttg

SEQ ID NO: 179148 - DNA, 573 bp, Arabidopsis thaliana landsberg
gtattgcttctaagcagggcttcaagtgtttttttaaagaagatggttttgctcctcttaaaccatctcccaccacacatgtaagttcgtcaatatatgtgcatcatatatagcggaattatttttcgataacatgaatacttgttgattactgtgcatcataatagaagttatgcgataacgttttgaaagagtgaaaacatgaataagtggtatgcgatccatcaccattatagctatgtatgtttgataacgatatttggataagaatggttataagttgtaatattggtttcaacatatggtggattggtgattataaaaaaattgaatacagaaattttattgaaagatataaatgaataattttttaacaaaaaaaaatatatataaatgaataaattataatgattcatcatctcactactttttttttcttggtggatctaggagaaagcaagtactaaaggtgacagagatggagtagagtgcaagaattcagacagtgaagaagaatgtcttgtgaagaaaacagtagctgctcacaccgattacatctatacacaagattaa

SEQ ID NO: 179149 - DNA, 529 bp, Arabidopsis thaliana landsberg
gttttcgcatttaatatttcactttcttgaaatctcctatatttttgttatatatggtcgtcggcgatgccaacggctggtgaatgtagcgaaacaatgcttaacggcagaagcatcctacgcattagaagaagctgtgaacgttgcacgtcgaagaggacactcacaaacgacgtcgcttcacgctatctcagctttactctctctaccaacctcagtcttacgtgacgcatgtgctcgtgttcgtaactctgcttactctcctcgtcttcaattcaaagctttagatctttgcttaagcgtttctttagaccggatccagtcgggtcatcaacttggatctgatgattcaccacctgtttctaactctctaatggctgcaattaaacgatctcaagcgcatcaacgtcgtttacctgagaacttcaggatctatcaagaaatgtcacagagtcagaatcagaactcactttcttgtgtgaaagtggagcttcgtcagttgattctttcgatcttggatgatccggtt

SEQ ID NO: 179150 - DNA, 273 bp, Arabidopsis thaliana landsberg
ttttgggatctgcgaactctctctcatctgtcgatggtcagatgatcctagtttgatctggtgcattagcaaggtattagggcgaatcagccatgcaagtgatagtccagcagaacgctatataggcatattatactttatatttttcctgttacttatacttctatatgtttttacgatttgtttaccgaaaataacggactacgaccccaccacatgtctggatgctgaacttctacttgatgatagtcatgccgaaactcataacagttg

SEQ ID NO: 179151 - DNA, 454 bp, Arabidopsis thaliana landsberg
tgctccatgatgcgaacatcatcgtttaaagggcagtctcttgatgatcatatactgagcgcattgaatgtaagaaaagttcattctctgatattttctttggttgcatggaaacctttttgttccagtcacagatgtttgcttttacaggtggattgtatggcttcagaacgtcctgctgttatttctccttgtcttaccattttggagaagctaagcaatcgattttatgatgaactgcagactgatgttcaggtcagtcttagtaacatagtgtaatataaatgcaatatccttctacagccggatactctacatatgtatcaggatcatcataataacttgattgtcttttccggatcagattcgtttcttccacaaacttgtgtctatgtttcgaagttcaaatggcagtatacaaaatggtgccaaagaagctgtcttacgcctgaag

SEQ ID NO: 179152 - DNA, 37 bp, Arabidopsis thaliana landsberg
tgagcggtcctttcgacatgcgcagaccctgactttg

SEQ ID NO: 179153 - DNA, 728 bp, Arabidopsis thaliana landsberg
agagcttccttgcgattttggcaggaaattctgagacagagagatacggctattagagctgcctcacaagctttgttagaggcttcagctgctgaaagattgctcaaatgtctaaggtacattcctttaattgagacaaaactagttgtaccttcttgctcaagcaatgtttctcactgaaatgatataataggtcatactctgagctttcagacaggagaaaccaacatcaagaaaatcaacagccaccaatccaagatttcttgagtttccaggatgagttaagcaagagcaggctcatcattcaatcactatcaactgaaaaaacagagcactgcaacgcaaacatagtcaaaacaggagatgagagacgcgaaaaggcgactcagtggatcaaatcagcattggctaccgatctcaaactggtttctttatccgcaagcaagcctacacagagccccgggagaaagggtcttaccctaattgctcaagaaagtgataaccgtgaaggtaacgcaagcgaaagcaactcaagattgggagagataaaggagaggttaagcagagcatcgagcgaactcagaaactggcttaaggaagaaggaagaagttggtacctaaaccgtgttgagaagtatttagatgagatcagcaatggaacaaagtggagagagatgaggagtgaagaagtaggggaaacaatgtatcagataaagcgagtgatgtga

SEQ ID NO: 179154 - DNA, 108 bp, Arabidopsis thaliana landsberg
attcgaaatggggctgctagtcctccgtgtgaccggaaagtctccgacaatgactggctgtttctggcggcgacaacaataactaatttttcttctgatttctcgtaa

SEQ ID NO: 179155 - DNA, 196 bp, Arabidopsis thaliana landsberg
ggagaaggtgattgtgccgaaatcaaaaccgtatatttcgttcataggtaatgagagctatgcgggagatacagtgattagttggagcgataaagcttcagaccttggctgcgatggtaaagaactcggcacttatagaaccgcctctgtttccattgaatctgatttcttctgtgctactgccatcacttttgag

SEQ ID NO: 179156 - DNA, 2200 bp, Arabidopsis thaliana landsberg
cctgaacatggcattcctgatggtggtaactttgaacaactcctgcctgacccaatactgtctgacccaaccattgagaaaatgtcagatgatgtatcttcctcgtcccatcaggtacaggagtacgtactactaattttagtgtacgtacagattatttctaatttttattctttgcatttgtataggacgttgagaaaggacttggtggtaatcctgaagaagacgttgttgctcctgggtcacaacagttggaggagccacaatcaccggaggtcaaggttaggcaagaatttgcttttgaagttacagaagatggcaatcccagtgtacgtacaatgtttttgaaatctgtttcgcacctttgaatgttttgttgtgagtttgactaatagatggccatccatctccatataatgaggtcaggctgaaacaatttgtggggatggagaggaagctttgaaggaggctaaatctccaagcgttgtagatgaagccttggaggtatttgtaacgcttatttgccaattacagatataaccaattatttggttactaaatctgaaggacactgcgttacctggatttgttcctccgacgactgtaggggattttaattatgaagcgaatctcagtgacccgtcttcaccaaccgtagttgttagcaaggtaagttcctaactaactataacattactgtcggagatatcatttgatgtttgttatattgttttcattaggtgcttactcaattgaaggacgatattctcgcagaaaatgtatctaaaattcctgagaaggttgtcgtccctgaagaggtaatttattagctaactattaataacattactgtcggagttataatttgatgtttgttaaattgaaagacgatgttctcgaagaaaaagtatctgaaaaggttgccatccccgaagaggtcagtatattatcccgtttacctattaatatttcaactagacgggcatatagtgtacgtactcttgtagctgtttccatgaccaatctaattatatgattttgtgcttgcagacaggaaaggaggacgatgttgtcgaagcgggtgtctctaaaactgaagcaatcgttgctcccgtcaatgagaaagagaacaaaagtgtaagacggagagttaacttctccgatgacaccaaaaatgatgataaaaaagatcctgatgtaacatttgttgaggagagagaggcaggcccggaggttttggttaaggctggcgattcgttgtacaatcctttggagaaggctgacgaagctaaattccagaaattatgcaatataatgcaaggagaaaaaaggtatgcatctgtgcattcacacaattatctgtttgtttgtcaatcttatatcaatcataactatttcatatgtcttactaatttcaggtgccatactcttttcggctttcggaaagtggacaacgaattcttcacaactctagccgaggctaatgattggattggctcatacgtaagtgaccattaattacgtacactgttgtaattgtacgtatatgtaataatatgtttttgaaagtacgtacataacatcagacttttatgtacttttcagcacatggaaatgatggcactcttgatgtggcataagaacggggagcatatgaagagaaatcggtatgtcgtggtggatctcagactcactttccttctgtcaagctgtgccactgcattcagatcctgtcgtaaacccgacactttcaaatgggacaaacttctcacacggtttctcaagggagaatgccttaatcgtgaaccacagctgcattggatcagagatgtggacgtcatatttgttcccatgaactggaaagatgagaagcattgggttgggttggctatatgcctgcaacgtcgtgctattgaaatcatggatcctttgcgttcgcttacgcgggagtctgtggttaggtcacgtatccttccaataatggagatgctaccgtacctagtcagagcgacatgcaaagattatctcgataagccttatcccgtgactccttttacatacataaggaatcaacgtctagcacagaatccaactaccggagaatgcggtccgtacgcgatgaagtttattgagttgtacatgcttaacactcctgttgaggacaggttttcgattgaagaagatgatatgtacaacttcc

SEQ ID NO: 179157 - DNA, 875 bp, Arabidopsis thaliana landsberg
atgggctgcaattgcaccaaaggaacacggcctgataatgataacgtcgataacagcaacagcattgtcagcaatgtcaatgtcaaggagagaagaagcaagcctaagaaaacccccaagaagaagaaaaaatcaaaatctgcttcttcgagcaaagacaacaatgtaggattcgaggaacgaagcaacgacaataaagaagcctccttgacgttgttgatacccattgatgccaaggatgatgagtccgagaagaaggtgaatctcgagagaaagtcttctagattggtgtttcagagacggcccaccggtattgaggttggtgccaacaacatagggacattgcagcaacctaagatgactagaatatgcagtgttagtaatggagaaagaggagctcaggttatggctggttggccttcatggttagcttctgttgctggcgaagctatcaatggatggattccacgaaaggctgattctttcgagaagttggaaaaggtaagttctttttgttcattataactattgagatgatttttgattgattgtcttgtctaagttgtacattgttggattgttactgttagattggacaagggacggatagcattgtgtacaaagcccgggacctagagacgaaccaattagttgcactgaagaaagtgcggtttgctaatatggatcccgacagtgttcggttcatggctagagaaataatcatccttcgaaggcttgaccatcctaatgttatgaagcttgagggttcgatcacttcaagagtatcaggaagtatgtatcttatatttgaatacatggaacacgatcttgctggcctagctacaacccctgggattaacttctctgaggcacag

SEQ ID NO: 179158 - DNA, 77 bp, Arabidopsis thaliana landsberg
atgcggtttaaactcaacctgaaccgagtatataaaaagtggtttaaagatggcacacgtgcatttcttatgtcatg

SEQ ID NO: 179159 - DNA, 1120 bp, Arabidopsis thaliana landsberg
atgtccctttctccgctgcgtcattcccgcgctttatcagctgcaacaactgttccgataagctcatccttcacgtgggacgacgtaatcgagaccggtcgggcagagtacaactcttccgatctcaccggatttttcgagaaaatcaaccgctgcaatcgcggatccgtaagtcctactaaatcgaatggttttagggtatcggttcctaggagagtgagattgaccaaggaaagctgaaattcaataaaaatgttagcttttcctcttttctatttataaagttcaaaacttttctgctatacgtttttcaggaaaagttaggtgagttcattccatttgttatagaggaacaaatcgttggttatattcataaaaggtaactgttcttgcttctgtgattctaaacttgaggttgtacaaattagacttctcttttatgcattcattcacaaactagttttagcagaatcttggattttgatgcttgtttgtctacattgaatagatttacggagtacttgagggagtttcatgatatctttacattttcacaaaatggttcttgtcctgaccgtgttgatggctatgtaacgcttaatctgatgcttcaaaagcctgaagatagaaccagagcagttgcagatgtgatcaaaatattgggtgacaaaggaatcattccaggaatacgtaatgaggtatgggtctatgttttggtttgatctcctaactctctaatgatgcttcatttatgttgataatttttctttctcaccagctgtatcctgtgaaaccatcgtttaatgccccggtctttttttctctagagcgtgctgctgctccttatttcggaattaaggtaaaaccacactccactgaattggttaagcttgtagccatgaacaccaaattatatgctttgccatcaatacatgtgtaccgttttcttttcctggttttgctttgcgttccttatgcgagttatctgatatagggttacggagttcacatgaatgggtatgtagaaagagatggacagaaattactgtggataggtaagagaagtctctcaaaatccacgtatccaggaatgcttgatcatctggttgctcgagccttg

SEQ ID NO: 179160 - DNA, 271 bp, Arabidopsis thaliana landsberg
atgaacaccgtgcacgccaagttgtgggcatcttttgcggtgctgctgctgacggcatgccagagcaacgcgccgcgtatcgagcctgaagccgcgccacgcgcggcggccgcctatcagtcggcgccgctggatcagcggcccgtctaccatgtgcaaggtgaacggtcgcagaccacgatctacgtctatcgcgccggacgtgccgcgcgcttcggccacaaccacgtgctgacggtgccgcagttgcaaggctgggtcgcggtgccgg

SEQ ID NO: 179161 - DNA, 125 bp, Arabidopsis thaliana landsberg
gaatatcacttattctttggaagtgcttaatctacgaaacaacaatttcagtgggattcttccagatgtgtttctcaatgctactcgtttatacacacttgatgttagccgcaaccggttggaag

SEQ ID NO: 179162 - DNA, 107 bp, Arabidopsis thaliana landsberg
atggccgtgcctgtgcctgtgaccagctcctgcgctcctatgcccctgcagccggtggcaggtggagacggcgtggtcgatcagggaaccagggggcagggcggcag

SEQ ID NO: 179163 - DNA, 174 bp, Arabidopsis thaliana landsberg
aatagccgcaattccccgagcgccagagaaagcacaaatatccccacgattgctcaggatttcctcgaaagcttcggcttctccgattatccactcaacaacgccctcggggtcgcctcggataaaattttcctcagaggaataagcacccactttggaaaagctagtttttaa

SEQ ID NO: 179164 - DNA, 96 bp, Arabidopsis thaliana landsberg
atggaaacggatttctcgttggtgcgtaaggaggaggaagaagaagaagataacaggaatgggatgagttatttgtcaatggagatgatgaagaag

SEQ ID NO: 179165 - DNA, 52 bp, Arabidopsis thaliana landsberg
atggccgcggtggagagcgcgcggaggccggcttgtcccccaccagccacag

SEQ ID NO: 179166 - DNA, 204 bp, Arabidopsis thaliana landsberg
gaattgtgcatcgccaagaagaattgtaccatcgagtgcagccagaacaatgatctacttttgggcaagacatacattttgcgaaagtccaagaacagcatcccaatctcgccatgcataaaattcaacgtgttggtgcaagatatggccctgatggccatcctcaaccaacacggccaatttgccggcttaggcctcgctcag

SEQ ID NO: 179167 - DNA, 121 bp, Arabidopsis thaliana landsberg
ctttcatcacaatccaatcgtcgacgaagagatcttgagtccgttgaccggtaaaaaaccgcttttgttgaccgatcgcgaccaagtcatcaagaaagaagatttatctttaaaaatctaa

SEQ ID NO: 179168 - DNA, 144 bp, Arabidopsis thaliana landsberg
aaaacgaagccgagaagagctactgatggagagaagattaagcatgcgaatgcagaaactaatggaactctcttggccttcttcttattcatctgctactgcattcgagctctcactgtcaccgacgacgaacgagaaaactaa

SEQ ID NO: 179169 - DNA, 90 bp, Arabidopsis thaliana landsberg
catttgacttcatttgattcgagttggataatcggaggtcttttgctcgctacacagtatttgcttgtttcagtctggtatattcttcag

SEQ ID NO: 179170 - DNA, 119 bp, Arabidopsis thaliana landsberg
aggattttcacatttataaaaggcttattggatgcctaactgattctatccgaaattcattcggttcctataaagtaaaaacgaatcttaaactctcaacccaaaatctcaaaatttga

SEQ ID NO: 179171 - DNA, 782 bp, Arabidopsis thaliana landsberg
atttgcaaggacaaagttgaggcagaggtgtggatagctggcctaaaagctttgatatctggtcaggctggccgctctaaaattgacggctggagtgatggaggcctttctattgctgtaagtaataagcattcctaaagactatagatgtttgcaaatgtatttctgaactttgtttttgtttcaatttcatcatttccaggacagtagagacttgacattaagcagtcctaccaacagctcagtttgtgcttctcgagattttaacattgctgatagtccctacaattcaaccaattttcccaggacttctagaactgagaattctgtcagttctgaaaggtcacatgtggcatcagatagcccaaatatgttagtacgaggaactggatcagacgcgttccgggttagtgtctctagtgttcaaagcagctcaagtcatggttctgctccagatgattgtgatgctctaggtgatgtttatatatggggtgaagtgctatgtgagaatgttaccaaattcggagctgataagaatattggttatcttggttcaaggtctgatgttctgattccaaagccattggagtccaatgtagttttggatgtccatcacatagcatgtggtgttaagcatgctgctctagtctctaggcaaggtgaggtttttacatggggtgaagcatccggaggacgtcttggccatggaatgggaaaagatgttactggaccacagcttattgagtctctagctgcttctagtattgattttggtgcctgtg

SEQ ID NO: 179172 - DNA, 319 bp, Arabidopsis thaliana landsberg
atggtttgtgttttgctttatgaagagcctcagaaaagtattcatgagatagctaagactttggttggttctaaacttcctgtaaaggtaaagttttctcctttggcttgttttgtgatctctatattgtttataatttgaggtaaatctttatattaggttgttcaagctgatgaggaaaatagaaagttgattttatctgagaagttagcattatggccaaagtattcacaaaacgttaatgttggggatgtgtttaacggaagagtaggttctgttgaggactatggtgcctttatccacttgcgttttgatgatg

SEQ ID NO: 179173 - DNA, 890 bp, Arabidopsis thaliana landsberg
atgctccccgggacgaaggatttccctaatcctgatgatctggttctaaaagagggatatcagaagtttgccagatcatcacttgaggtacgcgctagttacatgtcttcctgttgcctaatatctttgtattttggatttaaccatgattctttttccagaccgccgccctggccaacgatctgattgcgacatatgatcgcaagttgaagctgaagctcgccgacagagaggccttcgataacctgaagaagtgcgctgaccaggcgaaagccatctatgccaaagacatgaaggagatggctgcattgagagatgctgccgagattcataaggcggagatgagctcgttgaataacgaggtcaagaggctcaatagtcgagaagctgatcttcagaaagagatcagcgatcttcaggtcgcattggttgctgtaaaagagcacggggagagagagtgcaacaggttgcggagtgaccaagctgctaatgtcgcccgtactacaaagaaagcccaagctcgtcttgataaagtgaaggcttatctcaaggagcaagaggaccttgtcgggccaaaggtggatgttgagaatcaagccaaaggtgctgaggagatagtgggcattctgatgcagagaggcgcgaagattgcggcatccgaactcagcggccttaaggagttaaccaaaagggcgactgacgaagttaatgccttgcacgtcatcgagctcggggatgatgacctgaacatgtccccggatcagctcggtttttcgaggcaagcctcccaaattgctcctgtggcggaccagcacgactcaaatgtcgacctcgttagcggaagcgatattcgacgtgtaagcgttgaagaaacaaaccagacgacttga

SEQ ID NO: 179174 - DNA, 561 bp, Arabidopsis thaliana landsberg
atgggagcagttgaattgaagggatgtcctagtccacgttctggtcatcgtatggtaagtctttgatgtaccctgagttcctgaccaatgtgccttagaactaaaaaatgtatgtcactaacatgctactggattaagtagatagagtctgactttccatatactattcttcctctagctgatacacaagtggtgactttggcagtttattaatcaatgaccaagcacagagactaatagcagatatttaagatgatagagattatatcttcacatgttttcttgtatttcgtacatcaaggtgtgaatctggaaggctctcctttatgtgctgcttaattttcaatctatcttctgtgatgaatatatgattctgcattctgctatactgagctgtcttcgtaggggagttgtactactttcattatcaatctgatcctgccttcccttttgtaaccaactcatcaagttctcatcctgctctgctataaactactttttcaggtattatacaagcacaagatcataattgttggtggcttctatgatactctacgtgaa

SEQ ID NO: 179175 - DNA, 606 bp, Arabidopsis thaliana landsberg
gtacatagaaagattgatcttagactacatcaaattgggtgtagtcagtgatatagcttccccgaagttagcggttttcgaaatctttttgaagcggtttcatatgatcgacccagaagattttggtactacgacgtgacgagtggttttcagaagaacacatcttctacacgtgtctttaggctaaattatacgtgcaaatatttttgctaacttcattatgatttagttatttgaccgttaatttccgcttgtattcctctttgagcttgaccattctgttttttatctgcttttggtttttaaatgaaatcgtttggtccgtccacaaaaaaaaaacagtacctatcctctaagcccggcccatcccggcccataccggcccatattttagtaattatggttcctatcttcgtcttcttcgttcagaaatgggaagcgagaaccatagatttacgtcaagatagctttttttctatcaagaatcgcaaagctatttcgcgtaacattacaatcgtcgttcagaagaaacgaattgggtttgacaaagcttcgatattcagggagatttctgggttaatttgtgaaagaatcagagaaatttag

SEQ ID NO: 179176 - DNA, 210 bp, Arabidopsis thaliana landsberg
caacagaacaaggagatgatgctactatgttcggaatctccgattcataaccaccccataacaatggctgctgctgtcgcaaagaagaagctagaagagactctcgctcaatatctcaatattgatcggctgctgctccgaggaagaagtagaagcttcgtcatgatgatcctttttggacttcttggacttgataggctgctgctctga

SEQ ID NO: 179177 - DNA, 107 bp, Arabidopsis thaliana landsberg
ggaccacacgcttttaagattacttttagagaaacaaaatattgaaaagcttgtgagtgatgataatcgatcggagatggggcaaaaatatgagagcgacaaggaac

SEQ ID NO: 179178 - DNA, 1081 bp, Arabidopsis thaliana landsberg
atgaatagagctcatcgaattggacagtccaaacgacttttggtatacagacttgttgtccgtgccagcgttgaagagcgcattttgcagctggccaagaagaagttgatgctcgatcagctttttgtaaacaagtcgggatcccagaaggaatttgaagatattctacgctggggtactgaagaacttttcaacgactccgctggtgagaacaagaaagatacagctgaaagtaatggaaacttagatgtaatcatggatttagaaagcaagagtaggaaaaaaggtggtggcctcggagatgtttatcaagacaaatgtacagaaggaaatgggaagattgtttgggatgatattgcaattatgaagttgcttgatcggtcaaatcttcaatctgcctccactgatgccgctgatactgagtgggataatgatatgctcggctccgtgaaggtgtgaaatcatattcatatgtttttctttctaatatgacatgttaatatgcatgttttctagtcacaactaactgtaaggtttccagatgcaagtttttcttatagctgattaacaaaggaacagtgagacaagtctcactagatttactcaaatgacccttaaatacctaggcagcttaaactgcatagttgaattgcctccttttgatagtttatatatttctttataaacagcctgtggaatggaatgaggaaacagctgaagaacaagttggagctgaatcacctgcactggtgactgatgatactggtgaaccgagttcagagaggaaagatgatgatgtcgttaattttactgaagaaaatgaatgggacaggcttctgcgtatgaggttggagttccctctttctctgagttcagcgtcttggctttggtcttggcagcatatgttcttgtttcaactgcttattacttgttagctaattttcatacggacaactgtatatgtagatgggagaaatatcagagcgaggaagaagcagcgcttggcagagggaagcgtttgagaaaggctgtttcgtatagggaagcatatgccccacataccagtggacctgtaaatgag

SEQ ID NO: 179179 - DNA, 186 bp, Arabidopsis thaliana landsberg
cttgatattgatgataccaccattaccggccgcttcataacgggcagaagggttggtgatcagttcaatggattctatctggctcgactgaagtgttttcaggtaattggcaaggtcctgtcccgccagcggcgccggccttccatcaatatatacctgtacgccgattttgccggcaagtcccag

SEQ ID NO: 179180 - DNA, 327 bp, Arabidopsis thaliana landsberg
atggctaccaagaagaaatatgttcctaaagaagagatgaacaagctccttagaatgagccaaacagtaagagggctgaaaaagtggtacaaggcactgactattgacgtagaacaggccaggaaggatatcgaggcgcactttgttgaggctactgccacagccaaatcaaacaagcaatgggagcgagccatccagcagagaaacaacagccatatggtagtggatatgtttagtggtgatatgcaagactaccattttcaggatcgcaacgggcgtaggcttcatactgtacttacccgtttacccaagtacctgagaaagcac

SEQ ID NO: 179181 - DNA, 50 bp, Arabidopsis thaliana landsberg
atgaaggaaagcgtctcaagaagaagggaaggagatctagatcttcaatg

SEQ ID NO: 179182 - DNA, 1839 bp, Arabidopsis thaliana landsberg
gtgtatcctttgacctttctgatagagaactcttttgtgtcgaggatcaagatgtatttgatcgtgtctactctttggtcaggagcttctttagtcttcctccatcttgcaagtgtaatcttgtagaaagccttcggtccaatctaagcgttcttcttcccaatgtcgattcgatatcccggtctgtccaagatcaggaggatgatgttccaattattgataggatcacatcacatcgcaatgccttgaagatatacactttctttctcctcactgttgttatgaatgaggaatcacacatcagctcagtcgagactacaaaggtgttctctctttttccagctgataatacagaataaaattcatctcttgttgtcgaatttacggtagtgatgttgtggatgaacaggttgcagcacgagggaggaaaaagcaaatcatccagtcatggaactgggaacctcagaggggtaggatgctcaatttgatcgcaaattctcttgaaatcaacctatccttgctctttggatcatcagacctagacgaaaactacctgtctttcattgtcaagtaatttccgtgacctaatgaatcttgtttctttcatagtccatgctatagatacattctcacaacattttcatatcatttccttgtagaaactcgttcactctttttgaaaatgccacaatcttaaaagatgccgagacaaaagatgcactgtgccgaatcatcggagcatctgctacaaaataccactacattgtacagtcatgtgcctcaatcatgcacttgatacacaagtatgattttgctgttgtacacattgctgatgcagttgctagagctgaaagcaagtattcagatggtacgttggcagtgacaatcattagagatattgggaggactgacccaaaggcctacgttaaagatactgctggggctgataatgtgggacgtttcctggtcgagcttgctgatcgtttgccaaaattaatgtcgacaaatgttggagttctggtccctcattttggtggtgaatcatacaagataagaaacgcactagttggtgttcttgggaaattagttgcaaaagcatttaatgatgtcgagggagatatgagttccaagtcccttcgtctgcgaactaagcaagctatgttggaaattttgctcgaacgctgtagagatgtttcagcctatacaaggagccgtgttcttcaagtgtgggctgaactctgtgaagagcattctgtttcaattggcctatggaatgaagttgcatcactatctgctggaagactggaagataagagtgcaattgttagaaaatccgcattgaatttactgatcatgatgttgcaacataacccctttggtccacagctgcggatagcttcatttgaagcaaccctggagcagtataaaagaaaactgaacgaacttgaacctactgagcatgcatcaaaagagtcaacttcagatggtgaatcctgtaatggagatggtgaaatcgatgacttgcatcttgaaactacaactaagattcatcaagatagtctatctgatagctgtcagccagagaatggagaagaaatcagtgagaaggatgtttctgttccagatattggtaacgttgagcaaaccaaggctttgattgcttacctagaggctggattgaggttctgtcagtgcatgtcagccagtaggccaatcctcgttcaattaatggcttcatcttctgccactgatgttgagaatgctattcttttgctgatgaggtgtaagcagttccaaattgacggtgcagaagctcgtctccgtaaaattctgcctctg

SEQ ID NO: 179183 - DNA, 154 bp, Arabidopsis thaliana landsberg
atgccacccggcagccgttatatcagccggaaacgggcaactggtgcaacagccatcacagaaatcttcgaagatatttttaccaagtttggcaatctggaaaagaagaaccccgatatcctgaaagatccgaaggctttaaaaagcagcgcgg

SEQ ID NO: 179184 - DNA, 393 bp, Arabidopsis thaliana landsberg
atggccttcaagtccggtgaagatgcagaaacccttggactaattggccatgaactctacacaatccaccttcctagtaatatcaatgagataaaaccaggccaggacataactgtgactactgacactgctaaatcttttgtctgcactttgcggttagacacagaggtaatcacaaaagcttttgtttagatttgattgtcaccatatatttaatggtctgacttggttgattggaattgatcaagtggaactaacatactataatcatggcggtatgctttcgtatatcattcgaagtttgagcaacgagtgagtgattttgatttaaaaacatctcctcgcttgatctagatttgggttctttgcttcatcaaaaagcaagtaaattcg

SEQ ID NO: 179185 - DNA, 366 bp, Arabidopsis thaliana landsberg
atggagcgaggagctttagtgggttcttcttctacttctagctactatgttccttaccactttcgccaatcaaagtcgaatttttcgtcattcaaaccaaaaaataagctaaaccctactcaattccggtttaactgttcatggtttaagccggttagttctataacggcggcgaaatgcaatatgtttgactacgcggtgactgcagccggcgatgtggaggctgagcatccagttgacgacaaacagtttgtgcgttggttccgtgaagcatggccttatctttgggctcaccgtggctgcacattcgtcgttattatctccggcgagatcatcgccggctcttcttgtgatgccattttgaag

SEQ ID NO: 179186 - DNA, 710 bp, Arabidopsis thaliana landsberg
gtcgaggccgaaaaatcatcgcagcaaagaagatattcgtctcagtttgtcctaagaagagactacattggcggaactaaacaatttacgcgtacaccctcccaaaaatcagggtacaagactttgaggtcgatccaagaacatatccctcttgatacggtgaatgatcaatcttcacatagttcagaagaacatcctgagcaggtttcaccacgtcatattttgtatatatctactcacttatacattacacagcacagatttattatacagacacacttacatattactaggcttaaaatcactcatggatgcataaaatctccagaaatggtgctaagtgccaacattatgttcgtatatatgtaactaaataaacaggtttcatcattggttttgctatgtcacaggacaagacgtcttcagaagtattccacgatacacttgcagacgagtcacttcaagaaaggataacttcttgccgtcaagcgttacacggtttaaacactgctgctgcggttttcgtccagtcaatatcggaattatctacagcttctcctcgggatcaaatctcaggtgaacttagagctcagttgtttgatgaagcagctttaatgattccagatgtgtctcataaagttagcgaaattgttgccaagataatgcttgagcacaaaaatagaactagtgatagaatgttgtccaattag

SEQ ID NO: 179187 - DNA, 1964 bp, Arabidopsis thaliana landsberg
attccagcacgtgctgcggcagctgctgcggttgctcgtgctttggcgggacttccttctgatcagagattgagtatatcttctactgctactgagcttaactcaatttatggaaacagacctcttcctcaacaagttgaagagcttgaagaaggtttctatgaagaggtctgtgtgtgtgtatgctttgttttggtgtttgtgatatcattactaagcccacaggtgacattttggttttgttgttgtgtaggattttgatccggtaaggcatattttggagaatgtgccggatgatgaaagtgagttagcttattttgagaagcaggtactaacttttaacttctctcaaggaattgaatataaactgatgcctctattgtgaaaggttaagaatgttgatgaacgttttagttagtgagtttaataggttttgtttactgtgtaggctaccttgaggttggtacagctggataaagtggcagaaactttgtctcaccatgttatggagcatcgtgaagttatgggtaagtattcttgaattgagaagatcatatgcgtttggttttgtgagtattaatatttgcttttggccagtgaaggggatgaatttggtaagagaattggagaaagatttgaagattgcaaatgtcatctgcaaggtatgagtttcatattcttaacctaaattttacataaacaatacagtggttttattttctattttatctattactggtttgacttggttttggctgtttttgtgtgtttattgccagaatggaagacgaaatttgacttcttctatgaatgaggcttcaagagatcttattgtacacactcattccaaaaagaaacaagctcttctggtaggcttctcaatttatttcagacatctaggctccactgattgtttctttaatctgctttcttgaaatatttcatgtgttatagtttccttctgaaatcaccatcaatatgctctagaactttgtgtacaaaattcctctgtattatcatctatcagaaagtggccgagtatcttttttgttttaatctctaaagttacgaacaggatgtttctagcaagtagtttcttagatacaatctaagtgtaacctagcctaattttttgttttaattgctaaacatacttttgagattattattcctagcatgcctgtttgcttctctggataccatgtaataagagcgacatgaaagtttaatctttttacttgcaggatatgcttcctatactaactgacctccgccatgcaagagtaatgcagtcaaatcttgaagaccttgttgaagatggaaactattgcaaggttggtagtttaccatcgtctctgttgtatacttccatggttttcttatatgaattatggtgatgttatgttatgaaactaacaagagatgggaatttattccttattatgcaggcatttcaagtcctatcagagtatttgcagctgcttgacagtctatctgagttctcagcagcccaagagatgacccgtggtgttgaggtagttatagcttattcatgaccaaccattgtcttcataattttctatcgtcagtcggttgagcttctcatactcttttcaaggtttggttaggaagaactcttcataagctggattcactgttgttgggcgtttgccaggaattcaaagaagatagttatgtaatggttagtaagccaactcattctcatgtatctctgtagctttctcctttgtaaactaaaaggattgaattgtgggccttcagtttagtggagaactagaaattttgttcagagatttaacttgtttatgtgctcatacctttaggtcctcgacgcttatgcactgatcggtgatgtctctggtctcgcagaaaagatacaaagtttctttatgcaagaagttatctcagaaacccactcagtgctaaagagcattgttggggag

SEQ ID NO: 179188 - DNA, 183 bp, Arabidopsis thaliana landsberg
atggcgaagccgttgaccggagaaacaatcagagttgttttcgaggaggagagtgagaaacaaggcggcaaagaaagctatatgaggaagaacaaacatcgccgtgtaggcaagtacagcaagtttctgtacacgagcaagagaaagtacagcaagtttcaagacatatcagttattgagcag

SEQ ID NO: 179189 - DNA, 290 bp, Arabidopsis thaliana landsberg
ctctttgcaaaaaagacagtaaagttctctctgtgttggactcgatggggctctcatccaaaccactccaccgtaagacttgtgccttaaaaaattcttttggtggctaaaatgtgactgcttcatagcctcgcgtttcttacttcaatctacaggctgcccgatacctgttgcggatgatccaaatgttgttgtcataccaaagaggactcccaacacaattgtgaagaagttggcatatataactgttgacaaacaggataaagatccctcaccgctgtttggaggac

SEQ ID NO: 179190 - DNA, 312 bp, Arabidopsis thaliana landsberg
ggaaataagtccgtctaacacccctacgctccggatctccggcgattccacatcggtagctatggatctggtcaaacggagtaaatttcatatcgatgaaaatagcagtttctgccttaggcggttttcccgaagcaccgagtacaggaaaccaaccagaaatgcgttctcccgatgcgatgtctcgaaccgggatcttagccgtgccaatgatttgagcaccgaaaacatcgtcgtctttgacctggaactcgagataagcaaacggatgcgctatagaaatgttgaatttctcgtcccaaagaggctctt

SEQ ID NO: 179191 - DNA, 784 bp, Arabidopsis thaliana landsberg
atgagtcaagagggagcacaaccaattgcaaaaacaggtccaacagaaaccacaatcaaaagggacacacacggatctgctaactacgctgatttccagaaaagatcaccgcccatgagttactccttctcaggggaagcaaaggtcaattcacgacgaacaaaaggtatcaaaattcaaatccttaaatttgactatggtttcaatcaaagagctcaagagggagtgttaatattcaatatgggaaaataatgttttatacattaactttcaaaaagtggtcaatcaatacgtgaactttaaagtcggctaaattaaacatgataaaaacgttgaccagcctttttaacataaacaaaacgttgacccggctaaaatcccgagacgttaactcgcattaccagacccaattaaccccgttaacagcacgttaataaactccgttaaagccgaaacggtgtcgttttgttctaaacgaaacaaaacaaaatccccaaatcgaaaactcaaaccctaagtcttcatcttccccaaatcgatttcttatatccaacttctctcaatctatcttctttgagcttcaactccgacagaagactgtgctacaacaacagccggcaaagctagaactccaccatcaaactccgtctccggtggagctcgaactccatctccggtttcagctactcgtcgtggtggaacaggagcaatgtcgacttcgccttccattgctaaggcaatcacaacaagattaatcgaagaacaaacacgattttaccaatga

SEQ ID NO: 179192 - DNA, 676 bp, Arabidopsis thaliana landsberg
ggttttggatgcttaccgaactggccgagggcgagttgtagttagaggaaaagctgaagttgaattgttggatccaaagacaaagcggaatgcagttattatcacagaggtgatcaatttagttttttagattaatgttcagatctccatggatgagggtttcaaaaatgtttattagcagtagagtaatgcctttagtgtgactttattgcagattccttaccagacaaacaaagctacacttgtccagaagattgccgaacttgttgaaaataaggtacaactaaacttgcgacatctaatgtttattttgcttcacttagcaatatgtacttattttactcagaggtgtgttacatttctagtatgtccttatatgcttgcaaagtttcttctttattcattgatgttggtgtttgttttcagacgctagagggcataagtgacatacgtgacgagagtgatcgtaatgggatgcgtgtggttattgaggtattacactgtttcctctgcacttagatgtattagtctgctttaaaatttcatattggaaggtaattaagataatttccaatacttctctatagctcaaaagaggaggggatcctgcacttgtgcttaataatctttaccggcatactgcccttcaatcaagcttcagctgcaacatggtggg

SEQ ID NO: 179193 - DNA, 262 bp, Arabidopsis thaliana landsberg
ggatctccaattggcatattagagtaattgatcattcgaaaattgaaatccgaaggttgatcccatgcagccagtgtatcgtgaggtaatgattcaatattgctctctgcatcggagatatctaaagcttctttctgttttttgttgccacaggcgcaaagcagtaagacgaggagcaggggtgaaattgttttcattttgtggttctaatggaacaaggatgatacggaaaaagactgatgaatacggatcaaatacttaa

SEQ ID NO: 179194 - DNA, 448 bp, Arabidopsis thaliana landsberg
atggagataccagagaaacaagctgatttaattgaggagtcacaaccgaaacaggttaggaaagctttgttttcgtctttagaatcaatggatttggctgcggttgggctggaggttgagccttcatgtggtaaagtggatagcttagaagaaggggagctgattgcggatcatgagacagctttgcatggcgaaacaataactggagtcaatggggctgagaaaattggtatgacagttgaagatgtggatggggacgatctgttggagatttgtcctagtcttcttgtttcagttaagactgataatattgatggaacaatggagattcctgtgctgaatctgaggtctgaggaggcagacacggaaatgatgagttctaaagaggatgctgaggaggaaagtgtggtgagggatagtgatcttgagccggctcggaaactgaaag

SEQ ID NO: 179195 - DNA, 93 bp, Arabidopsis thaliana landsberg
gttgggcagccttcccggagcacgccgcaatgcagcgaaatcccgaactacgtcgacgacacgaaacgggccaagggggcatcagtcatgcaa

SEQ ID NO: 179196 - DNA, 300 bp, Arabidopsis thaliana landsberg
ggacagctttataaacctaccctaaagatcagagaagcgaatagaagagtagatggtcacttcatgttactcaccgggcatgggattgatgaggagagcaacatccctttcatggagtttcaggacacgaagggcgacacttggggtgatgagggattcgttcgtgtccgccgtcaggtcaaccttgtgacagagtttgttgaacttaaggtaagtaaatatgtagtctgaaaaaaagttttctcaagttgaaaagttgaaaatttgatatatgttggtgtattcttcttgcagatctga

SEQ ID NO: 179197 - DNA, 212 bp, Arabidopsis thaliana landsberg
ggttcggtgtattgggatttagaggatataccaactccaagtgctccacctataatggaaagtggacaagaagatagcatcagcttagagattgaaaaggacattgagaagattgaggatgagatttgtggagaagaaggagtatacagtagtaagcaagaaagcatgagaagcagttcacatttgtatagagttgaagaatttggtgacag

SEQ ID NO: 179198 - DNA, 473 bp, Arabidopsis thaliana landsberg
atggttcatagagatgtcaaaactagaaacatattgctggacgagcattataaggccaaacttgctgattttggtctctcgagatctttccctgttggaggtgaatctcatgtttcagcggtgattgctggtactcctggttaccttgatccagagtaagaatcaattaacagtgctgaaacttttcgcggcgtacgtcgatacttaaagagtatgataccattcgctttcctatgtagatattaccatacaagtcggttgagtgagaaaagtgatgtttacagtttcgggattgttttattagagatgatcacaaaccaagcagtgattgatcgaaaccgcagaaagtctcacataacacaatgggtagggtctgagcttaacggaggagatattgctaagatcatggatctaaagcttaacggtgattatgattctcgttctgcgtggagagctcttgagctagcaatgtc

SEQ ID NO: 179199 - DNA, 715 bp, Arabidopsis thaliana landsberg
ctatcaagttgcactgtgtctgaaactttgtttgtgagtgcagaggtcaaagatacagttacttctttgtctgtccaaaaggagattggcaaggtaaacacttcctctaggattatgcttcccattagagaaagtatcaatctttgttagaacttgttaagaatgttacaattctgcaatttgagtccattgtttagttcaagacttgtagttgttggttgctattgtgaaagctttgaactttatctatatacatatgatttgctaatgagggtaactctaattatggtttaatcagaagaagaaaatccgcagccgacaaaagaagctaaaggcgtatgatctcaccaacctgtcggagtttcttcccgagttcaatgctctgcagaaatcagctcttcctgcacccgagctgaaaatgaactgtaaaaggcgacaaaagctcgtgtgagtctccatttcctttgttgttctttcttgcgattttcatctgaaaggattgtgtctttgtgtgttgtttagattgacggaaggggagagattgaacaaggttctagaccatccagcttttcaagctgatccagttggttcgatatttcagcacttgctgagtcaacagccaccggtggaagagaaaccgaagaagaagactaacactaatggaagcaagaaaaggaataagaaaaaaggaaagactgattccatggatttctga

SEQ ID NO: 179200 - DNA, 276 bp, Arabidopsis thaliana landsberg
gcaataagtgaaaaatataggaatttgaggaggaatcagattccccacaccacaagccggaaaggaatggttcgactagctcatgaaatggtatggttgttgaaatttacacactgattagttacacacaacagattgactctattttatttcacttgttacttgtacaagaaaaagagttctgaccctagtaaggtgacacgaagtaaagtctggattgtaggacatacacattcggatgggagacctgtaaaaccagagtttgaaactgttatt

SEQ ID NO: 179201 - DNA, 135 bp, Arabidopsis thaliana landsberg
atgcacgtaggtgtcgtacgacacacccctggcgtcgagcgacaccaatacatgacggcaatttcgagacgcaacttattgatgtttcgaagatttacaaattcggccctgaactttctcttatttttaaagaag

SEQ ID NO: 179202 - DNA, 94 bp, Arabidopsis thaliana landsberg
atgggctcccacggagtgtccatatgcagcagcacctgctcgacggcgtatgtgatcgtcgggcctgcagaacgtgagctactggagcgcgccg

SEQ ID NO: 179203 - DNA, 180 bp, Arabidopsis thaliana landsberg
aatctcacaaagatccgttctttgaagaaacccttagtacaatttctattgtgtgaatttcgactctacaacgacagtgaaggtttcatgaaggagatcgagttctccgaaaagtctttcaaaacaccgccgaaccgaacgctgggaagcttgggtcgaattgggaaggaccatacgtaa

SEQ ID NO: 179204 - DNA, 114 bp, Arabidopsis thaliana landsberg
aggatgtggcacgacggagaagaagaatggagaagaacaaaggagaagaagaacggagaagaagatccggagaagaagaacagagaagaagaacagagaagaagaaaattttag

SEQ ID NO: 179205 - DNA, 591 bp, Arabidopsis thaliana landsberg
  unsure (1)..(591): unsure at all n locations
atggcaaggcgacaatcctttaaacttcgcttttccgttactcatcgtccaaacggcgttaatcatcgccgtcagtcgcttcctcgccgtcttattcaaacctctccgtcaaccaaagtcatcgccgagattgtcgtacgtttaaaattacactctaaccccacacacactaactatttacaattttaccataataatcttcttaatttacaattctgccatcgtcttcttcttcagggagggattttgttaggaccatcggctttaggtagaaacatggcgtacatggaccgtatatttccgaaatgnnnnnnnnnnnnnnnnnnnnnngtcgcgagcataggacttctcttcttcctcttactcgtcggtctagaactcgatttatcatcgatccgacgaagcggcaaacgcgctttcggaatcgcagtcgctggaattacactaccgtttatcgccggcgtcggagtcgcgtttgtgatccgtaacactctctacaccgccgcggataaaccaggttacgccgagtttctcgttttatgggagtcgcactctcgatcacagcttttccggtacttgcgcgtattttag

SEQ ID NO: 179206 - DNA, 412 bp, Arabidopsis thaliana landsberg
atttctaccaatggaaccttcattacaaagttcgagactttttattttctgcttcgtcttcttcttcatctctgcttctatcttcgttgactcaaaatcacaagattcttcctcaattactccaccaccaccgcctcctccaccgccactatccttatctccaccgccgtctcctataacggctgttgagagtaacaaggcgattcacgagaaacatcaccaccgaagaaagaaatggagacagagaagacaccataaacatccaccaccgcctcctccgaagaagcagaaggtgaacacaggaaagacggtggggcttttcttcgccggcgtagctgcagctttgcaagtagttgttgctgctttcttgattttcaaaagaagacagcttcttcttaagatcaatgattga

SEQ ID NO: 179207 - DNA, 179 bp, Arabidopsis thaliana landsberg
agccacctaatgaaacagtcaaggaatcgattggaaagcgatatagccatatatgtcgtactttccgtgagattgcatctgttgctactgatcatatagaattgacgttgtgtgcaaatgaagaagccattaagttactcaaaaaattggaggaaagaaaaggagcttttaaaatctaa

SEQ ID NO: 179208 - DNA, 1042 bp, Arabidopsis thaliana landsberg
atgaaggcctgtgaagaactgttcgactctctgctttctgggattgcaaagattgcagtggcaagaggagggcagcctcttcgcgtgttgctcatccgacttaaaccactggtactagctgtctgtgcactggtaattttgttatgtcttaactcatatgagcaacatactctaaactactgatgatcatgtctgaagatccatagaagtataatcgaacacatcatgtcacaactcttctggacattttacctttactttactgaaggaagtttctatttatttttaatgtctgttggtacagccggatcaaggggctatgcttgagagcatatttaagactagttgtgagattattgaatctgcctgggccaaggaccgagctccagtggacaacttcattatggggttagcttcaagtattcgtgaaagaaatgattatgaagaacaggtggagaaataataatacccttcccttagctggttaatttgcctttcttgtgttgaattgcaatttcatctttccaataaggctcatcatttggtgtccaggttgatagagagaagcaagtacctgctgtacagcttaatgtgattcggctgctagctgatctcaatgttgctgttaagaagccggaagtagctgacatgattttaccactttttattgaaagcttggaagagggtgatgcttcgactcctagctttttgcgactccaagtacgatttcaatttctacagtgatacctggctgactatcaattagtatcttatatatgctactttctccaacgttggcaatgacagaaactgctaccatctatatcttttttacgttttttttcttacatatttacttttgcatttatgccaatttgtgcagcttcttgatgctgtttctaggatagcaacattagggtttgataagtcttaccgtgagacagtagttctgatgaccagaagttatttgagcaaactatcaagtgtaggatctgtagaaagcaaaacgtcagcaccggaagccacaaccgagcgtgtagag

SEQ ID NO: 179209 - DNA, 317 bp, Arabidopsis thaliana landsberg
atggtgacacctgaagaaacaatttccagatgtctggatccaaattctgcggccctcagtagagatgccttggcaaaatttgtatactcaagattgtttgattggtatgtgtagtatttacgagcacattatttcttgcagctggatgattctttttcttgtttccgaaagttactttcattactctttgctaacttcccttattgctcttgtaggatcgtaaacaagatcaataattcaattgggcaagatcctgactcaaaagacatgattggagtgctggatatatatggatttgagagttttaagacaaacag

SEQ ID NO: 179210 - DNA, 1508 bp, Arabidopsis thaliana landsberg
atggtgtcttgtgtgtatggagtaaaagtagtggtcagtgtaggaaacgaagaagattacctccttgggttggaagtccatcgattttgtctactttgccatcagagcctagatatgtatgtgttggttgttcttatatcgatgttgatggggctgagactttagcagatactgattttcagaagtcgagatgcacggtggttgttgttgatacttacactcttactattgttcatacagttttccatgggaatttatctattggttgtttgaattttatgggcgtggttcagttagatgagcaggaatcattgcttatggctgattcgtttggtaggttgcagttggtttcagtgtcagagaaatctgaaccgagcaaaggctctctagtgtctagaaactggttgagtgaaggggaaattgctgtatcagtaataactcgaggggatcttgttgcgtttttctcgaagagtaggtgtgtcttttggttgttgaatcgcgaggaggcaataggagagatatcttttgttgatgattcgcattcttcaaattttctgttcaaagaagcaatgatactttactctagtacatcaactattgaaggtgataaagatgatagtatttctgaaacttttgtgctgtgggatggtagtggttctgctgtgctgtttactatgtcatatatagatggtgaatttacataaaaaaacttcggtgagattgttactgcccctgatgataagcgttccgtgaaatcaacattttgttttgttcagttgaggcagaatcttcttcgcgttgagtctagttgttgtgatgttgaacaaccttctcagtggaggccccatataacgatctggtcattgtgcctaggaaatggtaaagaaaaagaacttcagcgcaaagtgcttggagaaagctcctattttgctgattggatttcaagctcctgtttagatcccaagggctccgttagtgcagaaactggtacttcgcagtcaggaagtcagtgcagtgccaaaaatgatctacaaagctttgttagtgacaatggacagtgtgtgtcatcgtccatggttatttctgagaatatgtatgtcccatatgctgttgtctatggtttctttagtggtgagatagagattgcaaagtttgattttcttcatggaattgattctcctgcttcaagcccgagatcagatactgatccactcgtctataaacagcgtctattgggacatacaggatctgttctatgcttagcagcgcatcgaatgtttggggatgcaaatggatgtaattcttctcatgttttgatctccggaagtatggactgtaccatccgcatttgggatctcgaaagcggaaatgttatcatgatcatgcatcatcatgttgctccagtgcgccagatcattctatccccagcacgaacaaaacgcccatggagcaagtgctttctatctgttggggatgattcatgtgttgctcattcatctcttcgttag

SEQ ID NO: 179211 - DNA, 2443 bp, Arabidopsis thaliana landsberg
gatccgaaaattagtggatcacttggatctcgaatccttccggctactcaaaggtgagtttttttttctctttctgaaatttgattcgaaatttagaatcatgagtgtaagaaaatgtttgaaattttctgttatagtgatgatgatatgataatgatatgatgatgactgatgagggtaaaaggataatgatgaatatgctgttgatgatgtgatgtgatgttgatatgttgttgatgattcagggtttaaggatgaggttctatgtcttgattgttgtttattgatatacccgttggccgttgctttgaactttagaccgcatttgtgaccccttgaactttgaacatggtgattactggctttaagaaaaagacagtggtggagaattgttttgaaatattaaagatttggactttattgatatttatgtttttcagactttttcgatttgttaggttatttatttgactggattcgtgatggagctgtcccaattctttagagtaacctgtttcaggcttgtttgtgtcttccttgattagtgttggtaactttgtttgaagttaaaaggtttagtctttgagacttcacatttcacaataagttttagttcatctttcgcttttcccccataggtgactcataagtatttcttttctatttgagttcttacagattttggattactttttggtttatcattggatttatttggtgtttagtcaacagaggaaattcatttaacagtctaatagtcttaccgaatttaccaaagtatttttaacataagttaaaacatttgtgattttgcttgtttgttatgacttcttataagttctaattgtatgtatattagatcatccccatcggagaatcttctcctccataggaaaatgtcgtctaattccctgaggcatgtcgagtccatgtcccagctaccctcaggtgccggaaagatctctcaattaaacgccgtcgtgttaggagaatcccttgcatcggaggagaatgatctcgtctttcccagcaaggaattttccggccaggctcttgtttcctcccctcaacaggtctctctatataccttgtaatatcaaatgagtcctacatcagcagacctcatcttctctgcttgcttttatgacctgtaaatcatctctcgtcttgttatttttatgcagtacatggaaatgcataagaggtcgatggatgaccctgctgctttttggtctgatattgcgtctgagttttactggaagcagaaatggggtgaccaagtgttttccgagaatctcgatgtcaggaagggtcctattagcatcgaggtggatatttttcttcttctttttctttgttctaattcctgtatctcctattagaaaatgtttcgtcgtgatgacatgtctgggatcatgtatgaccagtggtttaaagggggaatcaccaatatttgctacaactgtttggacaaaaacgttgaagctggtttgggtgataaaacagccatacactgggaaggaaatgaacttggggtagatgcttccttaacttattctgagttgctccaacgagtttgccaggtataaacactgtttttcgtcctctccaaccacctctagagctcttctttctcattatttttctggcactgcattttccttgtccttgtgctgcagcttgctaattacttgaaagataatggagtgaagaagggtgatgctgttgtaatttatttacctatgttgatggaacttcccatcgctatgcttgcatgtgcaaggatcggagctgttcattcggtaacttgtgattttcgtacatttttctacaatacaacatatacctaattcattaacacaaaaccagtttcgaagctaattcaattctcccacaggtcgtttttgctggattttctgcggactctcttgcccaaagaatcgttgattgcaagccaaatgtaatactgacttgcaatgctgttaaaagaggccctaagaccataaaccttaaagctattgttgatgctgcacttgaccaatcttctaaagatggagtctctgtaggtttgttcattcaccagaatctgaatttgagtggttgttggtttgatggatatataactgatgattttctgtgttttacttctctacaaccaggcatatgcttgacctatgacaacgcattagcgacaacaagggaaaacactaaatggcagaatggaagagatgtgtggtggcaggtaactgcagagcaacttaataattgtcaaaattccttcattgtttttttttttcgaatggttctaaaagtcttctgtgggtggtggtgatcactttaggatgttatttctcaatatccaacatcgtgtgaggtggaatgggttgatgcagaagatcccctgtttttgctctacaccagtggaagtaccgggaagccaaag

SEQ ID NO: 179212 - DNA, 253 bp, Arabidopsis thaliana landsberg
ggcgggtacgccgcgcacatcctgccgggcaccctgctggtcgccctcggcgtcgggccggtcttcgtcggtgtcaccaccgccgccaacgccggcgtcgatgccggtcgcgccggcctcgccgcggccgtgctcaactcctcacagcagatcggcggcgctctcggcctcgcgatcatcacggccgtcggtgcggcccgcacgcgcgacctgatcgccaacgggacggcgcaaaaagacgcgtccacctccg

SEQ ID NO: 179213 - DNA, 399 bp, Arabidopsis thaliana landsberg
ggcaaagattatttccacgacctgcacaaaaaaggcaacggcgaacacgaacacccaccggaaggcgacgccgacgtgaacggagcggataaagcaaacacgcaaagggctgggcaaaagggataccgacagcagacagcccaccgccggcagcaaaagacaagcacgacccaaggaagcacccacgagacagggagcgcaaacaagaaaacgaacacaaccaccaagagacgaaaacacgcagaaccccacgaaaagggaggcaagcctaacaagcagccaaaacccccccgcaaggcagaacagacagagccttggctcctggcagaccaagccgaccagaaagaccccagcacgcggaaacaaaacaagccggcgagggaccccacccacaccaga

SEQ ID NO: 179214 - DNA, 91 bp, Arabidopsis thaliana landsberg
gtacgttgagaatggctctcttgcaaacattattaaacctaataaatttggacctttcccagagtcgttggtgactgtttacattgcacag

SEQ ID NO: 179215 - DNA, 824 bp, Arabidopsis thaliana landsberg
atggagaggattgtaatcatagaaatccgacggtctagattgagtagacgctttccaaactcgatcgttgacaagagatggccggtctccggcagaggaacgaatatgagctctgctgtcttcatctctttacttttttttctttatgatttttctactgaaacgcttgttgctttggtatgtatgaatttatgacatattgatatggtagtggagtcccatgtgttaaactagaaaacaagaaaaactgattataataataattaggcttgacaaatttgtattttaatctcttgtttgggaccttgagcatacaaaagtggaacaataaattagcaacattattgcttagttagatctctggatctcagacattcagatatctgaatgatgtgtattagaatctccattgcagaaaaagaaacagcgagacaattattataaattgacgctaaaaagagtagtagagatatcctactggtactggacttgaaacaaaagttgaagtggaagacagcgaattttattctctgtttctttggccaacaaaagtgtggaacattgatttggcaaaaatcaaaatctctggttttgaatcccccttagcttagttagtattagttgtccgtatcacttaatgtctctctaaatgtcaagagatgaataggtttagtaaaattagtatgtactgtctgatctggtgaccctaagtttttaatttaaataaccacttcttttaagagagacgttgtatatgatttatatacgaatgtgatattaggtgaatatcgtgtcatccgacaaaacacgcaaaatccatgcat

SEQ ID NO: 179216 - DNA, 723 bp, Arabidopsis thaliana landsberg
atggaggagcaagcagaatccataggtagggtgaaactgacaacgagcgaggtattcaaaggacataagcctcaaagcagtaactgatcataggtattagttgatatagcatgagagtcacataaggaaaaaaactcacatatcgagttgcatttgaacaccgttttgtttttgtttttctttcctgagagaaacataccaaaaatagaaatccacgatcaaaaatcaaagcacaagaccaaaatctctagaagacggtaattcagagaagggttaggtagtggcaagacaccttggaaaatcttgggtgaaccaggcatcatgattccccaatatgactgctttagggaaagtaagagcggcaacactttgaaccagtgggacgttttcttcaccaaaatcacctgacagaatttggaattggattcaaatgttctaactttaatcaaaatcattagaggtagtgtgaagagaaatggagaaattcaaaaaaaaaaggaaatcaatttgacgtcagtaacagagaagctgcctgtgaagagcaccaaatccggctgcaaatcaggttcagaagaggatttagggtcacgagtacgtgtgaatagaaaaagagagcttgagaaagatagaaggaaacatcaaaggacctggagaactcgtagagcctttcgatcttcatctaggttccagaagccatgctttaacaggagaagaaaaagataa

SEQ ID NO: 179217 - DNA, 806 bp, Arabidopsis thaliana landsberg
gatagagttgattgataaatattttgggcttgataccgttgaagaaatcattgaagctatggtgagaaaattttccctaacataagcatgatatctttcaattttgaggactttggatcgacttggcttgagagttttgtaaagttctaagcttttatgttaaaccgtgcctcaggaaaatgaagctgctaattcgtgcaatgaatggtgcaagaaaactctcaaacagatcaaagaagcttcacctttgagcttaaagattactttgcaatctgtaagtccttttagtttcttcttctcctttctcaaaaaggatttcatttttctgactctggcagtttcttctcttctcagatacgagaaggtagattccaaacccttgatcaatgtctcacacatgaataccgtatatccatttgtggagtctcaaaagtagtctctggcgacttttgcgaggtaaaatatttcactaatttgtcaattaaagcatcatttttttgcacatattgaagttgttttctgttgatagggtattcgagcccgtttggtagataaagactttgctccaaaggtgcatacaaacatatcagcctcaaaattagacgtttgcaactcctttagcttatgttcatgttccaggttttacgttctaattcgtggtttgttaatatttgcagtgggatcctccacgcctagaagatgtgagcaaagacatggtggattgctacttcacgccagcctcagagctcgatgattcagattctgagttgaagctgccaacagctcaacgagagccttatttttga

SEQ ID NO: 179218 - DNA, 80 bp, Arabidopsis thaliana landsberg
aattgtttggagaaaagaaatttcgaagggacgacgtatcgtcatgtcctggaatgtggaaacggcaggtctttgtttga

SEQ ID NO: 179219 - DNA, 832 bp, Arabidopsis thaliana landsberg
atgcacgtatcaaagaaggttgctagatatgctggtggaaatcctaaggctctatgcttctatgggagagagctggagaagaaaaagaagccggaagaaatggaggaggagtttgagaagatgaggcaatgtcccccccaagaaatactcagtttattcagaagcagctatgatgcacttaacgacaatgagagaagtatattcttggacattgcgtgtttctttaatggtgaaccgtgtgacgatgtaatgcgaatacttgaagggtgtgggttctttccacacgttgggattgaccgtcttgctgagcggtctctactgacgatctcaaaggaaaaaagagtggagatgcaaggttttattcaagatgctgcccgtgaattcatcaaccagacttcgaggcgtcgcagactctgggaaccatcaagaatcagattattactagaaaacgataaatctaaggtaggtgatacattctgttatctataacaatgtttatttaaattgtttaaggtcgatttattcggtttttcaggggaatgaagttattgaagggatttttcttgacacaacagaattaacctttgatgttaatcctaaggcgtttgagaatatgtataatcttagactgttgaagatctatagtacaaactccgaaactgctcaagaactccgtcttactgaggaacttcgctctttgccttatgagctcaggctactccactgggagaagtatccgttgcaatcgttgcctcaagattttgacactcggcaccttgttgaactcaatatgccttatagtcagcttcaaagtctctgtgttggaactaag

SEQ ID NO: 179220 - DNA, 664 bp, Arabidopsis thaliana landsberg
atggcagagccaattgtggttgaagaaactgacactgctgcccccaaagcaccttcctccaaacgcgattacattgtgcgacatgcttcggggaagaaattatctgaagaagaaatttatgaagctgatcactatgccagggaattaaaatatccgaagggggcactagtgtttaatgggagaaacgaagatgacttcctatactgcctcccggacaacaaagaattatccgtctgtcgggagatggctagaagtatggggtttccgaagcttgaagctggcttatgtgctatgacaaaagaagatctcgcagacagtcttgcgtataatagcctgaaggtatgagaattagacgtttagagattttataatttgtaactcattcttttattcttattcaaattctttttcatatagggtttaattctaagcaatgcattgagagcacaaaaaagtgctgaagatgagagctacgaaattgcgttcaacaatctacgatcagaagttattagactgagaaacgaagctctggaaaaagataaaattctgctcacattggtagataaggtaaagaaggacgaagctacttcaaaggcccaggccgaagcccaaagacgtgaaattaaagatcttcagaaacaactagctagagctaaagaagagc

SEQ ID NO: 179221 - DNA, 1367 bp, Arabidopsis thaliana landsberg
  unsure (1)..(1367): unsure at all n locations
aaaataaaaaaccaaagccgcacgcgtgctcttcacgcgcttccacactctcctcctctcgccgatcatcgctgcgattcccttctccatctccggtaacaattgggtgcgccgtctccaagccctagaacaatttcccagtatctctctctcattctcaaaaatcctaattagggtttgatactgaaatcaacaccagatttggctcaatcgtaacatgtgattgctgttacaaaccacgaacaaaaaatggttgataacagtaacaataagaagaggaaagagttcatcagtgaagcagacatcgccactcttttgcagaggtttttgtttcgtttcgttaatattcgatatcatctcttataatttgtggcggcgtttgattttgacctcgttttgttttgcagatatgatactgtgacgatactgaagttgctacaagaaatggcgtattatgctgaagcaaagatggattggaatgagttagtgaagaagacaagtactggaattactagtgctagagaatatcagttgctttggcggcatcttgcttatagagattctctcgtccctgtgggaaataatgctcgagttctggttcgttaatgacttctggttcaaagaattttgattgtgtagttttattgacttatctgatgttacagatgtatattgatcttgttaaaagattcaattttgcatcagagttttttccaattagggtattgtttcagcttcttgaaatgttggttctctctggatgtatggaaggaagatggaaccttgtttgctagttctgtttcttgtatattcacaatggatgcaaacgttttgttccggggattcttttgttgtacctagggagatagcatctgatgagtgattattgttctcaatattgttgtgtagagtaaaagttctatttgttttgattttggtgaatagcatttaggtcttaaggtggaatgaatttatgtatcatgtgatagctgttgcattacaagatgtaattttgcaaatttgaatgaactctcgcttgtgcaggatgatgatagtgatatggagtgtgaattggaagcatcccctggagttagtgttgatgtagtaacggaagctgttgcgcatgtgaaagtaagtaagaaggaaattcactgagaaattttcttagattcttctttttcccttttcaagtctttgtccgatttctctatgannnnnnnnnnnnnnnnnnnnnnnnnnnnaagtggtggttactagtactattcttgggtattgatgtttgcttattacgagttcctaatgaccatgatgctaagtttcctgcttttctttcctttattaggtgatggctgcttcctatgtgccaa

SEQ ID NO: 179222 - DNA, 860 bp, Arabidopsis thaliana landsberg
atggagatgtctagaggaagcaacagttttgacaataagaagcctagttgccaaagaggtcactggagacctgttgaagatgacaatctccggcaactcgttgaacaatacggtcccaagaactggaattttattgctcaacatctctatggaagatcaggtaatcaatatatatatatattgatatttctttatatatatgtatctaatcatattacttaaatctatgtgttttataaataattgagcgtcaatatggaatcatagggaaaagctgtagattaagatggtacaaccaacttgatccaaacatcaccaagaaacccttcaccgaggaggaagaagagagactgcttaaagctcatcggatccaagggaatcgttgggcctccatagcccgactgttccccgggaggaccgacaacgctgtcaaaaaccattttcatgtcatcatggctagacgcaaacgggaaaacttctcttccacggctacttctacgttcaaccaaacttggcatactgttttgagccctagttctagtcttacaaggctaaatagatcccatttcgggctatggaggtatcgaaaggataagagttgcggtctctggccttactcttttgtttcaccacctacgaatggtcaatttggatcttcatctgtctctaacgtacaccacgaaatttatcttgagaggagaaagtcgaaagagttggtggatcctcagaattacacatttcatgcagccacaccagatcataagatgacttcaaatgaagatggaccatccatgggagatgatggtgagaagaacgatgttactttcattgattttcttggtgttggattagcttcttag

SEQ ID NO: 179223 - DNA, 148 bp, Arabidopsis thaliana landsberg
aggatagtccctttttctacaaggtagatccatctcagggtcaagagattatcaatattctcagcatttatggcgaggcttcaaaacaacagctcaatgctgctaagtcatctgtaatgtttggccatgacgtggacaatactgtcag

SEQ ID NO: 179224 - DNA, 1181 bp, Arabidopsis thaliana landsberg
atggccgatcagagaagtaaaaccaatagatggaactgggaggtgagtgggttcgaaccgaggaagtcttcttccaatgcatcgtttgcggagagtactggtcaccgtacgactggtcctctgcttcgccggaactcgatttcgactccctcgcttccgcctaagcaagcaattgcatctaaggttaacggattaaaggagaaagttaaggtgataaatttcacttcctttttcacttcacagagtatacttggcttttggttttgagctgaattaattttataaaaggctgcttttagtttcttaagtctagcttgtgggatttgatggaagtttttagtgttgaagccattacttatcaagaaaaaaaattgtgacttggttgaacagcttgcgaaagaagattacttggagttgagacaagaagctactgatcttcaggagtattctaatgctaagcttgacagggttacacgttacttaggtgttttggctgagaaaagtcgtaaattgggtaagttttgtgtttcactagtcgtaaatttgaagtctatgtaagttgtggtgcaagcatcgagaaaaactgagtattcattacatttggtgcatttgtgaccactggagaagttaacaacactagaattggttggcatttttcccaaaattgaaacctttattggaaacttcataaatccatctactgtatctagctctcgtggttgcgtttatttatctgttttgtggtggaaatttggtagtgtgttgtattgatttatctacgtaaaccaccacagatcagtttgtccttgagactgaggctaggatatctccacttatcaatgagaagaaaagactgttcaatgacttgttaacggccaaaggtacacagcttccataaccagtatcatcgatctttctatatcgataatctttctttggtataggttcactgatgtatgatagttctctgctacctgttggttaatgtggatttgtttttcgtacttcagggaacataaaggtattttgccgtgcaaggccattgtttgaggatgaaggtccctctgttatagagttccctggggattgcaccatatgtgtaaacactagtgatgatactctgtccaatcccaagaaggactttgaatttgaccgagtttacggaccttatgttggacaag

SEQ ID NO: 179225 - DNA, 156 bp, Arabidopsis thaliana landsberg
aacaaaaaaaagaagaaagctagaatcttccgatcagataaaaaacagaaacggaagaaactcaaaatcgaagaagaaaaacaaaaaagaaatcgcgagtttcgcgacgatacgaagaagaaaacaagatcttggatcttattatcagaggaataa

SEQ ID NO: 179226 - DNA, 137 bp, Arabidopsis thaliana landsberg
atggctcctaaatcaagcgacggtgagaccaagtatggatcttcaagcgacggcgagatcaagtgtggatcttcaagcgaaaaccaatcaacggagtcaatggacattaccacgggagatgaatcttctatgctggg

SEQ ID NO: 179227 - DNA, 1697 bp, Arabidopsis thaliana landsberg
atgccttactttgctcagaggctttacaatacttgcaaggcgtctttctcttcagacggaccaataacagaagatgctctggagaaggttcgcaatgtcttgggtatgattatacgcacatattgttcaatgaatctttgtccactggttttcagtttatcgcatctgttatttggccgatcattgttatctttttgagtgcttgtgacaaggacttttttttttttatgaattttgtggcccacaacatgtgaattcgtttatctgatcattctgcaaattacctaataagagtgtattagttaagggtgttggtggtactgagtaatcatatatatctcactttagtcttcaatgcagtggtcccctgttgcacttaccaaccttatttgtaatctatgtttcagagaaaatcaagccatctgatgttggaattgagcaggatgctcaattggcacggtccaggtctggtcctctcaatgaacgcaatggaagtaatcagtctcccccagcaataaagtatcttcatttgcatgagtgtgacagtttctctgtaagcatactgatttgaaaactctatggctgattggtcttgaatgctgtttaaggtttgggtgaatcttttgtgatccactttaggatgattcagatacaaaatagcataagagtcccattttaacttcctaggtttaagtagcaatggttctgcttggaataatatgcaaataccgttcaaggttaaaacactctatagccaatcctgagacaaaaattttagtggatatttaatcttctccttttccgcatattcaaaattaggggaataggggggcatccaaacatggtccttgagagaatctcaggaaccaactattcaagccatgagcctgaagtctgcaaaaaagcctatgacaaatggtctagaaagtatgagtaaacacagttcgagtcaattctgagtctgtctctttttgggtgttttatcttcctgatactgccaccaatgttatctctcacttggttcattttgcctctgttgtcaaaacagataggaatcttctgtatgccaccttcttctatgatacctcttcataaccatccgggcatgaccgtgctaagcaagctcgtttatggttcaatgcatgtgaagtcatatgattggctagagcctcaactgaccgaaccagaggatccatcacaaggtaaccgtcttctttctgttactctctcagtttttatccaatcactcttctggtctaattgtaaactattttgattcataagaagcaagacctgctaaactggtgaaggatactgagatgacggctcaaagcccagtaacaacattatatccgaaaagtggtggcaacattcactgtttcaaagccatcacccattgtgctattcttgacatcttagctccaccttactcttcagagcatgatcggcattgcacttacttccggaaatccagaagagaagacttaccaggtaatacaactaagctctccaaaaacccgatcccagaaccatattagaacctttagtgatattgatttggattgtgaactggagcaggtgaattagaagtggatggagaagtggtcacagacgtgacatggcttgaggaatttcaaccgcctgatgactttgtgatacgacgaattccgtacagaggtcctgtcattagaacttga

SEQ ID NO: 179228 - DNA, 30 bp, Arabidopsis thaliana landsberg
atggctgttggctacaagatcagcgagtat

SEQ ID NO: 179229 - DNA, 447 bp, Arabidopsis thaliana landsberg
atgatcgaaggaacccgacccgctttacgctctttcggtgatatgctcttgccggagacagaccttggaacggctaagatcgtctctgcgtgttttggatcgggtcgagggaatccagggaggtaagttaattgggtttcttggatatgatctagggatagagctgcgttcgccgccggagagaataaccggaggttttgtagggttttgggtagtgtttttgcacgacggagcaacattgtttgctttttaccagtgagagagagagacgacgacgaagtgagcaaatgggtttaggagctgtgttacagaaatggggtttctctaataaaacgacgtcgtcgtttctagattattcaatgggctttaaatgttatgggctttaacttagctcaacccattataactgcatttgatttgaacaaagggcaaaagtcagatgcttaa

SEQ ID NO: 179230 - DNA, 246 bp, Arabidopsis thaliana landsberg
atggaggggcatggaagtttttgtgccctagtggcttccgggggacagcttacatatttgcaaaagctgggtgtaagcatttaagagatgttaacaagaccaccttcactatctcaccagctgacattaagaacattacaagcgaagctcgtagcgtgggggattggattattacccagatctaggcgaagggcggtcggagaactggctggcaaggaggtcggagtccttctggccgaagtatga

SEQ ID NO: 179231 - DNA, 154 bp, Arabidopsis thaliana landsberg
ggaaaaagagcaaagacgtagcggggaacaagccaccagcaccgacacaaacactagtcgagaggataggagcgtgaaggaaaaggaaacaatgcacgagaaagaaacagtgagccgcaaaagcaagagcaggacgaaggcccgcaacagctga

SEQ ID NO: 179232 - DNA, 110 bp, Arabidopsis thaliana landsberg
ttggaggagtgactggaactcatgatgatctagccacgagattgggaccacatagcgacttcggtgttgaccgacgtagaccgggaagtgaccttttggcacgtcgttga

SEQ ID NO: 179233 - DNA, 120 bp, Arabidopsis thaliana landsberg
atggccgcgctgaacgcgattctttcgtggctgcccgcggccgcagggggcggctatgcgttcccggatatctcggtcgcgttcggcaagcgccatggcgagctggccatcaccgacgac

SEQ ID NO: 179234 - DNA, 230 bp, Arabidopsis thaliana landsberg
gacgctgcatcaggtttcatcagacgcttgatgtgcagacatggatgcgagagcaaacgtggcaagctaaggcgaatgatgtgaagagccaaggatggaagttaacttggagaggtgtcaaagacaaggttcatcgagaaaatatagaagatattatatcgaagaataaggaaaggaataggcttggaaacaaggaagattccatatcaagagattctcggagatcctaa

SEQ ID NO: 179235 - DNA, 306 bp, Arabidopsis thaliana landsberg
  unsure (1)..(306): unsure at all n locations
ctctattcgaggtgttcgagcagccgacgcgctgcttcctggccactgagccaggcgccttcgacgcggccggacaagcaccagtcgccgcaggcgtacaagccttgatctgcatcggccagcgcgccccattcatggttgctgctcgggcgggcatacagccagcggtgagccaaggcaaaagtagggnnnnnnnnnnnnnnnnnnnnnnnnnnnnnnnnnnnnnnncacagctgttcgatcacttcttccttgggcaggtcgatgtgttgccggctccagtccgaggtggcgtgcagtacccag

SEQ ID NO: 179236 - DNA, 169 bp, Arabidopsis thaliana landsberg
atggcccacatatcagatattaaactgataagaacagatactacacttgatcttagccaaaaggccgagaaaggtatgatttgctaagtgccatggcctcgtgctttataccactcgttttttctttcacgttcttttcttagcgatgtgggacttcgtgaacgagtga

SEQ ID NO: 179237 - DNA, 407 bp, Arabidopsis thaliana landsberg
atgcggctggtggaacaaggtacgctcgacctcgatgccgatgtctccaacacgctcgggtggacgcttcgcaaccccgcgttcccggaccggaagattaccctgcgactgctgctctcgcatacctccagcctgaccgacgcggccggctactggcagacgccgctcgacgggcagttcaaggacatcatcgacaatccgaaggcgtgggacacgcagcacgcacccggcacctactggcgctacgcgaacgtggggttcccgttgatcggcgcggtgatggaacgtgccaccggcgaacgcttcgacctgttgatgcaacgcctggtgctgaagccgctcacactccatgcctgctacggctggcccacaaaagataaagccaccgccgcgcgcgccgtggtgtt

SEQ ID NO: 179238 - DNA, 165 bp, Arabidopsis thaliana landsberg
gcttttttggatgagtttgtcatacacatctctatccaacttatcttcaaaactgtacttagacgaacatcagtttgcatctacagctacatgcatcagtcagatgaggaaacgaacatgacttatgagtgggaatcagacaaatgtttaaaattgaaattgtga

SEQ ID NO: 179239 - DNA, 63 bp, Arabidopsis thaliana landsberg
atgaaaaacggcaacccaacccaaaaagttggaaaaatacaagaagagaaaacaaaacataag

SEQ ID NO: 179240 - DNA, 581 bp, Arabidopsis thaliana landsberg
atgtgttcttcggcccgacattatccgtcccttgctcgatcagtcgcttctcctgttaacgggtggtcgaatttgaaggcgtacctctcatcatgcatttggtgctcgattacatgggtaagcttgagatgggcgatatccttccatattggttcggtctgagtcgatctcggagggacttcgcacgataggagaattggtgtaaccactcctccaatgcaaaccgctccttttgctctattcttgcttttggacaatgcccaccctctatagctgtataggtggttgagaaagtacatttacggagttgtgtcacttgtatctcctctcattgtctctccgttcttggtgtatcggaggaagctcttcagcgccaagtccatcgtctccatgtcttttttctttaataacacgactttttagccagttttagctgttgttttcttatgtttcagagagaatttggtgccattctagagctaagaagaggagaaactcgtattctaggtgccaagaaggttttaagagttttgaaactaaaagtatcaaaagacaatcattccagtacttcaaaagtttag

SEQ ID NO: 179241 - DNA, 150 bp, Arabidopsis thaliana landsberg
atcacaacttggagagtctctcaagacaattatttatgctgactacccagaacaatggccacgtcttctggattgggtgaagtacaacttgcaaaatcaacaaatttatggggctttgtttgtgttgcggatactctctagaaaatatga

SEQ ID NO: 179242 - DNA, 1397 bp, Arabidopsis thaliana landsberg
atggaggatattgggttggttaagcaaggttggaaatggatgcaatctcagaaacatatgtgctccgatgcttgttctgcgatgcgatgctttggggagatgataggagggcttgtggagcgtcactggccattggtgtgtagtggatgtgggaagctattaggattgcttcagttgtcagttctttattggaaagactgcatttttaggggtttccattgcagcgccaaattgggttcagctgctttgcttctgataatgtggagttgcttccttagcttgacttccttatcttgcttgctctatgttctccttagtatggtaataatgtcttttgattttccccttttcctgtaatctctatttctggatttgagatctatcaatagaagtgtattccactcaccaaactgatagtgaaacttatctaaggattgaaattcagaaaggcgattattcttgatctagatgctattcctcactaattgttttaagtctacattagattggagatttggtttattgagttgaggttcacctgaatttactattgcagggagctgctgcagctgttgttctgaacttgggttgcactcctgggctctttatcgtaggactatttggaattttgattttatggatgtatgcaaacttttggatcactggaacattgtttatagtcggaggtaagttttgattttttccctgatcagttctgttcttatgctcttccactgttacaatacagccactttagattagtttgttggctgggttgagtctttccggttattggtcaatgagtatttttatgcatgatctcgactatttacatggtattgatttctctatttttgtttgattcaggctatttattctccttaaatcatgctcgcgtggtggttcttgtggcgggcttatatgcgatgtattgtgtcaaagtcagacttggatggcttggtcttttcctctcaataaatcttgctttcttgtccaacgatatattaaattgtcttcttcaatggtgtgacaatctaagtgaaaaaccacaacacgaggaaccaaagaaaccgaaagaagcaatcatagaagaagactattcaagggaatttgagtatccttcagttcctgtcgaagatgaaaccgagacaaagattcacgagaataagtcttctgctaaaccaactgcgccttctactgttgttaataccgtaaaggaaatttctagtgttaaaatagtcaaaatagaagagtcaagttcagctgatgaaatgaagagaatactgaatagtttgaatcattatgaagcattgggggtccctcggcataaaaagattgatgctgcggtgcttaagaaagagtataggaagaaggtttctcctcttttccaatgctga

SEQ ID NO: 179243 - DNA, 191 bp, Arabidopsis thaliana landsberg
tggtaacagtcacaatcgttgtcaggccagattcaaaattagaaaacacccgcgtcacaatcgttgtcaggccagattcaaaattagaaaacacccgcgaagaagcaatcggggtaaaagagtcttttaataccaccaaaactactctttttcgaagtcctttgcgcaacatcccattttcaaatttctaa

SEQ ID NO: 179244 - DNA, 462 bp, Arabidopsis thaliana landsberg
  unsure (1)..(462): unsure at all n locations
atgcccgatggcnccgcccgggtggcgcgccttgcgacgtcacatggcggagccgctgcggtggccgtcggcgagccgctggcgccacgccgcatgcaggccgcgcgtctggtgtggctggcgacgcttgtgcagcttccgatcctgctggcggtgatcgtggtgacctggctcgcggtgggagccgcgctgcgggcgttgaaatcgctggtcgcctctctcgatcccgcttcgccgcggcaagacctgccggacgatgaaacggtgccgtgggaactcgcctcgctgtccctggcactgcgccggctgcttgcccgcatgaatgcagccaggcacgcacaggaacgtttcgtcgtcgatgccagccgtcgactgcgactgccgctggatcccctgcgtgccgcggtcgatcgcgcattgcaaaacagtgacgccgccgcgcgggaagccgcgctacggcaa

SEQ ID NO: 179245 - DNA, 535 bp, Arabidopsis thaliana landsberg
cggattctacactacctctgtggtccctcaactacggactcctactccgcccctccccgacatcgaagctcgtggtctacaccgacgctgactgggctggttgtcccgacacgcgtcggtccactccggttatgctgtgttcttgggcgctaacctcgtctcctgggccgccaaacggcagtccatcgtctcccgctccagcgccgaggccgagtactgcgttgtggccaatggcgtggcataggcctcctggctgcaccagcttctccaggagctccacagccccctctagcgcgccacccgcgtctactgcgacaacgtcagcgcggtctacctctccagcaactccgtgcagcatcaacgtacgaagcacgtggagatcgacatgtacttcgtccgtgagcgtgtcactatcggtgacgttcgggttctcagcgaccccaccacgctgcagttcgccgacatcatcactaaggggctaccgtcgaatgtattcaccgagtttcgatctagtctcaacatctgtacaggatag

SEQ ID NO: 179246 - DNA, 495 bp, Arabidopsis thaliana landsberg
atggcaccttttgacgtggttctactggtggtgatgctccgcatcgcaaccaccttgggcgacctgatcaacttcgcctgggggagcgcgttcgttttttgccggacgtccgaccaagttgggacgtagagcgaaatgaagcatcgggacctgtgcgcaaatgagcgactcaccagccattgagccgaagtcggcgggcggccaaaatggcctgccgccacaccgaagagagaatggcgccatttgcgcctgacccgtactttggcatctccaagtaccaaggaagtacccatgaaactcatcatccaaatcccttgcctcaacgagtccgagacgctcgcaatcgcgctagccgatctaccgcgtgaggtcgcaggtttcgacacggtcgagtggctgatcatcgacgatggctcgaccgacaacaccgccgaagtggcgagggcaaacggcgtcgatcatgtcgtgcgccatcccgtgaatcgaggcctggca

SEQ ID NO: 179247 - DNA, 163 bp, Arabidopsis thaliana landsberg
ccctaatggaattgaacaaggaagaacggtgattgtaaacgacgattgggccttgttctctccggcgatgactggaatcaaacgccgacgacgtttaccgttctccatcttcttaaacttcaaaccatcaaaaataaacataatccaaaacaaaccctattaa

SEQ ID NO: 179248 - DNA, 420 bp, Arabidopsis thaliana landsberg
atgcataaacacggccaccaatgccgtacagcagcccctgcgcaccttgtccttgctgttcttgatgcccttgaggcttgccgcatcctccaccgccggtacagccctgagtgtttcttgatagtaaacgccgcggttcagctcggtctggagctccttctgctgcagggcctgatgcagcagttgacattggcgttggtatcaggattgttgggttgccaacgttgagcaagacatcaaaggggaccaggttgactgcctgccacaacacaaacacacgggagaaacgcaactgtgtcatatgccgctggcgtcacgagctaaagccctggacaagcagctttattaacggcacgagcaggtgtagactaggctgcatcaactttgcggatccacaacatgtgcacacgctgctcgccg

SEQ ID NO: 179249 - DNA, 425 bp, Arabidopsis thaliana landsberg
atgttctataacagcggtttgatcggtgccggagaacaggagctggatacctcgcagacttttacccggaaatttgcagcagcagtttacctgtacgcgcttacaggcaacatcacttacaggaattatgtggatggacattatacccacatgcatttgatcgcctggtcgtttgcctacccttttgaaggaagcgagcaggacgcgcttttgtattatgcgggtttgcctggtgccaccagcagtgtacgtaacgacatcctcaacaattattcgaactcaatgagcgcctggaatgcagataacctgccctcttacctgggcaataccgatgcttacagggcctatctcaaagacgataattatacctggaacagcaaccagaccaaggccaaacaggccaatatgtttctgggcatgaacca

SEQ ID NO: 179250 - DNA, 51 bp, Arabidopsis thaliana landsberg
atggctcgaaacgagagaacggcgccgtttgcgggactaacggtgcgagcg

SEQ ID NO: 179251 - DNA, 428 bp, Arabidopsis thaliana landsberg
atggggattaaagggatcaatagagggatattcggagttaagtcggatacaaagacagagatcgagggactggtgaagcttttggaatgtcggaatccgacaccggagccgactggagagttagacaagatcggaggttgctggaaactcatttacagtacaatcactgtattgggttctaaacgaactaaattgggtcttcgagatttcgtctctcttggtgatcttcttcaacagattgacattgctcaggtagataaaaaagaaattgatcagttcagctttttagtgatgacgtttttaatgtgtttctttttcaattaacgaagggcaaaacggtccatgtgttgaaattcgatgtccggggattgaatctactcgacggcgagtttagaatcgtcgcttccttcaagatctggtccaaatcg

SEQ ID NO: 179252 - DNA, 38 bp, Arabidopsis thaliana landsberg
atgccaaatggatttaaaccatccgtgcataatccaag

SEQ ID NO: 179253 - DNA, 306 bp, Arabidopsis thaliana landsberg
atggtggcacccacagagattaaatttgaggaagaatggtccaacatacagaaaggttttaccaagctgataagaatgatagaaggagagtctgaaccaacatttaatcctcaggaaattatgatgatgatgcacacgtgcgtaggtcgtcttatgtaatgtttggagtcttatataatgtttgtaattaccacaactatttcttatgtgattcacagggctacttaccgtatatgcgcctacaagaaccctcaacagctttatgataagtatcgtgaattaattgagaattatgcaatccaaacg

SEQ ID NO: 179254 - DNA, 395 bp, Arabidopsis thaliana landsberg
cctcgatccaggcgtcggccagccgcgaccacgtcgccatcctcaccgggctctacctctccttttacaacgtcggcagcgcgctgggcacctgtctgtccggggccatctggacgcagacgctgtaccccgtcctggagtcaaacctcgcctttcagcccaacgcgacgctggcccaggccatgtacaacaacccctttgaggttgtcgccggctaccccgtcggcaccgagatccgcaccgccatcatcagcagctacagctacgtccagggtattctgtgcgtcgccggcctgtgcgtctgcgtgcccatgattggctttgccctggccctgcgcaacccgcaaatgtcggacaagcaggtccaggacgaggcggagctggatccgagccgg

SEQ ID NO: 179255 - DNA, 455 bp, Arabidopsis thaliana landsberg
attgggtctctttttcaagcatctccaagcaaatgggaagaaagcttaccttctggttctagacaagggtttcaatcggtgagacattttgaactatgcaccaaattggtttcagattcgtctgtgaaacaaagtattgacatgacttttacttaatttttagggtcttaaacgcaggagctcagtcttagataatgatataggatctgtgggccctgtaaggaggatccggcaaaaatctaacctttcatctcgaagcttggctctgcctgtttctgagagcccactttctgtccgtgccaatggtggagaaaaaactacgcatacatctaaagatagtgcagaggatattcctggttcaagttttaaccttgttcctaccaagtccagtgagatggcgtcaaaaatattgcagcaacttgataaactggtttcaacaagggagaaatccccca

SEQ ID NO: 179256 - DNA, 371 bp, Arabidopsis thaliana landsberg
atgggggcacacttggccggcttcagctcgttcagcccactaacctcacccgacccatttccacttttgcgcgcgggcccgcccacgtacacgttgcgcgcccttcgtcaccatcgtgtgggaccgccttggcgggttcgtcttcctggcaggcgcgtgtcgtgccaagatccaaccgaatcgctatgccgctgtcgggaatctcggatcgatccggctggatgcgcgtgtactacttccgtttggactccgcatctcgcgcctatatatgtgactgcccgcgcccagctccttccatcgacaaaatccgcaaatccccatctacgggcaaaggaaagctctggccgccctcatctagtgtcgagctatga

SEQ ID NO: 179257 - DNA, 1219 bp, Arabidopsis thaliana landsberg
tcaagagacaagcttcttagagcatttcgagcaatgaatgctgcagatgttgctgaccaagttctccgtcaagttgataaattggtcagaaataacgaacgtgctgcacgtgaaaattggtcaggcaaggtaaatgttttgttttcattctttatttcctactttttctttagctctacatcacctttgatcattctgaccagtaacgtctcatgataaacctacttttcagaataaccaggtgattagtcatcaaaattcttgggatctgtcaaagaaacgaataatgccccagggtgaagatgatacaatcaatggagaggttgctccgaagcgcgtacgccataatactaacatgcatttgacccagcaagttcaaacaaatgaatccctacagggacctgtctctatcaatggcatttcctctggtaaccatctttcggacagtgagttgactccagtggaacaaatggtttcaatgattggtgctttgcttgctgaaggagacagaggagctgcctcacttgaaattctcatttctaagcttcatccagatatgcttgctgatatagtaataacaagcatgaaacacttgcctagtacccctcccacgttggcaagttcagtggctactccagcagatattgtggtatcttcttctacaaataccgtgcattctccgactcctccggcacaacttccttttgatccaatccttcctgctgggtcatcgttttccgaagtgcctagcttgagtagctcggttgccgaccctagacgcgacccaagaagggtacaaacttctatatgttgcttgattctttgttgaatgttctttctccaagataacttattcatagttatgcaggatccccgtcgcatggatccaaggcgtttaaattcatctgtgggaccaacgtcactccctgtaggtgagggtaaagaatcagttccagtacagaaggacatctctaccttactgagtaagccagtctcagtttctgctgtcacgccaggggctactggttctatacattcaacagcagtagagcttagccagaataagatgatgggaagttcaggaatcagaataattgatccgcctgaatgcagagaggacttgttgactgttcccaatgagtgttcttacccgtcaaaggaaatatcatccttagatgttccactatctcctgcagggatgataaggcatcaagcttag

SEQ ID NO: 179258 - DNA, 449 bp, Arabidopsis thaliana landsberg
atggagaggccctttggctgcttcttcatcctccttcttatctcctataccgtcgttgccacctttgacgatgaaccttctttccccgaaaacgccgatctcacaaaagatctagaacaaaaatgttttagcatcaataaagttgatcctaacctcaaatttgaaaatgatcgtctcaaaagagcttacattgctcttcaagcatggaaaaaagccatttactctgatccatttaaaactacggccaattgggttggttctgatgtgtgttcatacaatggagtttattgtgcacctgctctagatgatgatagtctcacggtcgtagctggagttgaccttaaccatgcagatatagccggacatttaccaccagagcttggccttatgacggacctagctttatttcacatcaattcgaatcgggtttgtgggatcatcctcaaaag

SEQ ID NO: 179259 - DNA, 524 bp, Arabidopsis thaliana landsberg
gtgcaagaggactcctccatattcttcccaaaaagggacaagtttgggcattgtatcgaaattggtcccctgaatgggacaagaatacccctgatgaagttaaacacaagtatgagatggtggaagttcttgatgactatacagaagacgatcagagtctaacggtggctctcttactcaaaactgaagggttcagggtagttttccgcagatgcacagagaaacttggtgtgaggaagattgccaaggaagaaatgttaagattctcccatcaggtgcctcattacattcttacagggaaagaagctgataacgcaccggaaggttttctggaactagaccctgctgcaactccttgtgcattctcttcagagaacgcagaggcggatgagaaaagtgaagctgtgaaagagaatgagcaaggtgaagccgtgaaagagaatgaggaaagtgaagctttgaaagagaatgaggaaagtgaagctgtgaaagagaatgaagaagtgggtatggatctagattag

SEQ ID NO: 179260 - DNA, 242 bp, Arabidopsis thaliana landsberg
atggctacacataagctgcctccaaagacagtggttcagatgcttaaggacaataacatcaacaaggttaagctttttgatgcggacgagacaaccatgggtgcactcgctggctcgggtcttgaagtgatggtcgctattcccaatgatcagcttaaggttatgactagttacgatagagccaaagattgggttcgtaagaatgtcactcgttataacttcgatggtggtgtcaatatcac

SEQ ID NO: 179261 - DNA, 191 bp, Arabidopsis thaliana landsberg
atgcatgttgggaaaaagagggtctgggtatcggttgtggtggtccatcctttcatgaaaggtttgtttttggttcagataagtctatcggcgacaatttacggtgggatttgctagctcctcccaaaggtttgtcttcgagtcttgtccgcaataaagtattccttgttagcatcggatgtggaagatga

SEQ ID NO: 179262 - DNA, 1950 bp, Arabidopsis thaliana landsberg
ttgaaaggacgagtcctggggtataatcatccggattatgcagagacaatgtatcatcttggaacggtactttcatgtctcatttttcttgattttgttaatctccatgagctctttaaacgtataatgaaaagaacacttcttttcttgagattcatgcatattagccacatattgtcaccctgaacttgataagtagctctcgcccagtcagacatatgataaaatgcatctaatatgacgcatccatgctgtcatgaagtctgatttgaatctatgattttcaacttccttcttacatatgatccgatattcgacaggtattacatatgctaggaaaaaatacagatgcggaagctcttattctggattctcttaaaatacttgaggcatgtcggtatcctaaaaatactgatatttgtgccatcttgacgttttattttgtcaattggatgcatctttattgtatttttcgtcttctgatgtaggaaggtggtcaaggagagtccatggcatatatcaggagactgagatatctttctcaggttttcttgccttaaactatacttgtaattgggatgtcgccttctattcttacaatgcattgatttgaagcaatgaactaaaccacagaaattctgttattttacattctcgtctgttgtttcagatatatatacgatccaatcgtctggccgaggctgaaaagcttcaaaggaaattattgcacatgatggaattatcgaaggtgtggttttttcttacataactttcctttcgctgtcgagtttaagaatctttttcgttgatttagcatcttacaatccttgtgttttgctgcatcctcttttcgtccttgcaaattctaactttctaatctagtactgtaggaaaatgttctaacttcctggtatttgcatggtggaatagacaagtttaaatctttcagatattgtgcagttatacaggtctataattgggacgatagttttttacttaaacgagcttaattatgcttttgaactgctgatttcacatcagtcataagttgaggagatcacttacatagatgtagctagttgcatccattatgtttatgattctagtttataacttcgtaatggctaaaatctatgacagggatggaactcaatggaggcaataactgcagctgaagcattggctctcactttacgattatctgggaagctgggagaagctctagaactttttgaaaagtgcgtacataaagtcttgattaggttatcagagtaatatgatgattccaaatgtatataactaactctatgacaatcttcctgctaggtgtctcaatgcccgaaaaaaattacttccagaaggacatatccaggttcactctcttgtgtaaaacattcatctatatattggaaatagagtgatattcatcttatgtcctctcctggattgatagataggtggaaacttgctgcacatcgcaaagacatttatgcttcaggctagtcagatgagaagaactgataacagtgaagctctatccaaactagaaaaagcaaagaattatcttgaaaactcagctaggttggtatctatatatctttctgtactagctctcttttcttagcttaagttgatctttgagtttttaatcttcatgtataaaaatgtgacaaaataaatgttggtgtaaaccaggatagcaaaggacgttctgcataagcttaaaaaccaaaagagcaaagcgcagaaagacgaaaaatccagtgcagctcttaggaattatgaacacgcggctttagtcatactggtaagtctctatagaagcaatacttgggaattatatgctcttaagaacaattcgtttgggaccttttctattcgttgcagctgcaatctcttgagagtcttgcagctttggagatgagcaaaaatgagatccatgagccaaag

SEQ ID NO: 179263 - DNA, 99 bp, Arabidopsis thaliana landsberg
atgactgggaaaacttatctgccgcacatcactataccgagcctcattaagcttcataaagcctgggaagacctcatcaatgaacatatgcaacgcgcg

SEQ ID NO: 179264 - DNA, 681 bp, Arabidopsis thaliana landsberg
atggaagatccgaaaatagattttacgagtgtaagttcactattaccacttctattctaatgtggattactaatggaatgaatgaacattccatcattgtaatatgtttgggatcctgtttcttttgttataatatcatcatcagttcccaagtgtagaatgattgaagttttcatgcttcccttttgtaagactatgagtcacaagttaatgtttataataaacattcatgtatcttgtctccccattcttttcctctgcttaatgctatttgtttttgcttaatttagctggaaaacactgtgaggcttttgctggaactggagcctgaatcggatcctgtttggcattacttaaatgttcaggtcagtgtattatatgtttttcttttcactacggttttccattgtttagtgctgagtagtgtttggattcctgatacttttgattttaatatccgaaggtttctctcttagcctctgctattatgcatctctttctttcatgattgtggtcttacatgacacctcttcaaaaatacacattatatatggtttcctagactatgtatataaatttttctggcttggttctttcttttatcagaatcataggatccatgggatgcttgaaaagtgtacatttgatcatgaagcaaggatggaaattttgcgcaaccag

SEQ ID NO: 179265 - DNA, 52 bp, Arabidopsis thaliana landsberg
gcgagttaaccttcttgcgtccctgagcgagctcgagcatgagtcctacaag

SEQ ID NO: 179266 - DNA, 921 bp, Arabidopsis thaliana landsberg
tcatcactctccaacttcaacaacttcactcgatctctgattaccatcttcctcaccgacccttgaccaaaccacgccatctctccatcgccttatcactcgacatactcaacggagaaaggagaacgaagctgctctcaatccactcgatcgcgaagtacaccactcgatccaaccctcttactttgtcgctcaacaacaacctcctcatcactcgacctcactctcatcgcttcatcatcttcaatcgttttgtttcaatcactcgaccggttccccaaattcaaccacggagaagaagaggagtatatactcgatcgcttcacaagagaaaaggagaaagaagctactcggcctccttaccaggcgaagtcttcttctcaccaatcctggagttcactcgaccacagtgaagttctcttcgccatcatcggttttcaagctcactcgatcgctgaccaagtcttctttaaatcaacgacgccggttattactcaaccatacactcgatcggttcacaaataagcaagacgaattcgatttccaaaaccaacaaaatctctcgaccggttattactcgacttactcactcgaccgtgtgctttagtgtttttggtttcgttggaactaacgtattaacgtttctctttgagttccatctgtttacaggaaatcaacatgcgtaactacagtagtgagtcttctatggatcgagagtatattgtggatgaagctgaatcttggtccactagaccagagagagaagaacatgcttacaagagcttccgtgaagaaatagaacgctcagcagctcgacgtagtcagagaagagctgaaatcgctagaggaaagagagcaaagtcgagtaggtatgagttgattgatgaggacatcgagactgagtatgagccagagtcatag

SEQ ID NO: 179267 - DNA, 198 bp, Arabidopsis thaliana landsberg
ctccagtatcgtagtgtaactctcgaaatctccataatcaaaggttttatcggtatgactccaaattttctctattggtttggacaaagcgaccaatccagaactcttagcaacaaccactacgagaccattgcagaggaggaacatgtagtttttatctactgcgtgtgttacgagttggatcatgaatctatataa

SEQ ID NO: 179268 - DNA, 139 bp, Arabidopsis thaliana landsberg
tttttctggaagaagcttcaaagacaacaacatatcaacctcctccaaaagaattcaaccgccaaatgatgcttggcctgcaaatattgaacttacggtcatcagtgttacatatttaagaacatctgacgctttgtaa

SEQ ID NO: 179269 - DNA, 104 bp, Arabidopsis thaliana landsberg
aatctgcatctatcggcaatgaatctcctttaggtagtgccgttgatagtgacaatgaggatgatgaagaagacgaagatgatgaaactgacaatctttcttga

SEQ ID NO: 179270 - DNA, 874 bp, Arabidopsis thaliana landsberg
atggaattggctgctattagcaaaggattaccctcagtattacagcttgatcacgacacattgcagaatcttgaggtgtatagaggtatggtctctcagatttagttagtaggggatttggtaatcacggcctaacggtctacttagtttttaggctttacaatcaataattttgggtaatttattttagtgtttttcctctctgaaattttaagcttagtattaatttttatattcttagtttggtatattctatggcctagtctggaatattcaatgttgatgtagcatgttagaacactgcgaagattattttattgtaattacattgatttctagattgggtagtagcttttgtatttgctttctcttacaaatctatcttcttcatatacttatcaaaatcaagacagccaaagtaatttgcttataccttactcgattggcttagctttatacaagggttgtaatttatttatggttcctgcaattcatcatagctattctgctttttcagattctctgagcacatttccaccaaagtctttgcaactaaaaatgccgtttgccatttctccatggaaagattctgatgaaactgttggaaaccttctaatggtatgttgtattgatctttaccctctctccggctgctacctctcatttaaaattagtattatgatcagaataacttggagaccaatttgaaatcagttggatttgtttttccgtgtattatgcacccttttgcagatttcacatatcttatgttgtgattgcttttcaggtttggagattcctgatatcattttctgatgttcttgacctatggccttttacactggatgagtttattcaggcttttcatgactat

SEQ ID NO: 179271 - DNA, 79 bp, Arabidopsis thaliana landsberg
atgaaactgcagggtgtgcgttttgagcatgtaggacaacaagaggagaaaaaggcagcagcaattttgaacggaaaag

SEQ ID NO: 179272 - DNA, 179 bp, Arabidopsis thaliana landsberg
gatattcataccaaggagataaaaatggacgtggtagactaattaagatgatgttcaaacaggtcacgcacattgcaacagaacgaacagaacatcaattgttgttgttggcttatcggtttaggtcatccttctcagacgtggattgtgtcttcgtttcttcagaatccatactgtaa

SEQ ID NO: 179273 - DNA, 797 bp, Arabidopsis thaliana landsberg
ctggttctcattctggaaaagtagaacccatgggtaaagagcagtgctatgctattatgatccaggaagagcctagagagattgatttcgccaaacaggtggaaactaatgttgtcgttgttgagacaattgtggaggaaatgattgtagaggatgatgaacttttatttgtggagccgccaccctatatccccctaagttgccatttccaggccgtgcaagacagatttaaaagaagaaagagtatgcacgctttgaggaagacagatcatgaaacagttgtatgtcagactccctttcttacaattggttctccatgttccaacctacagaaattacttgaaagatatcttgtccaacaagacaaggggttaagttgatgtccaaaggagaagagtatgcttagctggaggagtctgagagacaacagaaggaatcttagctcactaatgtagtagaggtgttagctgggaaagagatggtcagtacatgtagtgccatccctccagctactattcccgaggaactcggtgatccaggaagttttgttttaccttgccggattggaaagtctatgtttgagagatttctttctgatttatgagctggagttaatttgatgcctctttctatgtcaaagcgcctaggcatcacatcaattaatttgatgcctctttctgtgggatatccagtgggattggcggagaatgtgcatgttagagttggaaatttctacattccaactgattttgttatcatggaacttgataaggaaccacatgatcctctcattcttg

SEQ ID NO: 179274 - DNA, 464 bp, Arabidopsis thaliana landsberg
gttcttgcttcattgataattaggttggctttagccgagacattttgcttaaactgtggaatattagcccttgatgagccaactacaaacctggatgggcccaattcagaatctcttgcaggagctcttcttaggtaagacttcagatctatacccctaatgagttatgatgatggtacatgggtacatataataattcctcttacatagacatttaactctctaaacactggagtcattattgtgactttcctgtcttttccgtataatgttgttacacatcctaagaccattgctctcaacattggatcatattatgtcgttgtattctccaggatcatggaagacagaaagggccaagagaatttccaactcatagtcattacccacgatgaacgctttgctcaaatgattggccaaaggcaacatgctgaaaaatattaccgggtcgcaaaagatgatat

SEQ ID NO: 179275 - DNA, 821 bp, Arabidopsis thaliana landsberg
atgagtgtgaataatgccacacattactttcattttggagatcatcaagaatactacggctgttcaccggagatcaagcccttgttccgtccggccacaggagagcaatcttgggtacgtatatattcacgtttgaaaatcttatagttaatatgagagacatttaatatatacgcatgcaagaaacgaaataaaataaatattttgtgtgaagcagggaaatagtgaaggagggatacaagctgagccaaatacaaaagtgggacgctattcggtggaggaacgtaaagacagaatcatgaggtacttgaagaagaagaaccaacgcaacttcaataagaccatcaaggtacgtatacatatacatactacactcattcttatttagtttagttaattacatattcatttttgaatgttttcaaatgattatgtgtgtatgcagtatgtgtgtcgtaaaaccctagccgacaggcgtgttcgtgttcgcggccgatttgctagaaacaatgacacatgtgaagaacaacctcacatgtctaagaatcacaacaaccattctgaaaaagaggaagatatgttttcaggatcagacgactatctaatccaggtatttatttaattattccaagacactagtatattattatatgccatcattacttgtaatttgtaaatctaattaaccaatgcatcccaatttaaagcagatggaacacgatgacggatggcttcacgaagcaatgtccaatctgattccttttccttgtgaatttgacgctcctggagatgctcatcatccaaccaattggagcttctga

SEQ ID NO: 179276 - DNA, 344 bp, Arabidopsis thaliana landsberg
  unsure (1)..(344): unsure at all n locations
tatgcacatgtggctactactacggcgccatcatcaccgccatcttcagtccgtgctaccctgcgcgacccggcctggaagcgctgatgcaagatgagttcgacgcgctcacgaacaacgacacctggacactggtgcctcagccggcacacgctaatatcatcaccggcaaatggattnnnnnnnnnnnnnnnnnnnnnnnnnnnnnccttgaacgccgcaaagcccgatgggttgtacgcgggttctcgcaacgactagnggtcgattttcatcagaccttctcgccggtgatcaagccggccaccatccggacagttcttcatcttgcagctacccggtga

SEQ ID NO: 179277 - DNA, 1740 bp, Arabidopsis thaliana landsberg
atggctctaaacaagctcctcagtttgactttccaactactcctttttctacttagtgtttcatcggaatctccatggatcgccgaagatacgtctcaaatccagacgaagctcctcgaattcgcgaagagtccggaggtcttcgattggatggtgaaaatcagaaggaaaatccacgagaatccggagcttggttacgaagaactcgagaccagtaaactcattaggtcggagctggaacttatcggaatcaagtataggtatcctgtagctatcaccggtgttatcggatatatcggcaccggagaaccgccattcgtcgccctgagagctgatatggatgctttgcctattcaggtgtattaccaattcacataattctcatcgattagagacatttaggtattttttgtatgaaacttgatcataggtttaattatacataggccaatacaaatgtctcttaggtaatgacgataatggaatttgaattaaggattagaacataatttgactgattctaaaattcaggaaggtgttgagtgggagcacaagagcaaaatccctggtaaaatgcatgcttgcggacatgatggtcatgttactatgcttcttggggctgcaaagatacttcatgaacatcgccaccatttgcaggtctatgcatttttcccttttgaactactttcatcagtaacatttggcctaacacattttgttttgttttgtttagggaactgtagtgcttatctttcaaccagctgaggaaggtttgagtggagcaaagaagatgagagaagaaggagcgttgaagaacgtcgaagctattttcgggatacatctttctgcccggattccctttgggaaagccgcttcacgtgcaggttcatttttggccggagctggagtcttcgaggctgtaatcactgggaaaggaggtcatgctgccatccctcaccatactatagatcctgttgttgcagcctcaagcatcgtcctcagtcttcaacaattggtttcacgtgaaactgaccctttggattcaaaggtttcgttttttactctttgatgatcttcacacctggtctatacattatagaacagaactcattgaggtttcttctgcaggtggtcacagtttctaaggttaatggaggcaatgcttttaatgtcatccctgattcaatcaccataggaggaactcttcgagcctttaccggatttactcagcttcaacagagagtcaaagaggtgatgcgacccaagattgcgcctataatatttcccggtattgttgctttacccatagaaccaatctccggtttcaacttttgattctaggtgattaccaaacaagcagccgttcaccgatgcaatgcgtccgttaatctaacaccaaacggtagagaaccaatgccaccaacagtgaacaacaaggacttgtacaagcaattcaagaaggtggttagagatttgttgggtcaagaagcttttgtggaagcagcacctgtaatgggatccgaagacttctcatactttgcagaaacaatcccgggccatttctctctactgggaatgcaagatgagaccaacgggtatgcatcgtctcattcaccactctatagaatcaacgaggatgtgcttccgtacggtgctgcaatccatgcatcgatggcagtacagtacctcaaagagaaggcttctaaaggttctgtctcaggctttcatgaagaactctaa

SEQ ID NO: 179278 - DNA, 631 bp, Arabidopsis thaliana landsberg
tgcctaatctctaagctttttgtttcctttgcacgtacattcaaacaggtacaaaaacagattaatgaagtcgggtactatgttgatattgatgaaagtgacagaagcctccgtaaaaaggtaaattcttatgcattacaagctttccaaatgtttaggtctttgagcatattatacaagtgagattatttaaggccataaatttttatctcgtaaaggctagttgtctaaatttcattataaaataaagtcgttttttcttggtagatatgaatgtatatatagaaattgcaaagaaaatgcatagttatatgtgttcacgagtgtgatgattttgttgtgtttgtaggtggcagatgctcgggatgcaccatacaactacatactggtcgtaggtcaaaaagaggttgcaactggacaggttgagtgtctcacttttttctcatgattcatatctctttgaccatcgagcttctcaaacattgattgatctttttgttttgttggactgtaacattttcaggtgacagttcggctcagagaggaccctgaaggccgtaaagacttgccagagatgagcatcgaaagtttgcttgatgaattcaagttcaagacagtcaacttcctctga

SEQ ID NO: 179279 - DNA, 710 bp, Arabidopsis thaliana landsberg
gcagagaaaacagttatatggcgcctactaggaagtcgaagagtgtgaacaagcgtttcaccaatgaagcgtctccagatatcaattttgggagcgcaagcaaaaccaagcaaagagtgagttttgtttgtcttcattgaccaaatcttatttgggataatcactttgttgtttgtcttattgaccaaatcttcacttggactcttcttgatgctctttggtgtttttctcattgtagaagaagaaattggctgataagctgggacctcagtggaccaaaagggagcttgtgcgtttctatgatgcttataggaagtatgtgggagactggaaaaaggtaaactttgttgcactatatggttttatgtatgtgtttcctcaatctttgtatgacttttaagttcttctctggaaattgcttaggtagctgctgcagtacggaataaccggtctgttgagatggtcgaaacactcttttgtatgaatcgggtatgaagtacaagaatatctcactgttcagttttgttttagtattgagccggatattatttgcctaggtttcgttctaaacttagtattgagatggacattatgttacctttgattcattttgatttgcctttttctcccaggcatacttatccttgcccgagggaactgcttctgtagctggccttattgcaatgatgactgatcactacagcgtcctg

SEQ ID NO: 179280 - DNA, 759 bp, Arabidopsis thaliana landsberg
gaactgatggtgccagaagacgccagactcatacaaaacatgaagctaagctctactgcaactttctcgatcatgtgggatggcactatacaaagcgtggagaatacacggttaagtcgggatattggttaaacacgcattcaccagggcagcagaatgactttgttccgccaccaggattacttgaattcaaagaagcaatctggaagttacaaacagcccccaagcttcgacatttcctttggcgaattatcactaatacacttgccattggttcaaatttgacacggcggaaaatcatcatagatccccaatgtaaacgatgctgtgcggcagaggaaacgttagaccatctattttttggttgtcaatacgctcaggcaatttggagaggttctcaagtctccaacaccagctttttcgatgcaaccctatcattcgacgataaaatcagaatcattctccaatgctgcaacaacaggagctacgacaacttaacaagacaaacaccgttatggatactttggagaatttggaagagccggaatttgttagttcatcaaagacgggatagtctatggtacaaggatgtacaacaggcaatcacagatgcatatgagtggattccagagataaaccatacacaaagtcagagatctctcacatcaacaaagactgcttggcagaaaccgcctccaggatctatcaagtgcaattatgattgcaactatctttgtgatgatatcgagtcaaaagcag

SEQ ID NO: 179281 - DNA, 1225 bp, Arabidopsis thaliana landsberg
atgatcggagcgttaaaggttggtgcttgcttgcttcttacgcttcccgaagatgtgttttctgttatctctcactttctttctccaagcgacatttgcaatataatcttgtgctgcaaaagtctttgtgcccttgtcgattcggagaagacatggcttgttcaatatgaagtcgttaaggttcttcctttcttggaaatagtccaatggcgaatcgggatctcttcttacaaggccctttgtaggtttcttgtagaggtggtgaagccgcttcttgggatttgggtgcaacaaaaccctgaacttgggaatgttgtttatgtgatgcctggtttcttgtctgttgttgggtgccggataattccacaaaaggttgctccgttgtggattcaagagggtcgagtcaagtggtcaccggtgtttgagataatttgcggctttgatggctctaaggggtttttcctccatggaagagacaaagaaggcagttgcttataccctggtttcgttatggacatcgagaagagttgcaatgtgcttcagcttgaaattgagccgagggaagagaagagttcgtgcaatgagattgagagaggagcctcaagaaaggagggagagattccattttggatgctcgcttttagcgatagaaaacacttgctcaatattgtcacaaaccatgtaggtctacatgtggtggaaccattaaatgatatgttatttcccacattgaaagatgatgaagtaaagctgaatgaacgcagaaccattctccttaaaatgcacaagtttggtggaaattggaagaacatgaatttggaggaggaaagtcagttgagttacaatcccatgcaggtaaaaataaacgagatgttagaaaatctcgatgatgactttttttttgaattgcatgaggatctgatagaggtcacaccaacggagagcacaaatgttttacggaagtctagttcttcaaagaacacaacaccttcgcagagtgaaattagacattcgaatcgcaaaagctttcttagctctggtgatacattcggtcttggactcaaagcttcctacactgagatgtcttattataaagggtggccagacatgtacgtacaccactttttactctataaactaccagttaagaaagccgtcgatcacgaaacgtatgctggtttgtggggaggaacgtttggctggccagctggaaaatgtcctaaag

SEQ ID NO: 179282 - DNA, 301 bp, Arabidopsis thaliana landsberg
atgactgaagccccaattcgagcaatgcacgagtttgatgtgtgtatggtaatctccttttgggaattttatttcttacaacttgatctcggtttgcatagtataatatcatacaccacttcttctcataacttggagcttctaaaacaaaattcaaacaccttgagagaaataacgtgttaacgattcggtttctgcaacctcaggacgcagttagcaggaaaatcagcttagacacattgattgatttcgcattgaaacaaggttcacagtggatgttcatcactcctcatgatataag

SEQ ID NO: 179283 - DNA, 591 bp, Arabidopsis thaliana landsberg
atgaaaggaataacaaaaaaacttttggtctcccgctctctcaaacgtctgacggccaagaaaaaccggaggaagattcatcgagagacgaacaagcgtctcaaaccggaggaagatccatcgatggtgaagaggcgtcaagactctgattcagattcgctggagaaggaggtttcagttgttgtaaccaagacgagtgatgatgagatggtgtcaacagataccaaaaagaattattttcaaagaatatggagtgatgatgatgagattgttttgctgcaaggcatggttgattttgagaatgataaagggaagagtccttatgatgatatgactggttttattgatacggtgaagaacttcattagctttcaagcgaatcaacatcaattcacaaccaaaatccgtcgcttgaaggacaagttcctcaagaaatggaacaatggtgtagatgagaactctcttgtaaatgctcacgaccggaaatgttttcaactttccaaagtaatttgggaacctacgactaaggtggaggaggtaggagattggtttgtaaattcttatcttgtacgatcaattgcgagcattggg

SEQ ID NO: 179284 - DNA, 147 bp, Arabidopsis thaliana landsberg
gtaagtgacgaagaccttgctgttgctgtggtgatccatgaaacgttggaggacccgacccgggtaatcctctatggatatagtaagaacctgacccggataatcccattgcatctcttcgatccatttcgcatttacaatagttga

SEQ ID NO: 179285 - DNA, 1520 bp, Arabidopsis thaliana landsberg
atgtatcagtcaatgaacctatctttttcttctaactttaccaacctatcctttctcaaaccacgattatactccggaatctccgccagagctcccaaatccctacatttcaaattcaatccttcctgcgtctcctccggccccaaatccgacgattcacctctatccgagaagctcatttcgctgcttaaagctgtcccaaactggtcagacggtatcaaagagagacggatgcagcagaaacgatctctctacactcacgagaattgggtcagacacagaagctctcttcgccatctccgtcacgtatcctcgagcccatcttcacgcgttatactgtctttgataccgcctgttttcttcttcaccaccgtcgcgatcctgatcgccggctataactccgcggtggatttggactggttgcctgatttcttccctgtacttcgagcttctcctctaccgtatcagcttacggctccggctttagctctgcttctagtgtttcgcactgaggcttcttattcaaggtttgaacaaggaaggaaagcttgggttaagatcattagtggaaccaatgatttagctaggctagttatttcttctgttcatggctccggtgatgaattgatcatcagagatgcgcttttgcgttacattgttgctttccctgtggcgcttaaggtttgttttgtgaagttagcttatgttgagttaggtagaggaaggttcgtgattgtgattctattcatgtgcagtgccatgtgatttatggttcagatattgctagtgatctcaagaatgtgatagaagaagatgatctgtctttgattcttcaatccaagcatcgtccacgttgtgtcattcaattcatttctcagagccttcagctgctgaatttggatagtacaaagatagatatgttggtatctttcttgaatcttttaagcatcttcattcatttgactgtgatttctgaatgtaattctctttccatagactttggatatgcactataatgtttagtgttctccttcacaggaaacaaagatgatgcaattacaggaaggaattggtgtatgtgaacaactaatgggaattccgattccactttcctacacacgactaacgtcgaggttcttagtcttatggcatctaacactccctgttattctctgggatgattgccactggaatgtagtccctgctactttcatcagtgctgcctctctcttctgcattgaagaagtacctaactttttctcgttcatagattagtcaccttttttttttcgaatcctcattatcactctttaagttggtgcttgaaatgtctgcaggtgggtgttcttatagaggagccattttcaatgctagctttagatgagctatgtgctatggtgcttagtaacagtgatgaagctgttgaatccaaagaggtcatacgcaatcgaatcatcgcaaagaaaaggatccttgaaattaagcactcatcaaatggttggcataaaatcttgaagtaa

SEQ ID NO: 179286 - DNA, 106 bp, Arabidopsis thaliana landsberg
actcctgtttacacaatcgcttcaaatgctggagttgaaggtgctgttattgttggcaagctcttggagcaagataacccagacctcggttatgatgctgctaaag

SEQ ID NO: 179287 - DNA, 529 bp, Arabidopsis thaliana landsberg
  unsure (1)..(529): unsure at all n locations
atggtaaacaactattataacccgaataccattgacgatgccttcctgtttacctggatcaacgatgctacaggatcgagaaaacaggttacccatacttactatgattatgaatatccggcctttgcttcactcctgccgggaactttcgtacagcagaatttgcgcaaacgtatnnnnnnnnnnnnnnnnnnnnnnncgctggattcagacaccacgcgatacgaccatgccacacattacagttacgatattcatggaaatgttaatgttatcatacaggaaaaccagttactggccaccaacgcgcctgatggtattaacctgccgggagaacgtttcaaacgcattgattacaactatgacctgatcagcggaaatgtaaacgaagtaagctaccaggccggtaatcccgatcagtggtaccacaagtatgaatatgatgccgacaacaggattctttccgtccagaccagtaccgatcacgtgatctgggacaaagacgctgaatacacttattatgcacacg

SEQ ID NO: 179288 - DNA, 350 bp, Arabidopsis thaliana landsberg
atggtcgcggcgatcccggtgaatgccgtgtgggcgctgcccacggttggctggctgttgttctggtcggccgccgtacgcagcaagccgttcctgtggacggtgttcattccgatcatcgccggcgtgctcaacttctggatcgccatgctgggcttgccgcatgtcggcaccgagttcttctggggcagcctggtcggccgcgccctgctcagcgtggtgccgggcagctggatggcgatctaccgcaacgatccgtcgatgatcagccagctggccagcgtgggcgacgtggacaagcacatcggcagctacggaatgatgtaccacgcgttcctgacgcccgacat

SEQ ID NO: 179289 - DNA, 73 bp, Arabidopsis thaliana landsberg
atgattgatgttatagcaaatatggatctcaggggagatgtcctcctgggaccactgagtttggaccctcagg

SEQ ID NO: 179290 - DNA, 63 bp, Arabidopsis thaliana landsberg
gaacacgacttacttaggattgccaaccctcatgttagtctagtgatgagcgacccggactag

SEQ ID NO: 179291 - DNA, 205 bp, Arabidopsis thaliana landsberg
aatcagagtgtcccaatcagataaattccagatggcagagtcagaaagtgaaaaaccaacaaaccctaacacgaataataaaaacagaggcaagcaaaaaggtcagattttaaagaaaacccgaaccctaaaaaagtggcgagaggaagagaagggctcaccaggaagagatacaaaagttgcagaaattgaagattctcagtag

SEQ ID NO: 179292 - DNA, 95 bp, Arabidopsis thaliana landsberg
caagcctagatgaatctgatgacaaatcaaagccgccagttgtgcagcaaagagggcgttttaaagtaacttctgaaaatctcgacatcgagaag

SEQ ID NO: 179293 - DNA, 345 bp, Arabidopsis thaliana landsberg
gtgatattaacggcaatgatcaccatcagctcataaccgcatcatcaggagaacacgatattgatgaacggaaaaacaacattcctgcggcggcgactttgagatggaatccgacgccagagcagatcacgacgctagaagagctttacagaagcggaacacggacgccgacgacggaacagatccaacagatagcatctaagcttcgtaaatatgggagaatcgaagggaagaacgttttctattggtttcagaatcataaggctagagagagactaaaacgccgccgtcgtgaaggtggtgctattatcaaaccacataaagacgtcaaggattcatcatcag

SEQ ID NO: 179294 - DNA, 343 bp, Arabidopsis thaliana landsberg
ccttcttttggttaggagaaacacaagatacgaaaaccatgaaaaaggtaagaaaatatcttcctagaaacacaaagcgactgttttgaaggaaatgaacaattcgtttcttacttttcacactaaaaagtatgaaactttttgttttctagctagctctttgcatttgatattcgttttgtattcttctgtatgattttgatgcaagatgattaatttttatttctagattggaaaacaggagaaggagattgatggaggaacagctaacgaagttgaagaaagacaagttccaactggatccgaccctcttcatcataaacacattccttttactccatag

SEQ ID NO: 179295 - DNA, 324 bp, Arabidopsis thaliana landsberg
atgaaggtaataaaggagacagtagttaagaatagagcatcaggaaaggaattgggggagtttttcgagaccatctttggagatacggaaagtgtaactatgagcatagagattgcgactgagtacatatttactctgtttgtgattgctaacgaaacaacaccaggggtccttgcggcaacaataaagctcataagtgataaccctaaagtcatgcaggagttacggagagaacatgaaggaatcgtccaagataagattaagaaggatgagacagctgacctaacttgggaagactacaaatcaatgacttttacccagatg

SEQ ID NO: 179296 - DNA, 415 bp, Arabidopsis thaliana landsberg
atgcccgcaacacctgacccgttcccgcggccgagctggcggttgccggtgctgggtgatctactccgggtcgacatggcacgtcctgcccagggcattgccgatgacatcgtcgcgttcgacgggctgatggagcagcgcatcttcgacatctcggtcgtttgcgtttcgcgcactgacctcgtcgatgagatcaacgacgaggcccactgggagaagcacgtcggacactcgctgcgcaagcttcgcccagtgagcggcgatgggttgttcaccgcctacaaccacgagccgaattggagcaaggcccacaacatcctggtgccgctgttcaccaaggaggcgatgcagtcttaccaccgctcgatgctcgacaccgtgggcgagttggtcgacgcatgggggcagcgcagcg

SEQ ID NO: 179297 - DNA, 519 bp, Arabidopsis thaliana landsberg
acaagacgacggcggagtaggcggagggatttcgtccgccgttcatcacatggagatcggttggccaacaaatgttcgacacatcactcatgtaacattcgatcgattccatggctttcttggtctccctcacgagcttcaagttgagattccatgtcgagtccctagtgcaaggtaatctctcaaaatttcactactgctttagaatctgaaactggatctgaaattgtagcttcttatttaatggtggattctctttgattaatgcagtgtgagtgtgtttggtgtatcggcggaatcgatgcaatgttcttatgatgagaaaggaaacagtgtcccaacgattctattacttatgcaggagagactctattctcaacaaggtcttaaggtaatgggaattggtaatcaattttgttgagaaatttgttgagaggagactgaatttgatatcttgcttttgttgtgtaggctgaaggaattttcaggataaaccctgagaatagtcaagaggaacat

SEQ ID NO: 179298 - DNA, 1251 bp, Arabidopsis thaliana landsberg
  unsure (1)..(1251): unsure at all n locations
aaagtcatcaatatattggagagccaggcgggaccaggtggtttgcatgagaatactatgcttatagtaatgggtgaccatgggcagacattaaatggggatcatggcggagggactgcagaagaggtaagatatcggcttttttctttgactcactctgcttcaagattattaatccacctttacttctaaatccctttacaggtagaaacaaccatgtttgccatgagtacaaagaagcatacaactttggttcctcctgagttcgatacctcatcttgtaaacaaaacaaggtaattgtaacctgcgaaacatattccttggtgatcataagaattgtttttgagatttcttattactggaattctattgggttcatcttaatgtcaggacgggaatcagatgtgtatcagctacattgagcaggtcagtatcaaatttgatgtgatgtctttccatgtactctatgcaaacctcattgcaaaacttaattgttttgggttatttgcagcttgatttnnnnnnnnnnnnnnnnnntttgcttgggatatcctttcctttcggaaggtgccttgtaaggatcattgtcaaattttgtttcctgcttctattcaggaaaatatccatccgcacatattaatattcgaaatatttctatgtatatcaaatttcagcattgggcatgtcaaccctgagttatatgcccttggttccagtagctggaatttggataagtcagatttgggcaattctggcacccaatcggctgctaacgagtggatgaaacattacgttgatgtactttgtgtgaatgcttggcaggtaacagttcaaaaacttgaaactatatcttgtcacgatgttctgttttcgggctctcagtttccaattctatttatatgcaggtgaaaagatatatagatgtgtattctaattcatcggttgttggtttctcttccgatgatatgtcaaggatatcagatctctattctgcagcagaacagaattggtccaattctgtcaaacacatattgatggatagaaatggagatgacggcagtacagatatatctgcccttcttaaagagcaaattgctgaatatttgaatttcttctcaagcgttgttgaacttgcccggtctaagtggacagagttcaatctgaatctaatgattactgggtttgggatattggttatatcactcatccttcagattcttgctgttttccatggcgacaattcttatgca

SEQ ID NO: 179299 - DNA, 70 bp, Arabidopsis thaliana landsberg
atgccggctccggagataatagactcggaatcccgtagtgttggtggtcgcgctatcgatggtagacaag

SEQ ID NO: 179300 - DNA, 1844 bp, Arabidopsis thaliana landsberg
atgaccaccagagatgaggatttggattggaaactgaggagtttcaggatcttgccaatgtttcttttacctgctgttgcctttcttctctattcttcacttgttggcttctggaggatgtgtgagtcttgtgatttacttctgttatatgctcatgaatttgtcttaggcttggtgtgtctaagccgtgtcgttgtgtgtgaaatggtttggtttaggtgaccgcagagatcagcataccttggaaaaacttcaagcagaaatgttgggaaagattaatgagttaaaggaaaggaccaattattacattacacagcaacttattcaggtaagatacaacttgttctgtgtgagtgaggctagttcattcgaattctattggtgtttctggtattcctgattattttaattgtcatgttttgatgtgtgctgctgttattctttgcttgcactactttacctagttctgatagagatacagatcacttaaaagattctagctttgtcgtaggattagatcatttttcatttctgttttatgttgcaagttatccgtctttgttgaattagaagatgaccttaaatttaaccttagcaaagagctaggtattcaaaaatttgtattggaattcctttaggacagtacagccattatacaaggattatccttattgagagtctctctttttcgcttttcaagttccgctaggcgctagctttgtaactgtgaaactagtggctcaatgtgttaggcaaagctatattgtaagtttggataaagggtggttatgactctagaacttaagtgttacagttgaaattcttagtgtgatgcctcccaacttgacttaattggaaatgatactaataaaggacaggaagacctgcacttttgagttctggaattacttcttctactggtagcctagatttgcaatttgttcagaaactttaaaaagaattgaattgctgttatatcttaacggatacttgttattgtgggttttatcactattgagactggaacttgttataacatgagctattttgtatcagaggtatgaccctgacccagctgcaaaggcggctgctgcaactgttctggcatccaagttgggtgctgagtcaggcttgaaagtatttgtaggagatgaatcccaacttgagcccaccgcaggaaagaacaatgccaaacactcgggagggctcaggaaccgaaaacagacaaatacaagaggcaacagcgctgagaccactccaattcatcattcggataatgagtctaaccattctggaacaagcgaaagaatcaccggcacagaacaaaaccaacagatggtgtttgagcattataatcctcaggaatatgctgctcatgatggtagctggatctcacgcattgctgctctccttgtaggcgaagatccaagtcagtcatatgcactcatctgtggaaactgccgtatgcataacggtgagtgagacattatctctgtcttttgtcttctaatacacactagatgcaataccattgataacttaattgtacaatgtctctcttcctctctcaacatgcaggactcgcccggaaagaggatttcccatacattacttactactgtcctcattgtcgagctctgaacaagccgaaacattcagaagagcattcacttaatgctcctgcagatacactccctaaagtttctctaaagccaatggaaagcgaagtgatcaatagcagtagctcgactagtgaacacggtaacagtccaatccctttgttacacactccagaaatcgtggaagaagtcccggaaacagctgagaatgagacaccaaactga

SEQ ID NO: 179301 - DNA, 118 bp, Arabidopsis thaliana landsberg
tgcaataggcatatcactcgacaaagacaccatgactagacacctgaaaactagctttgctgagtgccagagtcaaggcactcgtaaagacaccatgaatggccacgtggaactttga

SEQ ID NO: 179302 - DNA, 175 bp, Arabidopsis thaliana landsberg
  unsure (1)..(175): unsure at all n locations
atgcggaagctatctctatacccaactcgctctagctttccttgcgccattgaagcatgttcgtctctatttaatatcttctccggcaaacagacccatcagcaagcttttgtcttcggttatcaatccgacatctttgtgtcttcggcttatgatcgattatgtattcaactnt

SEQ ID NO: 179303 - DNA, 100 bp, Arabidopsis thaliana landsberg
atgaatgtgagagagagagagattttggaaaacgaagaagcgaagcaaaaagcccactactacaaacaacactcacttaaccaaactaaacgacgatctg

SEQ ID NO: 179304 - DNA, 165 bp, Arabidopsis thaliana landsberg
atggacggcaaattgatttcccctaataggtgcaagggcacttgggggtcgccagaaatgtctggtaggtgccattggttgagggtggatacatttgcctttttcgcagacgattttgggcattttggattatcgattcggatagtactgaaggtgtacaaatag

SEQ ID NO: 179305 - DNA, 189 bp, Arabidopsis thaliana landsberg
atggaaaatagtcctcgcaaattgctagagaattgcaagacgtttacaaggaaagagaacaacctcgcaactccgtcgcaaaatttggaacgaacatttccctcgcaaatttgcaagacatttgcgaggaaattgcgtggaggcgaggattcctcgcaaaaacgtcgcaactttgcgagggaattgcgg

SEQ ID NO: 179306 - DNA, 310 bp, Arabidopsis thaliana landsberg
atgatcgacgagtggcagatcaccctcgaactgggcgacctgccgccgcgcatgtgggatttcctcaagcagaacaagttcttcggcatgatcatcccgaagcgctacggtggtctggagttttccgcgctggcgcattcggcggtgttgcagaaactggccagccgctcgatgacggtggcctcgaccgtggccgtgcccaattcgctgggcccggccgagctgttgttgcattacggcagcgacgagcaaaggagcatttcctgccgcgcctggctacggccgcgagattccctgttttgcatgaccg

SEQ ID NO: 179307 - DNA, 617 bp, Arabidopsis thaliana landsberg
atgacgaatcagcaggagcaacacattgcgatatttacaacagctagtattccatggcttacgggaactgctgttaatcctctcttccgtgctgcctaccttgcaaatgatggggaaagacgggtcacgttggtgattccatggctgactttgaagcaccaaaagcttgtctacccaaatagcatcacttttagttccccgtcagagcaagaagcttatgtccgccagtggcttgaggagagagtctcttttcgtttagcctttgagatacgtttctatcctggaaaggtatgactctcaagaatcttcttttgggtaccaaacacatactgcttcctttcatagagtcgattgtttcatttccgtgtgatatagagttgaattcttccatttcttttacgtagtactctgtgactgtgttgtgccaaccttagcaattcaaatttatcttatggcagtttgctattgacaaaaggagtattcttcctgttggggatatatctgatgccattcctgatgaagaggcagacattgctgtcctcgaggagcctgagcatctcacatggtttcatcatggccaaaaatggaaaactaagttcaactacgtcataggaatc

SEQ ID NO: 179308 - DNA, 415 bp, Arabidopsis thaliana landsberg
acgaaacccgagcctatagtgcaccgtgatcttaaacccggaaacattttgattgaccagaactacgtaagcaaaataggggacgttggattagccaaactagtgcctgcagttgctgaaaacgtcacgcagtgccacgtgtcatcaaccgctgggactttctgttacattgaccctgagtaccaacaaactggaatgctaggtgtgaaatctgatgtctactcttttggtatcttgcttctcgaacatgctcacagcgaaaaggccgacgggtttggcttataccgttgagcaagcaatggagcaagggaaattcaaggatatgttagacccagcagtgactaactggccggcggaagaagctattgttttggcagagattgctcttaaatgtgcacagctgagaaggaaatga

SEQ ID NO: 179309 - DNA, 428 bp, Arabidopsis thaliana landsberg
atgctagttgataccgtttctttagtcggaacaaacgacagtatcttaacgggtactggatcaggtaacccaatgattctgtccatctctttacaaaaatcaagaaaatgtcaccgaccctgaaatagaaacacaatcattatctcaagccaaccaaacaagaaaaaaaaaacacagccacacaccgaggaaaaagagataaaccctagaaagctctggattgttaggttgtgatgagactatttccagtgaaattcagtaaatgctcaatttttccgcctctgaaccggaatcagaagataaatcaaaagcgcctgaagaactgcggaagcatttctgaaaactctacaattctgaaatcgaaaaagggagaaagaagaagaagaagaaaggtatcagagcttcgttgtgacacactgacacagtga

SEQ ID NO: 179310 - DNA, 188 bp, Arabidopsis thaliana landsberg
attctccaacagcgaaagccattcgacttggaggtcttttaagatcagaacgtgcaagaaaagtacatgcctacacaaggaatcagcagcgctatcacgattggaaaatacttttcactatgggggtagttaagctaaaagtggatagtagctatttcacagaaacagaaggtcctacaattcaatga

SEQ ID NO: 179311 - DNA, 98 bp, Arabidopsis thaliana landsberg
gttatggacttcattaatgatggagttgtgtctttggatgctttcatttctgcttatacaccagcagttttcatcttagcatgtcctgttgagacaag

SEQ ID NO: 179312 - DNA, 107 bp, Arabidopsis thaliana landsberg
gttctttggaggaaatggttgctggagtgacttggccgtccatcttgccaccgggttggactgtcgagtgggaccctgcctcggctgaggaggagcatgaggagtga

SEQ ID NO: 179313 - DNA, 241 bp, Arabidopsis thaliana landsberg
atgagaggaaggtatttccgggatttgtccattgtgagggccgacgaaggggagaagacttgtccacaccctgaagaaaatgaagtcgtagtgtaccgaagctttttgaaagctgggctacgatttcccttgagtagcttcgtcgtggaggtgttgaaaatcttcgaagtctatcttcatcaacttactcctgaggcaattataaggctgaatatcttcgtgtgggccgctagaagccaag

SEQ ID NO: 179314 - DNA, 478 bp, Arabidopsis thaliana landsberg
gaagaatggttgtctagagaaattgcttctggaatcaaacactaaactagatggttctagggagaagacaaaggatctgcaagaaagatgtgagtcattacgaggagagaaatatgagtttattgctgagcgagctaacttgctttctcaattgcaaatcatgactgagaatatgcagaagctcttggaaaagaactcgttattggagacatccctttctggtgcaaacattgagcttcaatgtgtaaaggagaaatcaaaatgctttgaagaattcttccagttgctcaaaaacgataaggctgagcttataaaggaaagagaatctcttatctcccagttaaatgcagttaaggagaagctaggagttttggagaagaagttcactgagttggaaggaaaatatgctgacctacagagggaaaaacagtgtcaaaagtcttcaagtggaagagttaagagtctcacttgccactga

SEQ ID NO: 179315 - DNA, 166 bp, Arabidopsis thaliana landsberg
agagatagagacgagagaactaaaaattcatacgaaactcatcggatttcgccttggagagacgagagaactaaaaattcatacgaaactcatcggatttcgccttagacgagagacgatagacgagagacgagagacgagagacgagagagaacacttctattaa

SEQ ID NO: 179316 - DNA, 172 bp, Arabidopsis thaliana landsberg
atgagcactagagcaataatacgggaaaaaagaagaaaaaccacgaaagaagagccctgcgcggaaagcgcatggaaccagaagaagaggcacaactgtcaagaccgcaagcaagttgaccccggggatgcgatgcagacaaagctgcgggcacgcatgcaaaagggaggag

SEQ ID NO: 179317 - DNA, 71 bp, Arabidopsis thaliana landsberg
taattaaaattgatctatatgtcagatactatctcaagaaacggcttagtgaacagaaggacttcaactag

SEQ ID NO: 179318 - DNA, 145 bp, Arabidopsis thaliana landsberg
aatcaaggagggttcaacaagggctacaacaactacaagcccaacccaaacctctcctacagaagctctaatgtagctaacccccaaaatcaagtgtatccacctcaacaacatcagtccaagccttttgttcagtacaaccaag

SEQ ID NO: 179319 - DNA, 192 bp, Arabidopsis thaliana landsberg
ggtttgaaagatcaactcaaaaatcgttgcatggaaacattacctttgggttccaaacggcggcgacgaacaggtatacacggtagagaggatgaacactcgtcgatgaaatctattccagacggcggcgacgaagaacaggcgtggatgagaagctccagacggcggcgaagatgtagaaacgacggctga

SEQ ID NO: 179320 - DNA, 121 bp, Arabidopsis thaliana landsberg
atcgcatggaatcgcacttgagtacgtggagatgtcgaatggacccaagtatgaactggactgtcttgctggacatatctcatacataggtcctggtgatgcaacgagagaaaaacgaccg

SEQ ID NO: 179321 - DNA, 369 bp, Arabidopsis thaliana landsberg
gtgaaggtcgccttgccgtcattgccggtgttcacggtcttggtcattggattcgcaccggtgacagtgaactgaaccgctgctccactgacaggattgtcattgctgttggttaccgtagcaaccagcgaaaccgcctgcccggtgacggatcgctggccactggggctcagcgtcaccttcgccggcgcgtttactgccgaccagttcaccgatgccgatgtattgctatcggtgatccgcggagcgttaaccgagattgtatcggcacccgcattcttgccggtatagctgaagcttgctgtcccatcggatgccgtcttggcatagccactggtcgaattggcaccactaacgttgaagtagacg

SEQ ID NO: 179322 - DNA, 1947 bp, Arabidopsis thaliana landsberg
gcttgcttagatgaatttactcaccataacattgatgttgcttgcaatcttctggagacatgtggccgtttcctttatcggtctcctgaaaccacactcaggatgacaaatatgctggacatattgatgcgcctgaaaaatgtcaagaatttagatcctcgtcaaagcactcttgtggaaaatgcctactacttgtgtaaacctcctgaaagatcagcaagaatttctaaagttcgtccaccattgcatcaggtacttactaatctccaacttccatatcttttatgtttcaataattttccattgcgcaattgtattgaaatttgttattcttatacttctgttcaaatttctgcagtatgttcgaaaattgctattctctgatcttgataaagattccattgcaaacgtactgaagcaactgcggaagctgccatggagtgaatgtgagcaatacatcttaaagtgctttatgaaggttcacaagggaaagtatggtcagattcacttaattgcttccttgacttctggtttgagccgccatcatgatgagtttgtggtggctgttgttgatgaggtatgttccttccactatatctaatagactaatacatatggcttttcatttttagctctctggacctgtaaatccgtaagttcagaaaaatcaaaagtttccgggttttactgtagaaaattactctggtcatgggtttttgcgtacagttggttcccaaaagttagatagctattacttcagatggtgttgcataaatggcttctccctggctctcgggaaaactattctgatttcccctctccagtttgaagaattgaatcatgtacaaagtttgattgttttaaagatatgtagcttgttctcttccctgtggagttataactaaaagtagtgctaaatttgtaggcaattggtgatttattatgtgcagtagtgaaaaggtctaagatgataaacttccttcttttagtcaatagaaatgaaaattgccgtcaagttgaaatggtaatgtttcttatgtgaagtctaaaagaagctttctgttgaaaatggttagagaaacatgcctataggtttcgattccatgttgtttgaaatcagaaaagtgtatggaaatattctagcatcataaaatttgatgtttggtgtattttgtttcttggttatgccgtctcatgaatttacatgcttgacttaaattttatgtatagcttttgcagacttaattcatctcacactttctttgaaggtattgcatgttgtccaagcttagtatcacatctgttttctgaagtaacgtggtacattcttttcacttgaaggtactggaggagataagggttgggcttgagttgaatgaatatggggcacaacagaagcggctagcccatatgagattcttaggggagctgtacaactatgaagcacgtagattcatctgtgatattcaagacactttatttaactcttttatatggtcatgatacttcaaaggtacgttagcctaacactcttcaagagctaatcctttattaaattataaatggtcctctttgtgtggtttagcataaaaattataatcataagtctcttctcgtgtttaccaaaaaaaatgtctcttctcgtgttactttcttttatacattcctcatgatatacagatttaggatcattgctttacgattaattctcactccttcttttccactgaattgctgttgtatatacttttatgatgttagcaagaggtgctggatccaccagaagattttttccgtgtcaggatggttatcattcttctggaaacctgtgggcactactttgatcgaggttcttcaaagaaaaggcttgatcaatttttaatacacttccagagatacatcctgagcaagggccaccttccactggatattgaatttgacttgcag

SEQ ID NO: 179323 - DNA, 38 bp, Arabidopsis thaliana landsberg
tgctgctactgatgtgagccttatagatagtcgaaaag

SEQ ID NO: 179324 - DNA, 1113 bp, Arabidopsis thaliana landsberg
ctaatacactatcccagtatctggagaagagggagcttcttcagaatccggatgaacagaagaggctagtggatgaagttccagaaattgttgcagaagaacttgaacctgaatgtgaagatgatgatgatgataggacaatagaagatagcctcattgtaccaaaccctgaggctcatcaaagtgacaaagagcaacgacaaagagatttaccagtttcttctagtgtcaagaaaagtcaagaaaattccatgcttcttaagaatccggaagagcagttgaggctgctgtgtgatgttcccgatgttgttgcagaaaaacttgaacctgagtttgtagatgatgatggaaaactagtaaatgacgtcaccgtaccaaaccctgaagccttcactgaggcgcatcaaagtgatgaagaaatacaaccaagtgatttaccagattgtagtatccagaaaactctagaagaccagccaatatggactgcttctgcaggtgcgtcccattctttgtaacttcaattcatcgataggacttaaattggttggattaatgaatcctattcgcccttgcctttgtcaaagtgatgttagatgaatgtgtccttcatagttaactaagtggtgtccaagaagtgagatattgtgaacttgatctggacccatatatttgtttgtgtaaattccaggtaataaagatctccatgaagatgtgtacgagccgccagcaaatggcataacactgaacacggactctatcactgaaggagaaatgaataccaaagtcagtcagcatcagtcaagtactccagtgattgatctctctaacaaaactcaagcacactcaaatccaattgagattattgaattgagcgatgatgatgacgacgacgaaaaggacaaaaacgatcaagcttaccagagttatgatccaaagaaggtgatgtggttctatgaataccctaaaggaaaaacacatagaccattctctctcacagatctcaaaacgtggagtgacgaagagtactttgttggagttccagatttcaaagtatggaagacaggagagagtgcagtgctactaaccaaacttctatctcagatcaaaacctaa

SEQ ID NO: 179325 - DNA, 1332 bp, Arabidopsis thaliana landsberg
agatgaccatccggagattgttttctcatcaatgcaaaatataatgattgttcttttagaagaaagcgaagatgtgcaagagcaccttttactaattttactctctaaattgggccgcaatagaagtgtgagcatactcacgttgctggctctggccactgattataatccaatttaggattcgttgttttatggaatatcagacagctcatattctgcatttatgatggcaggacgttagagatgctgcaagaagacttgctatgaaagtcatagagcattgtgcgcccaaagttgaatctgacataaagcagttccttatctcttcaatgtctggagatagccgattttccagcagtcaaattgactaccatgaggttatctatgatttgtaccgctgtgctcctcaggccctatctggagttgcaccatatctcactggagagcttttggtataattttatttttggtcttctgccactatcttgcacgtcaaatgtcatcatgactctgccatgcacaatacttttattattatgtattttgtttgaataatcactcttatccatttgttgtttcaatacttttcatgtggtatgagcccatcttttcaagtagattggtattgaataatacataatgcatactattaacatatacaggcggataaactggaaactcgtttgaaagtggttggattggttggagagttgttttccttgcctggacgtgtcatctctgaagagttcgattcaatttttttggagtttctgaaaaggctgaccgatagggtagttgaagttaggatggccatccttgaccatattaaggactgtttgctctcagatcctttgagagctgaggcttctcaaattatatgtaagctttctttatcatgccattaatatgcattagaattgactaatcttatagtgttaatacttatgtagctgctctctgtgaccggctcttggattatgatgagaatatccgcaaacaagttgttgctgttatttgtgatgtgtctgtgagtgcattgacgtcgattccagttgacactatgaagttagttgctgaacggcttcgtgacaaagctgtacgttttatgtattcagtctggttgtctctgatagttgcatactaaaatttgaagacatttgaactcatagttctttttctaattcagatactcgtaaaaacatacacaatggaaaggttgactgagttgttccgggtatattgcttacggtgtgctgatgggaaggtagacactggcgattttaattggattcctggaaaaatcttgagatgtctttatgacaaagatttcag

SEQ ID NO: 179326 - DNA, 118 bp, Arabidopsis thaliana landsberg
atgcctaatcctccgctgggctctgagtgcgtggacatccatcttcatacctgtatgctgaacattgaacatgaatctgcgtctatctgtctgctggctcgtgcatcttgcctactag

SEQ ID NO: 179327 - DNA, 195 bp, Arabidopsis thaliana landsberg
acgcagaacgctagtggaagaccgtttgacgtaattcacacagagagcgttgggcttctccacacaagagccaagaatctccgtaacgtggtcgcgtcttggcatggaatcgcttacgaaacttttcactctgacatcatccaagaactccttcgtcaagcagacatcgccgccgccaccgctgctggaacctga

SEQ ID NO: 179328 - DNA, 100 bp, Arabidopsis thaliana landsberg
atcagacatccatttgaacgtcttttggacgctagaagtctatgatcagatctccacattagccggcaaaaaccgcataggggccaagcgaatccagaag

SEQ ID NO: 179329 - DNA, 156 bp, Arabidopsis thaliana landsberg
atggagcaaaacatcggaagacaaaaaccacaaaaagtaaaggtaaagagttaatatataaagatccaatgtatggtttaacagaaattaaaaactgagttaaagaatatacctgcaaaagaacttgcgtcatacaccagcggaaaccagacatga

SEQ ID NO: 179330 - DNA, 546 bp, Arabidopsis thaliana landsberg
atggccgttcccggattctgtgtgccgcttgaggtaagtcacatgttttatccttgttacattttcgtaattaaagctaacaattaaatttcatgtgttttgtgtagtttttagcatttgaagccattccatcacttagggaaagattcatagaagaaaaagagggtgcacatgccggttgtccaaggatgtgcaaggtgaatttcaagaggaccgagataaagagtttacccttgagcgaatcaaccatgtactcggaacaactgaggttagtatttcctattattccttgagcaaatatgattctatttttttcttatatttcattgtctattatttccataggtcattgagagtataattagagagaaggctgaagaagtacctcttttggctgaaatcacgggagtagaggatgatgttgataagcacgatgttgtagttgatagttggatgaagcgtcttggtcaagggcctcaccttagatttgaggaggtgtacaacgaggatgtgcaggcacgaatggaagccccaaatgaagaggaa

SEQ ID NO: 179331 - DNA, 596 bp, Arabidopsis thaliana landsberg
atgtggtgcggtaagttgcaaccatccactctagaacaagttttttatagggccaatggacctaactaatccggagtttaaccaaaaacatttatttgatttttatatatcccacaagagtgacgatcttagaacaagattcgaatttcaaatagatcatgtttataatgattatatatatatatatacatctatatatcgcgtaaattagaattgataagctaattatattttaaagttatttatagtctacaaatagaataaaaagtgaaattaaatagaaatcaaatccaactgaccaaaatttgattttgaatgggttatcggttctgaaattaaaataaaccaaaaacaattactatgaatcggaagaaaccaaatcaaataatctaatgtacatctctagttaattattacttttgaaggtgatggttataatcttgcaattttgttttataggggtttggttcatgcactgtcacttggatagacatcaaacgtggggtatgaatgttgtgttcattgttaagaatggtagagagccaaatcagcagattctgcctccaccagatgatttgccgccttgctatgaataa

SEQ ID NO: 179332 - DNA, 422 bp, Arabidopsis thaliana landsberg
atggccactcagaagttttcattttttctcttagttttgttgatggtgttagctctcatccttccatcaataatttcaggtaacacatattttgccggagtcaaaataaataatcaaaattccctggaatcagaaacataaacatgcatgcactataatacaaattcataaaacaaggaattgatcattttggtacttacaatatcttgctaatgtgtttgtttatgcagtcgaagtcataccctgtatagcgggatcaaaatgtacaaacgatatgacatgcaacgaactttgtagatttaaaggattcagcaaaggagggttttgtcaaaaatatgttcaccaaacgatcggtcggtgttgctgccatcctacaggtttggaatctcaagagtcttccatatccggtgataccaatgtag

SEQ ID NO: 179333 - DNA, 1511 bp, Arabidopsis thaliana landsberg
atggcttccattgaatttgaagtcacagatggtacttgtcaggctgcaaattgtgaggtattaaagtgcggttttagtttggtttgtgaatcgaacaatggctgttggtatgcaaatggtgatggtattggggatgcaaatgatgatgcaaatggtgatagtattggggatgcaaatgatgatacaagtctagtggttaatatatctgataatggttcttcgggtgcaaacaatgtcgcaaatcctatgggagcggaagtcaaacaaggtagtataagtaaaattttgggtcgcttaattaggagaccgagattgttttaccatgtataattgcaaaaatgtaaatccactacatcagaaggatggaaacttgagtacgaagcaaatagttgccacagtgaataatatagctcaaaatattttattcactcatcttcattatacaagcaagatggttatatatgttaaacaaaatttgagggattacatctaattgacagatgcctaaattccattatttgctatgtgatcggagcgagcattagctcttaatgtttacctcttctgcagtagcaagagcttctgttatatagaaacaaaaaagagcaaaaaaatgaacaaaagttgccaatccaaatcaaaaccaacaatactatcttcctctaatgccttgtctaagcagagataaaacattttctagcaatacataggtcaattgacaatctcttcctgtgattcatatttgaaaaccaccatgcattggtattaaaaaataataatcaccatgcattagtgcctatatggtttatgtcacatcagaaaatcaaccgcttcagggttaactacaagatcatcattataaacatatatgatcgtagttccatagcaagactggatcaaagactgcatctggcttatatgctatgggaaaagactctttgagatttaagttgctttattataagttataactcttgattgggggtaattcagcgctttattataactcttgattgggggtaatttagcgaggaaagtccgtaacttccataaaaacgtgtaaccaatcacggacaagtcaacaaatataatacatccgtaagtactcaagttgcatcagaataatccaaagaaacaatgttgatattgatagtcaccaatctgcgacggagaggcctcatttccaatatgatctacttctgagaaattctcaatcgccgaaatattccaacatagtccaaagaaaaaaaaaaaaaaaaaacaatcttggcttaatagaaaattcaatttgcaatcgtctccaaacaacccaactagacccgagaaccagtgttatctggcttctcgccatggccgctttctcttcctcttcctcagtagaagaactgccaccgcaacatcaagttttcatcagttttcgtgggacggatttacgcgagggtttcgtcattcctctcgtcaaggccttgctaagtaatggaattaaagtcttcatcgacacggacgcatcc

SEQ ID NO: 179334 - DNA, 429 bp, Arabidopsis thaliana landsberg
atgattgttaacaaaatctggaggataggagataaatcggctttgatagacgtctatgaggttaacgcgaccaccgtgaaatttcgaatccgaaatgaagttatgagaaacagagtccttaacagaggaatgtggaacattatggacatccctatgatcatgtctaaatggaccccatttacagaggatatgcagccagccctgaagtcaattcctttgtggattaccctctctaacattccacccactttgttcacagataagggtctagaatttctctcaagtgcagtggggaaacctatacatttacatcctaaaacagaagcttgtgttagctttgatgaagcgcaaattttagttgaagcggatttgacaaaagatttacctactgaatatagcttcatgggtgaagaggagggagaattagag

SEQ ID NO: 179335 - DNA, 98 bp, Arabidopsis thaliana landsberg
atggaccgtcatagtacggacatctcacgtgcaagtgcaatgcaaagagtgcgtgctctgtgcgcatgtggacccatgtcaaacatcgcagttaagat

SEQ ID NO: 179336 - DNA, 115 bp, Arabidopsis thaliana landsberg
aaatcctaatcactactcagacaacatgctcaaagacaacaacatagaagcgattgaagattgcatacttctaaagatcaaaggaaatgaaacgaaagatgaacaagcaaaatga

SEQ ID NO: 179337 - DNA, 89 bp, Arabidopsis thaliana landsberg
atcggcggagacatgacggcggcacaagggaactctaacgagactctgttttcttcttacaagatgggaagattcgatctctctcatcg

SEQ ID NO: 179338 - DNA, 796 bp, Arabidopsis thaliana landsberg
gttcgtggcgttgttataaccaggacaaaaatggtgttagtgaagaggaggatacttccatagttataccaaagtatgacatagattcgatcatcaaggaagaatccacttcccaggtttcttcttaaacttggacataatttttatgaaatatagacaatgaaacttgtttaacacgtctttgactttggtacgtagggctcctcgtcaaagacctctagtcttatagcatctctgactaaaattgttgagaagcataggaaagaaaagtggtcttctggtgtaagtgtaagtgtaaccaaaggagcttcttccacacaaacatcagagaccgtagagaagctaaaagtgacattgaaaaagtatcgtggtttaagtgcgcgtgagctcgtggctcgttcagatttcgaagagatactggcgactgctgcacgttatgaggagctgagctcggcctcagtaagccacatttcgaggctgggcatgtacagaagtgtgatcaaagaaggaatcaaggcctctcagcgagttcagcttgcgtatgctcgtactagattgctcaaagaaatggccgtggagaagcagaaaaatgtagacgctgagttagcattagtcaaggctttggctgagagaggagacatgttgtacgtgaaaatatttgcgatcaagaaactgatttcgaaacttgaggccgagaagtatgaggttgatatgactttcgaaaagacagttgcgaatctatcacgcgttatagaagaggcttctcaagcttacgaggagtatcatgtggtcgtgc

SEQ ID NO: 179339 - DNA, 362 bp, Arabidopsis thaliana landsberg
cattgagaaaaccctgcagaaaaagctcatctttctcactcgttttggtgtttccactacacattttccccgaatcataaagaaataccctgaatttctcatatacgacgcagacaaaacagtacttccacggtatctatcttgacccaaatagcacatcatcttagtgaatctatctctagaaaatgacccctaattttgtaaacatatgctcttacaggctaaagtacttaatggagattgggatatcagagagagagattgccttcatgattcgcaaattctcaccgatcttaggatatagcatcgacaaagtgttgagaccgaagtttgaatttctggtgaacagcatggagaagccg

SEQ ID NO: 179340 - DNA, 393 bp, Arabidopsis thaliana landsberg
atggtcaagactaagagagggtcaaccttagtggaagacttaaccctagtctttgacaagctgcgggcaacacgcacgaagctaaacccagacaagtgtgtctttggtgtctccgcaggaaagttgctggggttcctggttttgtaccagggcattgaagcaaacccggagaagatcaaagagattgagacgatgaggcctccggcccgtatcaaggacgtccagaagcttacggggtcattggccgcccttagtcgcttcatttcaaggctggctgagagggtgctacccttcttcaagctgttgcggaagtccggcccattctcttggaccaaagaggcggagcaagccttccaagagttgaagaagcacctggtgtccctaccaatactg

SEQ ID NO: 179341 - DNA, 49 bp, Arabidopsis thaliana landsberg
atgggacccattgaggttggtgaagattcacaatttgattatttccaca

SEQ ID NO: 179342 - DNA, 390 bp, Arabidopsis thaliana landsberg
ggtttgatcattgagaggagtcaacaatctttagctaaagaagggaagaagaaaatgatctatctaggagatggagctggcgattactgtccaagtttgaaactaaacactgaagattacgtgatgccacgtaagaatttccctgtatgggatctaattagtcaaaatccaatgctgattaaagcagcgattagagaatggaccgatggccaaagcatggagatgatattgataggaacgatcgaggagattagattggaggaagagaaggagaagatgttgactagtgcggagaataattgcaagatgcagaccatctctatcgggattaataatgttcatcatgaaccaatattgcctcgtgctcttcgtgtgtctcagtctagttag

SEQ ID NO: 179343 - DNA, 74 bp, Arabidopsis thaliana landsberg
gacatattcttagccaggccaaagccttttactgcagtttcacagcgggatacagttgcctatggcgatgggag

SEQ ID NO: 179344 - DNA, 535 bp, Arabidopsis thaliana landsberg
atggctgcacatgcgacatcggagccggccgtgaatctcccggcgacgcaatttgaatctcaggttacagagccgttcggggtaactcttctagttcggcatcttcctgatggaattcctcatgatatcgtctctcggctcttttctcagtacggagcttctgctgttcgtccttgctccggtggaaagtaaatttccagcaaccttttcctttctatttacttggagattcatattagtaagaaggttctagatttctgtagaagactgaaaaggttatagacagtttttgttcaccaggcttttgaatggaatatttaggttacaaggtggaaagactttttgtttactctagagaatgtggaattgctctaacttgacatataatcctacttgtcacagattgagaaacgctgcttttgtggatttcaagaatgaagcttttgcttctcaagcacatcgtcaattaaatgggtaccagtttcggatttactcatcttccattaatatgctcagactcttttttgtttcttga

SEQ ID NO: 179345 - DNA, 651 bp, Arabidopsis thaliana landsberg
atgcagaaattcagagattacaacagcatgtacaagaagcgggtaaagatgtatcactttggagatcttagggaaatgatttcagaaaccagtttataactaaagtcacctgtaataatgttagattgcctcaaccacagagaagctggtacaagggcgtttggttcccctactccacgcccaagtactccttcattttgtggctcgcaatacacaacagactttcaaccggagatcgcatcaaaacatggaactccggtcaacaagtcgcatgcaatttctgcaacgatgccgaggaaacaaggaatcatctctttttttcctgcaggtattcctctgaggtttgggaaaatttggctcaacgcctcctctccactgactactcgagtgactggaatcatctaattgccaaagaatctgctcttcctgttccggtatgtctttcaagcttccatctcccatatttggtgagagagaaatgcaagacgtcatggggaactcagcttaccatcaaacaggctcatcaagctcattgataagactgtccgcaatagaatcagttcaatacgagacaccggaaaccatagctacaacacatgcctgcagttatggttctccacacggccacgctcatctctgcaacttctctaa

SEQ ID NO: 179346 - DNA, 431 bp, Arabidopsis thaliana landsberg
atgcattatacttggacggatcgagagagatgatcatcataatcatcatgaagatggtataaagaaagatcatgacttgatccgaggattgaaagttgaggatctcctttgtccaatttcactagagattatgacggatcctgtggttatagaaacaggccacacttatgatcggagctccatcactaaatggttcggatccgggaacatcacgtgccctataaccggaaagattctgactagtaccgagttggttgataacgtatccgtgaggcaagtgattcgaaagcactgcaaaacaaacggcatcgttttggcggggattagtcggagaagaaagagtcacgatgacgtggtcccggagagtttggctgcaaagggagctgggaaactcatcgcaaagtttctcacttcagagttaatcaatggcg

SEQ ID NO: 179347 - DNA, 281 bp, Arabidopsis thaliana landsberg
ctatcaacaccattcaagtaaagcctctgagtagaacagagtgtttctctggcaaacgccaaaacacggtcgtttcagccaacacagcaaagaagcagcttaaagcccaactcaagcccaagcagcccacgacacagatttggaggcaacggtcatctgcttcaacatcaagaaacgacaaagatggagctgacaatccccagacaatctcacctaatgctcgtacggacatcaagctggagaatcgttttctaacccttgattcagagtgctcagcttga

SEQ ID NO: 179348 - DNA, 2220 bp, Arabidopsis thaliana landsberg
  unsure (1)..(2220): unsure at all n locations
ctggtgaagcttcaaagcggtcaccttctggttcaccaagaaaagaaaatgatggagaacattctcaccataagaaatctttgttctctaaaatgaaggataaggcgaaaaaactgcagcacagtctcagcaccaagaagagacatgatgaagaaggtgatgcaaccatgtcaccgttttgcagatccgaagatcatgaagttagagaagttggttatgcgtcattgtcaccacgtgacaattcgaaagaccgtaaagtcagagaagaaggaggagaagaagaagaagaagatcctgaatatcttggagccccaagtaaatcaaattgaacaaagcttcatatgtaacaaccgcacccttttaggaatttgcttaatactgatcgatcttcttgtgttattttcagtgtatgaatcaaagaaggcacctgaagagttaaaggagacagcaaggcagcatccccgagaaaatcctgtgatcactgagacaaatgtcttgtctgttctcccagccaaacaggacgctgaacaagaacaaaaagattgtactggttccaaaacagaacatcctgtgatctctgagaagaatgttttatctgatgtcaagcacgagaaggctgctgattctgacacaacaacaatagtaacagaatcggctgagaagacaagaaaagagtgcacaagccagcaggaacctattagtccaagcaagacagtaacagaaactgtgacagagaagctagcacctgcttatgctaaagtctctgacgcaactcaagctataactaagaagattcaagatatggcttttccagaaccaacagagcgagaagaagaggtaaatgatgttgcagaaatcaacactgccggaactaaccagcccactggcttcaataccaaggtactataaatttccatgtgtttgtgcctttaggtaaatgcatcagtccatcatcttgtgtttgtaaccaggtgtgggacaaaggcgtatcaatgaaggaatacatatcgcagaagtttgagcctagcgaagacgatagagaactttctcgagtgatatctaaagctatcagtcctcgtaaaggttcttctcagacttctagttttggtgcagccacaaacatggcaccnnnnnnnnnnnnnnnnnnnnacaaagctcctcttttagccaacacaaatgaaagtgagttcctcttttattcctcaactattaacaatttgacaaacctgcaattgtattctgatgcatttgattctgctgcagttgttgaagaagaaaatcatggaaagatacttcaaccaaactaaagaacatagagtgtttttcattgtttacaaagcctctatgtaagaaagaggctttctatttcaatcctctttttcccctattagttatgttatcataccaaaaccaagattcattttgtctgaagtctgttgtatacatacataagaaattctaatacatcttcttttgttcttttactcattttttggtttttgtttccttccttcttgtagttgacttctgtaataagaagaaaatattgcatcttcataaaaatttgagtatttaattcatccaggtgatcaaagagatgaacctgttcaatgttgcaatataaattacatataactcataatgaaaatcttcattggagactttaaatgccactagtataataaaataccattatcagagatgaaataccattaaataacaagaatggacggtcctggtacaacagttgaccttctcctgaaaagaaagtggtctgctactaatttcccacaacacacaaatcaccaaacagaaacaacgatgacaatagaggactaaaagctgccttgagaatctgcaaaaaatctgacatgtttgcaggtatatttctaagaatgggagcagcattaagatcaatgtatgtgaacagcaagtatgaagaagtacgagaagaatgggaggaagattacagtcctcagaggttttcttacaaagctctctacaaagcaaccaaagggttcaaagagagcgagttattcggtacagaggctaacgggacagtctacaaaggaaagctctcttctaatgcacagattgctgtaaagagagtttctttagatgcagaacaagataccaaacaccttgtttctcagattgttggtattgggaagttaaggcacaagaatcttgtgcagcttttaggatactgcagaagaaaag

SEQ ID NO: 179349 - DNA, 195 bp, Arabidopsis thaliana landsberg
ggatttgttgaagtggagttgaaatcgttactaaccaacttggcattcaacaacatcatcatgatggtagccggaaagcgatactacggtagcggtacagaagacaatgatgaagccaagctcgtgagggaacttatagcggagataatggccggcgccggttctggaaatttggctgattatcttccgccataa

SEQ ID NO: 179350 - DNA, 630 bp, Arabidopsis thaliana landsberg
gtaaaagttttagatgtaaatgaagataaagaagttgacatagatagggtggaaaagaatgcttttagtgattcagatacgtcagtggagaaactccgctaccttccagctgaacctattccagatacaaatgaccagcaagacaatttggttgaaagcataaagttaattgaaggtcagatatctgcatctcctgcttctgaagaggctggtcagaatggacaccatgcatcaagtccacaagcaggtaagaaagatagtaacagcgtcatatgaaaaacacagtttatgaatctcctatagacgttagattataagtgcaaaaagtaagaagtctgctagataaaggtctgatttgtagattagtattgtgaatgtatgatgtgttatgtcacagatatagatgctctcgttactaatacatggctctctattgcagaagaaatgggtgagacacgaggaaagagaaagaggaaaccatcagagaaagccatggagctgcaggcagagaaggcaaaaccattgaaagggtcaggcaaaacagtaagagcaaaaaacagagcagcgtttgatcaagaaaccgatgacagtataaatggtggtgatgatgatgatgatgcatattattaa

SEQ ID NO: 179351 - DNA, 1260 bp, Arabidopsis thaliana landsberg
tcttcagtgtttaaccgcctccaatcagccgtgactagttccaattccggtaatatcgaaactcccacggcggttacgacggagacaccagtcctttggccggaattgagaaagttttgtgagaagaatgatggaaaaggtttgggtaactacatgattgagaattcgaggaagcgtttatctatcaatgaagagcttcctaatgcgattcgatgctcagagaatccagcagctttggttctagatgcaatcgaaggttcttaccattgctcatcaccatcgtcgtcttcctcggcgagagcgatcgatgtgaagaggatcttcgttttgttattagaagctttgattgagatcaatgcgaatctcacgaatgatttgagagaaagagctaggactattgcttatgattggaaaccaaatataggtaacaaaccatcagaagcgttagggtttttgcatttggttgcagcttttgaattagggtctttatttagtactgaggagatttgtgattacattttcttgatctctaagtataaacaagcaacaacgatctgcatgaagattggtttagatagaaatcgaataggagttctcgttcagaagtttttggatactgggagattacttgttgctattagattcatttacgagaatgagatggtgggtgaatttgaaccagtttcgattttgaaaactagtttgaagaactctagagaagctgctaagagagtttgtgctgaagggaattactctcttaaggtgcagaacgaagctactgataaagaactaagtgctttgagagcagttatcaaagtcgtgaaagagaaaaacatcgagtccgagttcatggaagagaaactcgaagaatgtgttaaggagttggaggatcagaaagctcagaggaagcgtgccactaagttcaattcacctgctaatccccaacaaccacaagaacaaaaggtcgataataagcgtcctcgagttgctaatggttcaagtatggaatataatttgacaatcccacctctgaggccgctacaacaaccaccacttttgcctactcctagtcagattttacaagtgaacccatatggtcttttaagctcaatacttcctggtgttgctgtcccatatggcaacccaagggctctatttggctcggttccagctccagcttctcgacccgtcttttatgtgcagcaaactggttatgggatgccaccacctcagtaccgcccaccgtactatcctcagtag

SEQ ID NO: 179352 - DNA, 107 bp, Arabidopsis thaliana landsberg
tattttcccagtttggcaacttcttacagcttttactctctcagaaaacttcggaccaagtggtgacagacaaagcggcggagagacagatatttccttatcacaag

SEQ ID NO: 179353 - DNA, 651 bp, Arabidopsis thaliana landsberg
atgctggaaccaactgttgatagtttgagagatgaagatggtgagccgttagcagttaatgtttaaggaaatggatcagacgctgaagaagactcaggtactatacatctttgtgaacttatttgtgtagattcaggtaactggatctgtataatcaaagactgagcctcagaaagacattacaaaattaccttcgatatctaatatgacttggaagtagaccagacgaaatcctaacttggtttcttctctgttttgtttcgatcttccagaagaagcaaccgatggagaaaagctggagtccaatcttaaaaatctgaatgctagaggttcgtcttgttactgctttagatagttgtctttaccttaagaaagccattcagtctagaacctaaattcatatatactggctctgaatgacgacgactttccaaaaactttactccttatccctctctgggcggggatctgcaagtcttaacggaatataatcgggttgcagggatccaagtggaattggatttgaaaggagctggaagctcaggttcaagaaaggcggctggtaaaggcagaggcagagggaaagcagctgatacgtctgctgagaagaaagctacaggaagaggctctggtgccaagagaaagagataa

SEQ ID NO: 179354 - DNA, 143 bp, Arabidopsis thaliana landsberg
aaagacccagtcctttttggataaccgcaagtgggcacatgcactgtttacgcgagtcactgaccgattgcagaagaaccctcaagcttctaattcttcgcacggcagagtccacgacgacggcagcgcgctgacgaactccg

SEQ ID NO: 179355 - DNA, 374 bp, Arabidopsis thaliana landsberg
acaatttcgagtgggaacatggatattctactagatttggcgtgtactatgttgactacgacaacgatctcactcgtattcccaaagattccgttaactggttcaagcagttcctcagtagaccggtggtaagaagtgaagaaccagaggatgaaaaagtatgcaatgtgtcacgcaaggaagaaaatattaataaggctttggatgtctcagagggtttcaagtcttcagttgattctattgtcaatctcatcaaaaacggatcgagaatagaagaagaagatgatgaagaagagagagatttctgtgcttttaagaatcataatgatcagttgggtttctttctgaagctacagaactcattgggattctag

SEQ ID NO: 179356 - DNA, 409 bp, Arabidopsis thaliana landsberg
  unsure (1)..(409): unsure at all n locations
atgccgcggctgacccagctcgaaggggtgtcgtcggtcgatcttgcgggcgccgccacacccgccatccgggtcgatgtggatctgcgcaagctcaacgcgatgggcatgtcgcccgaccagctgcgcaacgcactcacggcggccaacgtcacctcgccgctgnnnnnnnnnnnnnnnnnnnnnnnnnnnnnnnnngtgacggccaacgaccagctccacagtgcggatgacttcgcccgcctggtggttgcggtgaaggacggcacgccggtgcgactgtcggacgtggccaatgtctacgccggccagcaggacgcctatcaggccgcgacgttcggccatgagccggcgatcctgatgtacgtgtacaagaaggccgacgccaacgtgatcgccacggtcgatc

SEQ ID NO: 179357 - DNA, 455 bp, Arabidopsis thaliana landsberg
gtggtggtcgataagaaatctgaggagcctgatctgaagcgtcagaagctggaggaggaggaggaggaggattgcgaagagatgtcttcgtacagcgagtcgacgtgtagtttcgattcggaagatgaacgattggtcgaagaagaataccaaagaagcggggtatgtagttgtaatgatccaccaatctctccttcgcttcttactttttcgaattgagattttgtctgtgatttcaaaagcattatgtcggcttctctcatgaatgtgattgttgtctgtagtattacgactttgacaccacgaaacaaagacgccttgtgttttgctatcctgttatcttcgaggatagtgatgttgctcatgaaccggaaaccgacggagatttggtccaccgattatccatgattgctattcagaaatacaatggagaaaacaagactaattttgaatta

SEQ ID NO: 179358 - DNA, 360 bp, Arabidopsis thaliana landsberg
atggcacgcgtcttgatcgcccgcggttacggcctggttggcggctgggtagcccggctccttgttgcggccgggcacgacctgtagctggtgctggggggaaggcaccccgaagctgccgccgcgctatccgcggagacgggcgcgaaggcggctctggttgacaccgtgaacgccgcgcagagcctcgacgcgatcgggcccgtcgacctggtcatctcgacggtccaggacccggatgacaacctgctccgcgcgacgctgaggtccggcgccgcgcacatcggaatcgtccgcacagccgacaccctcggaccgatggcgatgaccgccgccatctcggccaaggccccggcactg

SEQ ID NO: 179359 - DNA, 375 bp, Arabidopsis thaliana landsberg
atgacctatcgccagcagaccgatcgattgatgagtgcgcaaccctggctgatgctggcgctggacctgggcctcggcccctacgccgaccagccgctcgacgcgtggcatgaaagcttcctgcccatggagctgcaggccaacctgcgcgccgtcaccacgacagacgtccacggcaacacccgtccgctggtggaaggcgagcgccaactgtcacccaaccgcctcgacgcacccccggcacaagcacccgacctgcgcctgccgctgggcgccgccggtctgctgatcgccgccctgctgctggtgacttctcgccactggcgcctcggctacaccctgctcggctcgcttttcctggtcctcgccggactg

SEQ ID NO: 179360 - DNA, 131 bp, Arabidopsis thaliana landsberg
atggtgcagtccgcccctgacgcgacttcgtcaccacccgtcgatcaagaggtaccgttcttttcccatcccatgcctttcagattcagcttcgatccaccaagcgaccccgcttcggtggaggcttgtaa

SEQ ID NO: 179361 - DNA, 678 bp, Arabidopsis thaliana landsberg
aaatacagattttggacctggaagacaaaataaaagaactaaaagttattcatgtcgcaggaacaaaaggaaaggtaagttgctgtttcactttagcgcaggtcctaagatttaaaatgtaacgtgaaaaataagtcagtagaaggaatgtagcacttatgtgagatgctgttgtttccaatttcgagcaattagcacttaacagaaaaatcagatcactcgatggttaacaatatatgctgattaatcattatatttgatggtaccatctaatgcatgtctgagcctgcaattccgatttctaaagtctggaattccagtgtcccataattatagcttatgcggtatggaagtaattttgatgactagaatatctataagtagctactgattttcttgggttctggctttgtaatttttgtatttcagggttcaacatgtgtcttcagtgaggcaattttacgtaattgtgggtttcgaaccggaatgtttacatctcctcacttgattgatgtgagggaaagattccgaatagatgggtaagttcatcaatatattgatgttcaatgttatatgaacaagcaagagacgaatttgaatgttgtttcgcttttcagcttggatatatctgaggaaaagtttctacagtacttctgggaatgttggaagctactgaag

SEQ ID NO: 179362 - DNA, 162 bp, Arabidopsis thaliana landsberg
aaccaactgtttgggccctttggctttgacagaagcggcctcagtttcccattccacaacacaaacctgggaatgggaaacaatatctacctgaattacgcacacaacgacaaatgtaaatccactaaaccaaaaacagagcttctaccaaaactcttctag

SEQ ID NO: 179363 - DNA, 105 bp, Arabidopsis thaliana landsberg
caccagtgcgacgccgtggcatccggggaagacgacggagcatcggacatcgtgcaattaatcgtcgggttttcaggctttcgggtccggattcggatccgataa

SEQ ID NO: 179364 - DNA, 884 bp, Arabidopsis thaliana landsberg
gttgctgaaggtgaaattttcactctcaaggatagccttcgaagagaacagctaaaatctcttggattggagacagagttgatcagtctcaagtcctcttgtctggcagagccatgtatacctgaggtagaagtcattgtaaatgcaaaagaactcttagaggttgacgcggctttgactaatgaagtaaatttggatatgttttcttcttaatactttacttctcatacctgccaaagatattcatttctaatcagaaattttcagaggaatgtcgatgatgattcttgcaaccttataaaggcaagaagagaagctggagcagaagaatcaagcgagactcctgtgcctaacgtggtagtaagtttggaaatgttttcttcttaatacttcacttctcatacccgccaaagatatttgctttaaccacaaattttcagagaaatgccgatgatgattcttgcaaccttatcgaggcaagaagagaagctggctcagaagaatccagcaagtctcctgtgcctaacgtggtagtaagtttttatttattttctccttaatacttcacttctcatatctgccaaagatatttattgctagccacatattttcagagaaatgtcgatgttgattcttgcaaccttgtaaatcccagaagagaagccagcgcagaagaatccagcgagtctcctgtgccaagcaaaaatgtagtgcctggctgctatgttgtttactaattatgtcttgggagtatctgcttgttctaaggctgtgcatgtcctaataattgtttaaaattaataaccttccatttgtgttttaaggtgaaagatgctgaacttgttccatgtcacttgtcttctgagaatgatgcagagccaaga

SEQ ID NO: 179365 - DNA, 531 bp, Arabidopsis thaliana landsberg
acatttgatttcaaaaagtatgatgaaaagatagttgggtcgagggttaaaatctggtggccgttggatcgcgcgtaagcattttgtagtttgtgctttaatatactacttcaatttatttattctttctgtgctatgtattttcctttaatagctgaatctggactagcacctcggatggttgctggttgcatttctgtcgaccatgcctgtaaatgagtattggatttttaccacaggtattatgaagctgtggtcatttcatattgttctgctaaagagagacatcgggtaaagctaaatatatcagtcttctacataactattttcgttggtttttggtgaatcattagtctattctcctaagtgatacatatttttaatttgatccaggtcattgataatatgctatatttgtttatgctgctgctgctatgtcgttttcaggttcgctatattgatggagatgaagaaatcttgaatatgagaaaggaaaagtggtattttctgaatgaatcaaagtcatcaaag

SEQ ID NO: 179366 - DNA, 742 bp, Arabidopsis thaliana landsberg
tgtctgccaatatctccgatgagcttgagagaaagggaaatatttccttgtgccaaacgtaaaacagatgtaaaggtgaaaaataagttcgaatctaactctctagcaaaggtacgaacataaacttgtctactattggcctgttaaagatacaaatgaattatatgcttatgaaattcattgttatgtaggtatactttcgaatcaagtgtgaaaaagcccaagaagcaaggcaaactgcattgttaaatctctttgtctccattataagtgatagcgtctataataagctaaggtaaatgttgaaagcaaatagtttattttgttttagtctaatttgtacttatgctagcttgcaactgctgggcactgaaactcacagagtttcaaatctattttgctactaggatcgaagaaaagcttggttacttagttgaatgtgaaactcgcttgatacatggagttggtttctatgtatgcgttgtttcttcagattacaatccttgtcatttggtaaggcgaatctacaagttcatgaatggaattcgcttggtaagtttgtctataatttcatgaatgttgttggtaagtttctttagcttggttcatatttcacttatttggtcctatatttataggaaggtttgtttgacaaaatgtttaaagatttcaaaaatggtgtaagttcgaagttgccacatgatagtgggaagacaaaatggagtgagattgttcgagaaag

SEQ ID NO: 179367 - DNA, 109 bp, Arabidopsis thaliana landsberg
atgcgctggccatcggcgacaagcttgacctggttcggctcgaacggctctatcatgccgtgctgctccgccatgcggcgtatccatttatcggatttgatgctcatcg

SEQ ID NO: 179368 - DNA, 714 bp, Arabidopsis thaliana landsberg
attagctccaatataatatcaatgccatcggttcaagaggtctacaagattctggctgacctaaaggtcctaaaccaagatgtcgccaataccattactacaaacggcctacatgtatcttggaacgaaggactaaagtctatagctaatctctatttagagaataccaccaagactttgaatttatttgaaaagttcatgtacacggaggaggtcgtgacacataagtgtcaagtgtgtcaagttgatgtttactgggatcatgtcaccaccaaatgggatcatgtcaccaccaagactaggaatttatctgaaaagttcttgtacacggacgagttcgcgacacagtatgtgtctgtttacagggatcatgacatgctcttaggaaagatccgtgagctagaagtagtgctcgagaagaagtataagcatgcaaagagaaaaaggataatgaagcttggttttggcgcggttatctttatcccttgtttcgtcgtagcggtcgtaggccaattaaatcccgcgtttggaatggctggccaggcaggggaaaggggcgttgaggtggcgaagaagctctttgaaaaaggtttttggaaagggacgatggaagaagagaattatatgaagacattgttaggtttgtctcggttgattggaaacagaacaaaatgcaacattgaagcgatggagaagataaagagccacagttga

SEQ ID NO: 179369 - DNA, 337 bp, Arabidopsis thaliana landsberg
gccgacagcgacggcacgccgcaattcaccgatacctataacaaccatgtcgacgctaaaaagcaggacatggccccgcatgccaatgcgctgttcttcatgcagccgggctcgctgccgcaggaatcgtgggagaagctttcccccgagcaacgcgatgcctatgcccgccgcatggaaatcatgaagcatcatacctgtgcgccgcgtcaggacggtgcgatgcctccgccggcgatgatgggtcgcgaccatgacctgcatggcgacaaggcgatgcatgaccagcgcatggaaaaacgccgtgcccaatgggagaagatgaccccggccgagc

SEQ ID NO: 179370 - DNA, 891 bp, Arabidopsis thaliana landsberg
attgtatttggcagatacctacgggttcccaagaaatgataatctcaagcctcttttggcaccgaaagaaatgggaaactcacaaaacaatggtaaacccacagaagccagcaagaccttaccatatattagtgctgccaaggggagcagtgtaaaagctgctggatcaaaactgaactcaggaaacaaacagtcggatgggcaacccaatcttacatcaagtagctctaaggaaatggttgaaaatcctgacgatctcaagaaagacaaaaggaaatgggcattgcaggttcttgcaagaaagaaagctttagctggcaacaactcaacccaagaaggctctcccgagcttaaagggaattatccattgttggtgtgtaattctcatcacttactttgtttcttttaaaaattctggttttttgagattgtcattcgtttgtttctaccatttctatcaggctcaacttccagctgatatgagaccaagccttgcaactagtcgccataataaagttcctgtggcagttaggcaggtacgtggatagctgataatcaagagaaagactattacgtagaattaactcctttaggtagaaatccccaagccgtgcttttattacatttacatacgttaaactgataatacagaaaattgaggctaatctgttattgattttcctgcaaaaacattattaacatcacaacttgtgcaatacctttacttgtttttgttcctaagcaaattgctgtttctgcagacacaattatatcgcctgacagaacatttattaaagaaagaaaaccttctgactattcgaagaagtgcagcgacagaactagccgttgctgatgctataaatatccagaaggcgattgctgtcaaatcaa

SEQ ID NO: 179371 - DNA, 1923 bp, Arabidopsis thaliana landsberg
  unsure (1)..(1923): unsure at all n locations
ggatggcaatttgccctcgacatgtgcaagagcaaaaaagatcactgggctctgtatgcaaaatctgttcttgacagaagccgactagcactggcaagcaaagctgagaggtaccttgaaattctgcaaccatcggctgaatatcttggatcttgtcttggagtccatcagtcggctgtaagttacatttcctgtgactgaacccgtcctcttttttcatccataacttattaatgtccctggttttgatatttcattaaaactctttaccaggttagtatatttactgaagagatcattcgagctggatctgcagcagcattgtcgtcacttgttaaccgacttgacccagttcttaggaagactgctaacttgggaaggttagatagctaagcaattgtctgtgactgattgacatgttctgtagcaagttgtatctattgacgcatggtagttacacattagaaaatctaatgttgcttctctttctcttgatcagttggcaggttattagtcctgtagaggtcgtcggatatgtcattgttgtggacgaattgctcactgtacagaataaaacctacgatagacctacaattatagttgcaaatagagtgagaggagaggaggaaatccctgatggtgcagttgcggtactgacacctgacatgccggatgtactatctcatgtttctgttcgagcaagaaatggaaaggtaaaaactttcattctnnnnnnnnnnnnnnnnnnnnnntcatggcctgttcattcacttttttttctggcttttcacttgcagatctgctttgccacatgttttgattctggtatcttatctgacctccaaggtaaagatggaaatttgttgagcctacaaccaacctctgcagatgtagtctataagtaatcatcctttttacctatatttcgggaattcgagctgagatcttctctccttttgtgctagacagattataaagtagaattcacttaattcatgttgagaagattatttggacaaaattatgttcttacttaattttctctttcatgtagagaggtaaacgatagtgagctttcgagtccaagttcagacaacctggaagatgcccctccaagtatttctttggtcaagaaacagtttgcgggtagatatgctatatcatctgaggagttcacaagtgacttggttagtgtgtaatgttattggattcttactttcccgtatttatctgttttagtagttttctttcttctgtttgtaactttgcatcaaataacatagttcttaaattatatatgaatttcctcatgtttgaataactgacttcacgggtttgggtaatacaaccctatttgttttttctaggttggtgctaaatcaagaaatatcgggtatctgaaaggaaaagttccttcttgggttggtatcccaacttcagttgcgttgccatttggtgtttttgagaaggttatctccgaaaaggcgaatcaggtatcttagacactctcaactcattctggctcaaaaaaatttgaagctactttgctgaatttttgctacctctatgtttatctgttctttactggtggtattagtctggggatattagagtagagatagttcctatgcttcttaggattttatgtggaattgcttagaacatatctttcgtgaggtctcttcataagcacgggtgtgcatgactatcatgctgtcaaaaccgatataatctctttagacttaactttttgatgattaagttcacccaacctcacttcccactcactttctctccctctggatgtggcaggcggtgaacgataaattgctagtattgaagaaaactcttgatgagggagaccaaggtgctctgaaggaaatccggcagacactgttggggctagttgcacccccagaactg

SEQ ID NO: 179372 - DNA, 105 bp, Arabidopsis thaliana landsberg
aatcttaatgtgtcacggatggaccttatggttgccgttgaccgcgagatccgtgggtcttctatattgaaagatggaaaaggctttgaagtactaaaacaataa

SEQ ID NO: 179373 - DNA, 870 bp, Arabidopsis thaliana landsberg
tgaaaaagagaggcagcaatgtgggatttctgaaacctgtggatgcatttgggcctacttggctgatttgcgttcctccagtggaacttctcatgtccactgtaacccattttatgatccttcaagatatgatggcccattattacctcctgcagcagctctagccccaactctctggccccagttccatctccggtgggcctgccctgtggagccgaacgtcacagaaaccgaagaccaatgtagagccatgactgttaagtattcagaaatgaagaaggtgacctatccttgcaaaatatttttttcttaaaagtttatatttgactggacattctagtcaattaacatgcttggcctctgattgtttcttgtgtcgggtcgaaaaaatttgaacaggaaaaagaagaagcagagagaaaggtagatgagttatcttctgcaatggagtcattgaacgaagagttactgaacgagagagatataagccgtgcagctagagaatcagcaaagagggctacaaaagagcgtgcagtcatatcacgagctgtgcagtcactcggctgcaaagttaaattcacaagaaacggagattgcacagttgaagtagaagacgggcctcagaaatgttcacactcaattccccaaaaacaatccgaggacaacacaacagatgtctcagaatctatctcatcggttactgaacaaactgtgtgtgaagcagtgtgtccgttgcgtacaagagaaggaacgtgtagatggcctgatgcgggttgtgctcgaatcgggaaccaatttctcgggttgaaaacaaactttgaagcgtttgataatctatgcgtctacgacagctatttcacagctgaatga

SEQ ID NO: 179374 - DNA, 169 bp, Arabidopsis thaliana landsberg
atgtctgacagtagttcttctagatctgtggataggccaaacttcggccgtaataacagtgagtatggaattccaaaaaaaatgctactgtggagcaccagcgattatcaaacattcatcgggaagaaattactcaggaagaagatattatgcatgcgagttggtggag

SEQ ID NO: 179375 - DNA, 436 bp, Arabidopsis thaliana landsberg
atgttcgacctaaaggaatggaagaagagagacatcactggtatataccacaagtggcaaaacatggtaaataactctttaactctttgcaacaaatagtctcatgatggtttattgttttatttattgtggtttgctcattttggcttgtgttgtttagaatgagaacaggacactatggaagctagggacattgccaccaggattaataacattctacggattaacacatcccttaaacaaggcgtggcatgtgctgggacttggatataacccgagtatcgacaagaaggacattgagaatgcagcagtggttcactataatgggaacatgaaaccatggttggagttggcaatgtccaagtatcggccgtattggaccaagtacatcaagtttgatcacccatatcttcgtcgttgcaaccttcatgaataa

SEQ ID NO: 179376 - DNA, 270 bp, Arabidopsis thaliana landsberg
ggcgtcgtcgtactgcccgatatcctggccaatgccggcggtgtcaccgtctcctatttcgaatgggtgcagaatcgccagggcttctactgggacctcgaggaaatccatgcccgcctcaagaagatgatggagcgcgaaggccgcgccgtctgggccatcgcccaggatcgcagcgtctcggtgcgttcggctgcctatatccacgctctggggcgtctcgccaccgccatcgaggcccatggcacccagcccttcttcgccggctag

SEQ ID NO: 179377 - DNA, 141 bp, Arabidopsis thaliana landsberg
atcatagctaaacttgagctaaccaatttcaatgatttatcggaccatagtttcaaaaaaggatccggcaatgataatgttatgatagagtgcgtgtgggataaacaagaggcatatgtagatgtcggaaaatggaattag

SEQ ID NO: 179378 - DNA, 108 bp, Arabidopsis thaliana landsberg
atgggcaatctcccacaggaagatgaccggagtgtcgctagacttagaactcatcaaaatcctcgccaaagtcttcttcatcaccttctgatcaaaatattagcaagg

SEQ ID NO: 179379 - DNA, 1202 bp, Arabidopsis thaliana landsberg
gaggacaagccaaaacattaatgtttgctcatttgagtcctgaagaagactcctttggggaaacaatcagtagtttgaaattcgcacaaagagtttcaacagtcgaacttggagctgctcgtgcacacaaagagactagagaggttatgcatctcaaggagcaggtttgtagagactaatccttgataagaagctaaacagtaacagaattcgtttctagtttattttatatcttgtgagccaacaaacaatgtgttcttctttcagattgaaaacctgaagagggctttgggtaccgaagaatggaatattgtttccaacggatcaaaggagataaaatcacctttcagcaggccaatggcaacaacagagagaactcctccacgtctcagaaggttaagcatcgaaaactgtagcagcacaaaggcaaaccttgaagacaggagaggtatcaaatcacctttagcctcccgtcgtgcacaaatattgaatctggagggtccaatgtcctgtaaaaacgaagaaaacggtaaaggagatcccaccatggaagtgcaccagctcaaaaatcctcggagtcctctaagctcttatcaaaaccgagccgtgaaagtagatggcagaacaagcattcctcaactccagctattgcaaacaccagttaaaggagcttccagaaacgacatacagatgatttctgttgattctaagacaaatggaaaaggttcacatatacggaagtccctgaggacaattggaaagctgatcaatggttcagagaagaggtatgacaaagactttatattgtttcaatctgcatgttaaatgatgcgtttaccagtttattgaaacgtttttgttatcacaggaaagagaacattcctgcagatccacggtcaccacttggagttgctaataatttcagtcatataaagtccccggatacaagcaacgctaagactatgcgacggcagtcactcacaggtgtaatgccaccagggcaagaaagatcacgtagatcctcaataggaggaaaaccaattgagaatggtaagaaagatcacgtctttacgccttttcgtctgaataaattcaataactaagactttgcttttgtaggtgtaaatgtaactgattcaagaaatgccaagacacctccacctatgcgctcagcatcaaagatagggaagaaatgggcataa

SEQ ID NO: 179380 - DNA, 998 bp, Arabidopsis thaliana landsberg
atgcgaagcgaggatgatagagcgtacatcagtcactattcctcatattggtaagctaccattttactcaccgggttctaatttatgattctcacatactataaatggaatgaagagcacctcatattgtttgatatacaggtgaagctttggtcattttcaaaacaagagaagttgcagaaagggtgattagaagactagatgagggatgcttgttgctatcaagtgggaggtgaacctgaaatgacatattcttcttttttctctaagcttcctatgataaattgcagagatctgtacagtgccatttttttggaatactttcatctcagaaatctctgctgtgccttttttgctcaacaggccccttgttgcttctttcgctaagattactccaccagggaagccgtcattattctcaggccatatcaaactacacaaaactcaaacgcgacgggagatggtattgttttcatttccctttcccttgcataatgcacacaaataaaaatgcattgttacgttactaatcttcttgctctttggtctttatatgtttttccagagagatgccgtggctacatcacattcttctcagcctaacaaccttgaatttgacatggccatggaatggtgtttgcaccaagccagacacgagcaggcgtctgaaagtgtatctaaggtaattagattgtctagacgattattgccactattttactgaaaacatgagtttctgtttggaactgtttggaaaaatgagaaaaaagtgtgcttcaattccttaagaataactgaatccttaaacccttatagcggcaattggaggagatgaagtcgctgcggattaacttcaagctgaaacttccttagtttcagaatcatgttgtcactctcgtgtaagtattagctcttatctacatgtctatcatctaaacgaaccaaatgatcacttactttctttgcttcagacagaaatatcaccaactgcagattag

SEQ ID NO: 179381 - DNA, 107 bp, Arabidopsis thaliana landsberg
acttgaaattaccagggctaccaccgatgtttttaaacccgacccggatagtgaccggactatctttggatcaccgagtcatccggattggaccacggatcaattga

SEQ ID NO: 179382 - DNA, 45 bp, Arabidopsis thaliana landsberg
atggagcctgtccgccccagaaggcgcagcttgagaagccttctt

SEQ ID NO: 179383 - DNA, 472 bp, Arabidopsis thaliana landsberg
ggtgtgggtctgaagttggatgacgccttagcgttttggagagaagaatttacaaaaaaggtaatttgattcgctaaagtttctcgttctcctcaccctttttccatgtttttgtgtgtgctagcaaatttgaataactaagtaagtaatactgagctattagatgcatatttctctttccgtttttatcctcaggttggctctgagagatttgataaagagtatgcgtatgccattcgccataactatgggaaggaaggcaagagaacagtaagtacctaactgtcctttctaggccatttttttccagagttctcatctcttatttatgtcattgaaagtggcaatgatcagcttctgataccaaattcacattgcaatttcaggattataccccttatgcttgttcaaagatcatcatatctgctcctggtgctggggatcatcacggctgcccttatcgacatttcag

SEQ ID NO: 179384 - DNA, 69 bp, Arabidopsis thaliana landsberg
ttgacatcagagggtaaagagtacattgttaaagaaggagatgtgatgcttttccgcttcaacgtatag

SEQ ID NO: 179385 - DNA, 390 bp, Arabidopsis thaliana landsberg
atgtcatcggcgcaaatggatccacacgacaagatgagatcgcgtgacataagtaaagtcgcgagaggccagcaagcaccaagaccagctcacactcccggtacggtgtcacccccaccggaaaatgaggcaacgtttcgagcaaagagaggagatagtggaagagagacggatgccgcggtggaagaacgttttccagtgactaatgaaacgcgacattgtttcaatcggttcatgcaataccataagtaagttttaaaattgagttccactaaataaatgattaaagtgcatgattaacgtagtcacgatttttttttttaatacgtacataggtgtattgagaaaaatggaagagatgcgaatgattgcaacaacttgagagattac

SEQ ID NO: 179386 - DNA, 1050 bp, Arabidopsis thaliana landsberg
atcacctgttgtgaagatacattgttctagaacactctcaggacaaccagttgggacaaaggtggtaaacttctcatcaagaggacctaactcgatgtccccggcgattctaaaagtatgccttaaacttctcatcaagaaatgctgcaatatctagattttatagaatcataagaaactctattttcgcgatacagcccgacatagcagcaccaggagtaaggatattagctgctacatctcccaatgacaccttaaatgtcggtggatttgctatgctttcaggaacatcgatggctactccagttatttcaggagttattgcacttcttaaagctttgcatcctgaatggtctcctgctgcttttagatcagccattgtcactacaggtatttgatccccttaggccaaagcagcaaagcattttatagaatcttgaatccctttaactcaataattgtggtctttactttgcagcttggagaacagatccatttggagagcagatttttgcagaagggtcatccctcaaagtacctgatccgtttgattatggtggaggcctcgtgaacccagagaaagctgcagaaccaggtctcatactcgacatgggctcacaagactatgttctctacctgtgttccgctggttacaacgactcatcaatctctcggcttgtcggtaaagtaacagtctgttcaaaccccaaaccttctgttctggatatcaacttaccttcaatcaccatcccaaacctcaaagacgaagtcactctcaccagaaccgtcactaacgttggaccagtcgactcggtctacaaggtcttggttgagcctccgcttgggattcaagtggttgttacaccagagacactagtgtttaactccaaaaccaaaagtgtctccttcacggttattgtctcgaccacacacaaaataaacactggattctactttggtagcttgacttggactgattctatccataatgtggtctttcctgtttccgtgagaacgcagattctgcaaaactattacgatgagaactga

SEQ ID NO: 179387 - DNA, 141 bp, Arabidopsis thaliana landsberg
tcatttgtcttggtcacaagccacgtagaagttagtgatgtacatcgattattcaattttgtttgttacgaaaaatctcaaaaccggaagaaatattttcttgtggtcatgaaaatttcaaaagactatcgtaatgactaa

SEQ ID NO: 179388 - DNA, 951 bp, Arabidopsis thaliana landsberg
atggggactctcaccagcgtcgcttttgccgctgccgttaacattagattccgatcatttcaccgggaaaacattaagacaacaattacaactctgcccaaatggcaaaagagactctgtttctcttctacagaggattctcatagatttaggattgcaaagtgtttaggcaatgacgaaaacagtaacagagacgacagtatcggagaaaacggagaaacccacaagtcttcggttgttaaaacggcaacgtttgaagaagaagatgaagagacaagtaagagtagctctgctactagcagcagcaacgagttcggttccgacaagacttcaatggtacacacacacacacttatctctgacttatgttctgttttgtcctgtttggaggttaccaaaatcaaaagcaaatctttttaatggaaaattgaaaacgttgagttcaaggaagggactgtaacacattttatgaaattgctcgatttcgtaggttgtattttggttattagtatcaatctcttaaacactgtgttactaagagtacaagtttgtgtctttttcctcagccatcaactattgatccaacatatagtagcttccaaatagattcgtttaagctaatggagcttcttggaccagagaaagtagatcctgcagatgtcaagttaataaaggacaaacttttcggttattcgacattttgggtgacgaaagaagagccatttggggaccttggggaaggaattctctttcttgggaacttgagaggaaagaaagaagatgtttttgcaaaacttcagagaaaactagttgaagttgctagtgataaatataatttattcatgattgaggagcctaactcagaaggacctgatctcgcggtggtgctcgtgttagctttggtttgcttcgtaaagaagtttcggagcctggaccaactacactttggcg

SEQ ID NO: 179389 - DNA, 470 bp, Arabidopsis thaliana landsberg
atgtctcccaatgcgcatgaagaagcattagctgatccagaaggtttaagttggcaggtaatgacactttttattgatgactatagctttttttacttctcagcaaatgtaatcttaaccctaaagttttggttatttgtggcaggtgatcaacgcagcttgggataagggacttcaaatcggtggagagaatgcgattacttgtttcgacagagatggttgtatgagattaatcgatatagctaaaccaagaaaccatccagatggctatcacttctccttcttcacatatcgtcaaccttctcctctggttcaaggatctacttgctttccagatttggaatacttccctaaccgcatgcatggtaagatttacccgcacgtttgattgtgccttccctttagattcgttgtcaaaatctttgttctacaaactatatttggttcttggcaggcgacataagagataa

SEQ ID NO: 179390 - DNA, 257 bp, Arabidopsis thaliana landsberg
ctacggcagcacgcaacgccgacttaagccttccgatgagacttcaatgcaacaattgtgataatatcatgagtaagggcaccaaattcactagccgtgtagaagacgtcattggcgagacgtaccttgggattaaaatctttaggtttcagatccagtgcaccaactgctctcatgagatgaagtttaggaccgatccaaagaacgctgattttataatcgaatcaggtgcaactcgccttctatacccggattag

SEQ ID NO: 179391 - DNA, 444 bp, Arabidopsis thaliana landsberg
tatcattcttgaaggatttaaagggccttcagcattatatacttaagtcttcacagttgattgctcctccgctgtttttacagttgacttctaacttgactgtctttgactcccgcttttactttgacagtgattcacacaagaggagggtggaaatgtgctacaatatttttggattctatattcaatttctaccggtgtaagctcctttccaattctgtcttaagattattagttcacgattattttgccagggtaatgttctcaatttaaatttctctaaccagtgtaatggagcagttagatttgaatagaaaaaatgttgaaactgagttaaaggaggttcttaaactttgtcggtgggacaggccagataattatttgtacaatgagaccactaaaaggaccaggcaaaaggtcaagaaactgatacagaagtttacg

SEQ ID NO: 179392 - DNA, 286 bp, Arabidopsis thaliana landsberg
cttctcagcgccgtccggtggtgatcgccgccgatgcagctcctccggcagaaaatcatctcattcaaaggattcaaagagctcttgtggaattgcgcgagttgagaaatcagtttaatgccattcttagggaactagaattcgaaggtttgtgtgtgtttcatcttcctattctacgttgtgttttctagaaaaagagataaacaattttgatgataatgcagtgggagaagaagaagagcaagcggaatcatcagtggaagatccagaggactctgattcttag

SEQ ID NO: 179393 - DNA, 131 bp, Arabidopsis thaliana landsberg
atgaaaagaaaggtagagatattgaaatttgtgagtgtaaattccgttacggttggtgaacaaaattttgccaacccacggagaaaatttaccactaacaaatttatggatattaaaacttttcggatcag

SEQ ID NO: 179394 - DNA, 707 bp, Arabidopsis thaliana landsberg
atgacgtcttatggagatagactgaagtcgacctccattaatggagttaagttatacaatgtttcttctgctcccaatgttcctacttggcttaatcctaagaagcaacgagctctccgcaaaaaccctcgtaagtttcacctattgtttctgtctcagctctgaatcgttaaccccttcataaacactgtctcttaaaggctcgtcctttttttctgtcttcgatgtaagattatatgcaaagagtggagctgattcaggttttgatttttgagactgccactactagaatcaaagcgactgcagacggagagtatctgattgcttcaggtgcgttttctttctttgtaacttcgatgctattgacaagaaataatgttctcttgtgacttttcactgatttcgtttttgttgaattaggcatatatccaccacaggtaaaagtttatgagctaaatcagcttgcattgaagtttgagaggcatttggactcggaaatagttgatttcgaggtaccttttattgctccatgagatgtgtcttaacaccattgatagtaactatcttgtttctggttttttagtatgtgttttgttggctctacagatattggatgatgacttctcaaagcttgccttcttatgtgctgatcgttctattaatttacacgccaaatacgggaaacaccacactttacgaattccaag

SEQ ID NO: 179395 - DNA, 404 bp, Arabidopsis thaliana landsberg
atgttgatgttgatggtaattcagatggcatatgaattgcatggagttttaaccggtgcagttagtatgataactggggagaaggttgctccagcatatggtggaggacacgaatctttccttgcggatgtagttactcccatatacatggttgtccaaaaggtgaatttctgtttgaggaagtgcttgaattaactttaaagtgagtagtcaattgtattgtatatgcctgcaggaagctgagaagaataagaatggatctgctgatcattctatgtggagaaactgcgatgatctgaacgagttcttctggtcagaatattcaccatattacatctctttgctaccatatctgtgtttaaaagccgtgaacatcactaatcagttttttacgtcttccacag

SEQ ID NO: 179396 - DNA, 309 bp, Arabidopsis thaliana landsberg
atggccccgtttacacctttcttcactgaaactttgtaccagaatctgcggaaagcgtgtaaaggttctgaggaaagtgttcactactgcagtattccaccaagggaaggaatggtaagactcaagtccacgtctctatatccaataagagaataaaagtaatctgaattttgcctgcttatattttctttctgtgtttgaataggaaggggagaggattgagttaagtgttacgaggatgatgaaaatcattgatcttgctcggaacattcgtgagcgtaacaaactacccttgaaaactcctctaaa

SEQ ID NO: 179397 - DNA, 748 bp, Arabidopsis thaliana landsberg
aaactaccctatgttcggtatcgagctgctaagtccctgcttcgagggacttggttccatcaaagcttgctgctgcatgttgggactgtatctcaaaatatagagccattcccaacttcccccagaccgaaacatgtgagctgctcattgtggatagatcagtggatcaggttttaaggctcatctactacatttactcctcaagtccatattgatagtttatttctctaaacgattgaggtgtaactgtagatcgctcctatcatacacgaatggacctatgatgctatgtgccatgatttgcttgacatggaggggaataaacatgtcattgaggtaattctatttttctttcttatccttcaacttttttccgtttctgaaaggccccgatccggactgcctaaagtccgggcgagttctctcgacccaagctactaagtgactcggccctaaccgtttatgaggttctttcctagggtaatccgtttcatatgattccgagattcaatatatgagacgaatagagtatgagtttcttatgagttttttgttttgaatcttataacatggaacctttaatttatctttcgggatcaggttgcggttataattcttatactcaattataagcctgagatctagtcatatttgacacataaatgcaaaccatgtttcttctttgcttctcaaagaattatggtgtagccaaaattcgtatgagttttggttttcaatcttctaaaag

SEQ ID NO: 179398 - DNA, 754 bp, Arabidopsis thaliana landsberg
atggctaaaaaacgtaagttaatgacaaaaatgcgttgagtgcaatgaacctggcagtattcgatgaaccttagcggatcaaatgatataaatatgcaatagaatttaaatatttatttattgtccaagctgcgtggatagcttgatagataaattaatgacagctcattgactacccaagctgcgttgataagtacttgatcaaaatctttacatttttatgaagtactataatccaaagttaacttttaagcaaaagataattttttgtaatggttgtgaaaaattcacttataataacacgaaacataatgaagtattattagttcatttatatataatacacaaaaaaacataaaggcaataaaaataaccaaattaaaaaaaaatggagaagtagaaaagaaaacgaaaaaaaaaaaaaagagagagataagatgcatgcatggtatagaagtcgcaggctgaagaccagaaatacgaatgtgtttgaatagacaaattaaggaatataaagacagaagagcccatccattttcgcatacacgaatacatccccctcgactccaattattttattatagtccattctctcactttctattctaaatattgtggacgttataaaggctttttatttattttatgtcgagttttttagactacgtagagccgaatgaaaatttcatgtttaggtatacgaaacttggatccaatgttacggattcagatgggtgtacaagatcaaatttga

SEQ ID NO: 179399 - DNA, 140 bp, Arabidopsis thaliana landsberg
ttgatggagaggtgaaatgtgagaggtggaagagggatgatgatgatggtggtaataatggtgatggttttgatgaatcaaagaagacatggtggttgaattggttaatgggtcggaggaagaagatgacagcacagtga

SEQ ID NO: 179400 - DNA, 278 bp, Arabidopsis thaliana landsberg
atgataatttggaagataaatgaaagattaggaagagaaaaagcgaataccgttgaaccgggaccgattgatcgatcggcgagagcggaggcgagtcggcgacaccggtcataagtctggcgccacgtgtactctcgcgatccgtgaatcacagattttctggtcggatgaaccacggcagccctatcaaggaaccaaagcggagtcaacgccgtgtagttggccggaatcttgggaagatcatcgatgtcacgccacttcgttgccgccatatctga

SEQ ID NO: 179401 - DNA, 447 bp, Arabidopsis thaliana landsberg
ggagctggagcttttgaagttgcagcaagacgacacttaatcaatgaagtcaagaaagccgttcaaggggtgagtagaaagcaatattcctttgctccaataccaattcttgtttttttccggttgctaatgtaaattgtgggcaaattgcagcgcgctcaactcggtgttgaagcttttgctaatgcccttctcgtagtgcctaagacgcttgctgaaaatgctgggcttgacactcaagacgttatcatttctctaacggtattattcttgtattttcctcttctgccactatcgattatgctccaagtaaaattatgtttgtgtttatctcactgagtttcgatgtatatacagagtgagcatgtcaaaggaaacatcgtgggactagacctacaggatggagaacccgtcgaccctcagctagccggcattttcgacaattag

SEQ ID NO: 179402 - DNA, 348 bp, Arabidopsis thaliana landsberg
  unsure (1)..(348): unsure at all n locations
atgccactgtctgcgttgaccgcgctgtcgcccctggacgggcgctatgccgccaaggtcgagcccttgcgccccatcttcagcgaattcgggctgatgcataggcgcgtacacgtggaaatcgcctggctgatcgcgctgggcaacgagccgggcgtggtcgaattgcccgcgttcgatgaannnnnnnnnnnnnnnnnnnnnnnnnnnnnnnnnnnnnnnnnnnnnnnnnncggcgagcgcatcaagaccatcgaggcgaccaccaaccacgacgtcaaggcggtcgaatatttcatcaaggaacgcatcggcgcggacgacgcgttcgccaaggcgctggaattc

SEQ ID NO: 179403 - DNA, 172 bp, Arabidopsis thaliana landsberg
tctaaagagaaagttaataacactattgtttttcccattctcttacatgagctgtttgagatcaaaatacctgctgattctcccatcaaagcaaaaggagatggagtggtattaaatcgtaaagcactgatgattggtgattggaaaaaaggactagatggagaggcaggag

SEQ ID NO: 179404 - DNA, 207 bp, Arabidopsis thaliana landsberg
agtttttcagccaatgagagagctctatttcagatccactcgcacaaagtgcgcgttgagcgagtgagagcgattctgtgggtgtacccctttccaaatcatgcctttttcaatcgacgcattcctctccgaaatacacatcgcgtgacttttgtttttttgctttcttctctaaaccaatgtaaaccgaaccaatatcgattttaa

SEQ ID NO: 179405 - DNA, 104 bp, Arabidopsis thaliana landsberg
aaaagtacaacatgttatacagtaaacgcaacctcaatattcgtttgaagcaatccgattctaaagatttgtttggaagagtaacaagaagtggaagagcctga

SEQ ID NO: 179406 - DNA, 1393 bp, Arabidopsis thaliana landsberg
atgaagcttgaagttggaaaagctcaagctattctgaaagaatacacgggtccgcagtacgaaattgaaaggcacatgacggtgatcacgcttttgttcatttagatcttatctactagattatataatctaatgtcctcaatatttttgtattgtgttggttaggaatttttcatcacctattcactaggttgacaaacagatctattttgttctgttattgactgagtttatatgtttgcagtcttgggttggaaaagtggcggacttcccaaaccctgttgcgtcttctatttcaagtagagtgatggttgagctgggaatggtgacagcagttattgctgcagccgcagttgttgttggaggattcttagcctcagctgtttttgcagtcactagtttcgcctttgtcactacagtatatgttgtttggcctatagcaaagccattcctcaaactttttgttggcgtcttccttggtgttcttgaaaaatcatgggattacattgttgatgttctcgccgatgggggcatcttctcaaggatttctgatttctatacatttggtggtgtagcatcaagtctggagatgctcaaaccaatcctacttgttgtcatgactatggttcttcttgttcgtttcacactgtcacggagaccaaagaactttaggaaatgggtataatactttaatcactcaacacttttttgcagaatctattgatatcgcttgcgccctcaatcacttcaaatgtttttgcaggatttatggcaagggattgctttttctcagtctaaagcagaagctcgtgttgatgtaagtttctaaccattactcctatatgcatgtttcttcagttctaatacttttttggttgagttttttatgacttcaatgattatatttcagggttcaaccggtgttaaattcgctgatgttgcagggattgatgaagcagttgatgaacttcaagaggtatcgcttgaccaaatttctcgtgcaattactttagtatgcttgcgccagttcttccctgagtatggatctcttgttttattatgtgcattcttggttagcttagcctctaaaacccttaccattagggcttcactgctaccccatcaagtataaagttgcatgacattatttcgttgaatcttggaagctcgagagaaaccgggatctgaagcttactaacctcttagtctcattacgattatctcattttcttgatagcttgtaaagtacttgaagaatcccgacctgtttgataaaatgggaattaaacctccccatggagttcttctggagggtccccctggttgtggcaaggtatgtgtaaccatctatgctaatgccaatcgaaaagatttattgttaagtattgaatag

SEQ ID NO: 179407 - DNA, 319 bp, Arabidopsis thaliana landsberg
aacataactgcaggaaaaaaaacgacatgcgacattggaatcctgtttaaaatctgccgatttgtggaaggtatttgcagctttcgagtgtttgtgctacatacggggtcgaatccatcattcccaaaggtaaatattgttagatctggatttttaagcacacaattagtatctttcacaaatttatagtttagtaactgttgataagcaagtaaagttctcgtcgtcgcaggtgaaatctgtataccctaatactgtttttagatggcgaaccaccctattcctcgtcggttgtttcgggctggatctgaaccaaacg

SEQ ID NO: 179408 - DNA, 1106 bp, Arabidopsis thaliana landsberg
ccaagaataatttaggagtcgtcatcgcgctctggtcaccagttattctcgtgagtttgcacatactgttcatttccatatcttcctttgtttttatggtttcccctgtggtatgctaatttctatatgcaggtttatttcatggacactcaaatatggtatgctatagtttcaactctggtcggaggtttaaatggagctttccgccgtcttggagaggtttattgttgtcttccttttccatcagaagcaaatatgattacttttacattacggagtggcatacactcacttctttagtttccaagtggatagtttcttaaaagaactttgtttcacttcagatccgaacacttggaatgttgaggtcgagatttcagtccataccaggggcctttaatgattgcttggtaccacaagataacagcgatgatacaaagaaaaagagatttagggcgaccttctctcgcaagtttgatcaggtctggttactcctgtttaagctaaagagctatttccactatcctttttctttattagaactctatttaaggttctgttctgctcttttttgtaaatccagctcccatctagtaaagacaaggaagcagcgcggtttgctcagatgtggaacaaaataatcagtagtttccgagaagaggacttgataagtgataggttgagtgtgcctttgaatattcatctttattttaatttagatgattttgaaatccttttaatcggagaagagttcagtgaaaacattcattactatgcagggaaatggaactcctgcttgtgccatattgggctgaccgtgatctggatcttatccgctggccaccttttctgctggctagtaaggtgagtatttttatctttgtcttaactatgataggttggctttttggtgttattttaattatttattgctaaatgtggtagatcccaatagctttggatatggcaaaagatagcaatggaaaagatcgtgaactgaccaagagattgagtgtcgacagttacatgacttgtgcggttagagagtgctacgcctcttttaaaaatctcataaactttttggttgatggagaacgagaaggaca

SEQ ID NO: 179409 - DNA, 1231 bp, Arabidopsis thaliana landsberg
atgaggtttatcttgcgtcatctgcattcacttggagtgatcaacaaatttgattcctttcttctacattttcacaccaaatcgcttaaatctaaccacactttgaagcaataccttgaatctggggaaccaatcaaagctcttttagatttccggcaccgattcagacaaagtcccagttttgttgacagtttttctgttttgtttgccattaaagcttcgtcagctcagaaagcttcctcatttgatggtagacagatccacgctcttgtaagaaaactaggtttcaatgccgttattcaaattcaaacatctttagtgggattctactcttccgtgggtgatgtcgattatgcacgccaagtgttcgacgaaacgcctgagaaacagaacattgtcttgtggacagcgatgatttcagcttacactgagaatgagaactctgtggaagctattgagctgtttaaacgaatggaagcggaaaagatcgaacttgatgaagtgattgtgactgtggctttatcagcttgtgctgatctcggggcggtgcagatgggagaagagatttattcgcgtagtatcaagagaaaacgaagattggctatggatttaactctgagaaattcacttcttaacatgtacgtgaaatctggggaaactgagaaagctaggaaactctttgatgaaagtatgagaaaagatgtgactacttacacatctatgatcttcgggtatgctttaaacggtcaagctcaagaatctttagaactcttcaagaaaatgaagacgattgatcagagccaagatactgtcattactccaaatgatgtgactttcatcggcgtcttgatggcttgtagtcacagtggcttagtagaagaaggaaaacgacatttcaagagcatgattatggattacaatctgaaacctagagaagctcatttcggatgtatggtggatttgttttgtcggtcaggtcatttgaaagatgctcacgagttcatcaatcagatgccgataaagccaaacacagtgatatggagaacactgctaggcgcttgcagtcttcacgggaatgttgagctcggagaagaagttcagagacggatctttgagttagatcgtgatcatgtcggagattatgttgcgttgtcaaatatctacgcttcaaaaggaatgtgggcccagaaatcaaagatgagggatcgtgagaggaaaagaagaatgcctg

SEQ ID NO: 179410 - DNA, 47 bp, Arabidopsis thaliana landsberg
aaaaaagtgaagcgaaaaagatgattcgaagtttgaagtacgattaa

SEQ ID NO: 179411 - DNA, 546 bp, Arabidopsis thaliana landsberg
gttttcaaagatgctgttcgaatttcattgaatctttgctatgggcttggttgtcctgtttcaggcaggactgtttttgtttatcctgttagcggaccttctttaagtgatcaattcaacgggaatggtggatctcgctatgatgatgttaaccatctatcgctgcttgcctgcaaagagttgtgtttagagttgactcccttcaggaatatgttacaagctaagaatgcttttgaaagttcttacgagcagaacggaaatgggaattcaactcctaagacaccagcaaacttgcaaaagtttagttctcctcgccccaaatctccggcttcaccaatcatagaggactctgttttcagttgcaagcagcggttttcatctgaaagctcgattgatctacgagaggtgttgagcaatgaaagttcgaaaaaacttttgcagatttgtgcaagttcgtggctttacccttgtagcctgctatatgggaattttgtgtctgtgcccattctctcagaaatctgtatattctgcgtcaaaagagcttga

SEQ ID NO: 179412 - DNA, 668 bp, Arabidopsis thaliana landsberg
atgactcttgcaacagctcttttcaccaccgtcgaagatgtaatcaacacgttcatcgatccaccttcacgtccttccgtggatccaaaacacgttctctctgataacttcgctcctgttctcgacgagcttcctccaacagactgtgaaatcatacacggctctcttccaccgtcacttaacggagcttacatccgtaacggtccaaatccacagtttctccctcgtggtccttaccatctcttcgacggcgacggtatgcttcacgccataaaaatccacaacggtaaagccactctctgtagcagatacgtcaagacttataaatacaacgtcgagaaacaaaccggagctccggttatgcctaacgtgttttccggattcaacggtgtaacggcgtcagtagctcgtggagctttaacggcagctagggttttaaccggacagtataatccggttaacggcattggtttagctaatacgagtctagctctcttcagtaaccgtctctttgctttaggtgaatctgatttaccctacgccgtccgattgaccgaatccggagatattgaaacgatcggacggtacgatttcgacgggaaattagcaatgagtatgacagctcatcctaaaaccgatccaataaccggagaaactttcgctttccg

SEQ ID NO: 179413 - DNA, 1064 bp, Arabidopsis thaliana landsberg
aacagcaagcgtcagggtaatgagtttgtgcaagagttctggaaagttctccctggtgctcttaaagacattgtttctcaaggagatgataatggcaaaagcgctgtcgcacgtgtggtatttctctctctctctctctctttctttcattcttcgttggagcttttgttcttgtctggttaatgctcaatctcatgttttgtattgggggtagtctagtgtttgatgttagggatgaagagctttaaggttcttgagatgtgtgatgcaatacagaagacatgaatagagaagttaattgctaattgagatatttggtttacgtgatttgtagatcaagatatgggaagaaagaagagtgtttggatcacgttcaaagagtcttaaagatgtaatgcttggagaagatgttcctctgccacttgatatcagcaaaaagcggcctcgcggatccaaatcttcaaaacgggagtcaaaatcgtccagaacggtaaaacactaaacaccaaagttttcttttctcccctattaatatcagtcatattgcattttcccggttttttgcttttggatgcagaaattagcatcaagtggtggtgtggctgagaagatagcatcagcatatcatttggttgttgcagaaaactcaaatgaagaagctgagatgaataaatgtaagtctgcagttaaacgaatccggaagatggagaaagatgttgaagaagcctgctctactggtaaaaacctgttacactgattatcgattatcaaaatctagtgtaaatcaacttgtgtctctacagcaaaagacaacccgaagagaaaatctttggcgaaagaattggaagaagaagaataccttttgagacaatgtattgagaaacttaaatctgttcaaggaagtagaagttcccttgtgaaccagcttaaagatgcactacgtgaacaggtacaaaatacttttcttgcacttagcaagttcactatttcggtaatctaattttcattcttttgcttacttgtgtcaggaatccgaactggacaatcttaaagctcagattcag

SEQ ID NO: 179414 - DNA, 93 bp, Arabidopsis thaliana landsberg
agcttagaatcctctgcttcaatgggaagtagaagatcatcgaagaagcagatcacagtcacttctctgaagccatttaaactcagaactgag

SEQ ID NO: 179415 - DNA, 561 bp, Arabidopsis thaliana landsberg
atgacgtcgagacttccgaagatgattcctcttcatctgaagaagacgaaccaatcaaatcccttcccgccacaacgggccgctgctcctgctaaatccaccgccgtctccgccgctactccagctaaatccacctccgtctccgccgctgctccttctaaatccaccgccgtctccgccgctgctgattccgattctggttcggagagtgaaacagattcggattctgaatcgacggatcctccgaaatctggatccggtaaaacaatcgcttcaaagaagaaagatgatccgtcgtcgtcgactgctactttagctttaccggcggtgaaatctggagcaaagagggcagcgagtgaagctgcgacgacttcaacgaaacgagtcaagaaagatgaagagagtgtaaagaagccagcactttttcaaagactatggagtggcgatgacgaaatctctatgttacaaggaatgatagattatcatgctgatgcagggaagtctccttccgcagatactaatgcgttttacgagttccagaagagatcaatcagctttgag

SEQ ID NO: 179416 - DNA, 1289 bp, Arabidopsis thaliana landsberg
tatcaaaattaggattttccgtgaagcaggtttctaaagcagttactcaaaatgcggtaaagtatttggtggaagttgttaatttagagactgcaccactggcttctgttgctatggaagctctgggtcatattgggatttgtggcgcattaccctttcttgttaatgattctagtccaggtcagtttattccaagaacttgtctgtaacatgtatgcgagttttcagttgattgactgacttgctctatcagggactcaagtgctggaaattcttcaagaaagattgagcaagctactctctggtgatgatataaaatcagttcagaaaattgctctttctcttggacatatctgttcaaatgaaacgtcatcttcgcacttgaaaatagcgcttgatcttttatttagcctttcacggtcaaaggtgggtttgtaatattgttcgcaaagccactgccctctgtcctttttattagatccggaagaattcaagtagaactgagtaaacctctaaattttgtacatttgttggtggccaggctgaagaaattttgtttgctgctggtgaggcgctatctttcctctggggtggtgtaccagttactgctgatatgattctgaaaactaattatacttctctttcgacggactcaaattttctgatgaaagaagttaaatctttgtctgatgtcaaaactgatactgaggaagatagccgtaccacaaccagagaaacaattactggaaaactctttgacactcttctgtatagtagcaggaaggaggaacgatgtgctggaactgtgtggatgctgtctttgaccatgtactgtggccagcagccatcaatccaactaatgcttccaaaaatccaggttagcgagctgtaatgggaagattctttgctgttgtaacccgcccctgcaccatcacacctataaggaaaattatgagcattgtcattccagttaatttatatgcattacccattcggagccttgaactgttatatcacttactattttatcacaaaagccccatgacttgtgctatgttgtcaactctacaatgtgtagaagcttgtacaaaccgctgtttaactaaaatattttttcgcaggaggctttctcacatttgttaggtgaccagaatgaacttacacaggagctggcatcccagggcatgagcatcatctatgaacttggtgatgcatcaatgaagaaaagcctggtagatgctctggtaaatactctaacaggcacaagcaaaagaaaacgagctattaag

SEQ ID NO: 179417 - DNA, 760 bp, Arabidopsis thaliana landsberg
atgagcggaaaagggttagagggacgggaaggagaactgcgtaaagtgacacttccattgatttcgtctattaagcatctccgaaatttggcaagagagaactatgagatgatgaggtttgactgatctttgcattgatgtttactttaccagctctagtcttcattgtcaacaaattcaagcagagaaacaagagagagatgaaatcgtcagaagaagatgttgagatacaaaaagacaagcgattgttgatattataggtaacatactataatagaaacaaggagactttaaaatttgatttttcattaagtttctactaaaggaaacaaacttaaacgaatctaaattgtttcattattacatgcctaggcagcataagcagtttcaattgcattacattaataaaaacaagggtaagcatagactattcagaatctattatatgattgttgactctcttcgagcacaattctacggcagatagggcaagaattacacctccttaaccactcagagatacattctttatgaaatcgatgtgagcaatgtgccaacttttttattctcttaccatcgggggacgtaatcgatcaaaaaattctccaaacatataggacatgtcgattcgccttctacttcttgagtttcttctttaggaagacaagaaacaggaatcactgagaacacttcttgcgttaaaacgacgttaacgaacatgaacaaccgttgtagaaacccaacgcttaaactcgcttga

SEQ ID NO: 179418 - DNA, 373 bp, Arabidopsis thaliana landsberg
gttcaatgaaggatttcaacttcaacagtccagccatcgaaacattagccgccgtctacataatccaccggtgaaagtgtagtggtggagatcatgtgaaattagggtctgactgtagaagtagtcacaggatactgaattgcaaaagatagaatggcgataaatgtaagaaacgtgacgatcggtcttcagattacaagattaccgacagattatcacgaacctctcttcgctatcctctttttcctcgtagtctccggttaaagctttacggtggctagatcatcattatccggtgaacgagagagggttgacgtacggagatcatcattcaatcaataaaacgatgctttccacgccgatcaatggatga

SEQ ID NO: 179419 - DNA, 792 bp, Arabidopsis thaliana landsberg
atggcgctttgtcaattcccactgaatcttcacactatctcctcatcaacatcttcatctcctcgattccgtcgtcttcaacctctagatacctctacaaagcccaattttcttgttcgtagactcagatttcatagcttcaatcacccagttcggtttcacacccgagaattgagtgtcatcacagccaccattgacatcgacactcaccagaggaagaagacgaagagaaaacctaaaccaggttttttcgaagaaattagtgataaatggtcttcacgtatcagccccaaaaccgagaaattgccatggcagaagcaagaagagcaaattcaacatcacgaagacgaagaagatgaggaaggagatgaatcaagttcaaaactttcttctgggaatggtttatctgataagagaaccgattccaatcgtctctattcggcgaatgagccgtcgagtttcccaagaccaagcggatacatgtctgctccatgggttaacaatggtgggtctaaaggtgttaactttacgactagctccgagcaaggaattcaaagttcgagtttctacgatgttactactgtagatagatatagaagggataacgattctagcgatagagctgtagattcagatttagatgatggtaaaagagggatgatagattcagggaataataagggaatatggagaacgaggaagagtaatacagtagaagctgagaggattgtaccagaacatgagctgaaaaggttgaggaatgtagctttgagaatggttgagagagtaaaa

SEQ ID NO: 179420 - DNA, 568 bp, Arabidopsis thaliana landsberg
agccattcgattcagaagcactcatcaaatcgaacggttaaaacgaaacggtcgaggaagccgaaaacagaggtaggcagaggtagaaccgtactacgagtctcgtagtagactagactttatcattctttaatgggcttaaggccccattttgtttacaaaagtgtaagcccatgtgtagggggatctgaaaccctagttcactttaaaccctcagaatcatttacatattagattaaaatttcctcacaggctagagagtagagagtgatccctgtgatcaagctatcgtcgacgttatattttctcctcaaagaacaagggcacacacgcttaaagcacaaaaaacaaatcagttgttttggaaaaaaatgacatcgacgtgttgaagctatcatcgacgtgtctattatgctatgaccttatgaaatacggaagtgtgtccagagactatcagtcatgtcactccaccgatggactctttatctttacacaacattgatatgtctaattcttttccaaattcctctcttccttttaggtcttatcaggtaaaagggcccgttag

SEQ ID NO: 179421 - DNA, 490 bp, Arabidopsis thaliana landsberg
atggagcagaagagcgataagaagcgtgggaagaaggtgaaatctaagaaagcagaagctgaggagcatgaagaagagcttaagaggcttcaagaaaaggtgagtcatctatgaaacatgtttggttgcgatattgtaatgatatattagtggaaagttgagttttttttttaactttacggatttttttgttccgcaggatcctgatttttttcagtatatgaaagagcatgatgcagagcttctaaagtttgatgctactgaaattgaggtgagttttgttagtttgtatatgttgagtttgtgactcgacttccagttgtgttggaagctttttgtcttagggattcacattttgtaggatgatgctgatgttgaacctgatactgacctggaagacactgaaaaggaaggtgatgatgaagcaacaaagatggaaattgcaaagaaagtgcacgtgcagaaaacgattacagcatcgatggtttga

SEQ ID NO: 179422 - DNA, 1276 bp, Arabidopsis thaliana landsberg
atgtcaaagcctcctggattcaagtacaagagcggtcagtacatattcttgcagtgtccaactatctctcgatttgaatggtgagtactgataccgaattcccatagtgttaacaaacatctcaggtttcactcagaaagatattccctaaacttttccaggcacccattttctattacctctgcaccaggagatgaccaacttagtgttcacatccgaacactcggagactggacagaggagctacgacgagttctaactgtgggcaaagatctttcaacatgcgtgattgggcgttcaaaattctctgcctattgcaatattgatatgataaagtaaatttcaagacatctttgctttctccttactcacttggatacctattattaacatggcttgttgatcctgcactgacagccgaccaaaattactagtagacggtccatatggagctccagcacaggactacagaagctatgatgtcttgctcctcattggactgggaataggagctactcctttcataagcatcctgaaggatctgctgaacaattcaagagacgaacaaacagtaagtccaattcagtgcaccagaaaaattagtcttttctagaaccttgcaccaaatacatatctctaaacttcatatggcacaggacaatgaattcagcagatcggatttcagctggaatagctgtacatcttcatataccacagcaaccccaacttcaacacatggagggaaaaagaaagcagtgaaggctcacttttactgggtcacaagggagccaggatccgttgaatggtttagaggagtaatggaggaaatatcagacatggactgcagagtaatactaaacaccagcatatcattcatttgcatcacctctttaacattgatcgatatactaacatattccttcatcttctcgtaatacagggccagattgagttgcacaactaccttacaagcgtatatgatgaaggtgatgcaagatcaaccctgataaaaatggtccaggctttgaaccatgccaaacatggagttgatattctatccggaacacgggtaagaattgatgcagggcatataaccagaaactatttgccaatattacctataactgacaaaataacatcattcaaacaggtgagaacacattttgcaaggcccaactggaaggaagtcttcagtagcatagcaagaaagcatccaaattcgacagtcggtaattattctatacaatcagctgcttaccatcaagacatcttataa

SEQ ID NO: 179423 - DNA, 265 bp, Arabidopsis thaliana landsberg
atttttacggccagggatgcagagaacgtagaggtggatgagaaaagtgaagttgtgaaagagaatgagcaaggtgaagctttgaaagagaaaaagcaaggtgaagctgtgaaagagaatgaggaaagtgaagctgtgaaagagaatgaagaaagtgatgctgtaaaagagaatgagcaaggtgaagctatgaaagaggttgagcaaagtgaagctgtgaaagagaatggagaaagtgaagctgtgaaagagaatgaagaagtcg

SEQ ID NO: 179424 - DNA, 1303 bp, Arabidopsis thaliana landsberg
atataagcttgttatctctgtatcagagcctaggaaaattgcatctccaaccatcacaaacatccaggtacctcattagtcattacatataatttagttctgataatgccatgactagctttgatatatctgtcgtgtcttcaactatttgctaatttagttttggaacctcggctgactgtatcttaagatgagtaggattagcatgacagcttgtgtagacacctcagttgttaaacgctgattgtctggtttttggtagcatgcatatgtgcatccccttgcaatgcagcaatcgttttcgctttcatcatctttatagatcagtttaagatcttccgtttttcagcaattaggaatttggtgtatagttccttcgtgtttagtaccgtcgaacctagattgaacattattactttatcttaatattgatctgcccactccttgtagttactattagtaactgtacttattggatctggacatgtgctctttcaccctcttttacttgttaatattcgatgcttgacatacagaacaacttagacgatgtggtttgtgtgtagggatggctgccaggattaagagcagaaggagattccagccagcttccaacaattgctgtagttgcatcgtatgatacctttggagcagctccagtatgtaatatgagtagtggatcttcttaccgtagtatcaactacatacctgacaaacttgtgtatgtaggcattatcagttggaagtgacagcaatggaagtggggttgtggcgcttcttgaagtggctagattattttccgttctgtactcaaatcccaagacgagagggaaatacaatttactttttgcactaacatctggtggaccctacaactacgaaggaactcaaaaggtactcgacctaacttattgattctactaaaaccatatccttcctgcttcttctgtttggtgcatttgtaaacttggttgtatccttcattaagcatcatatcttctgcagtggctgaagagccttgatcagaggatgcgtgagagcattgattatgccatttgcttgaacagtgttggttcttgggacagtgaactattgatccatgtgtcaaagcctccggataatgcctatataaaacaaatttttgaggtaaacaaaattagtgcatcgattgttgcagtgactagctatgatgatagtttattagttaatggattcatctctgcagggcttctctaatgtggcagaagacttgggttttcaagttgctctgaagcacaagaagattaatatctctaattcacga

SEQ ID NO: 179425 - DNA, 209 bp, Arabidopsis thaliana landsberg
ctggagcaccaactttccgtaatgagctgtttttcagccgaagacccatgaaaaatatctacatcaatcaactcgacaacgaaacgttagaggatatattcaagaataccttaccggcaacatcagttagcaatctacgacaaatgacatggcgatccgagaccaatggactaaggcttcaaaaatcatcgaaaattcatgcattgtaa

SEQ ID NO: 179426 - DNA, 502 bp, Arabidopsis thaliana landsberg
agaaggagatttcaagtttctaaccacaaacaacccaaaccaatctcatcaccatgataataaccattacaacaacctcgacattttgtcacccacaccaactataaacaatcatcatcaaccttcactttcttcttgtcctcatgataataatctccaatggccagcgttaccagatttcccagcgagtaccatttctggtttccaagaaacccttcaagattatgatgatgctaataaactcaacgtgtttgtgacaccattcaacgataatgccaaaaagttattatgtggagaagttctcgaaggcaaagtactatcttcctcctcaccaatttcacaagatcacggcctttttcttcccaccacgtacaactttcaaatgacttctacgagtgatcatcaacatcatcatcgagtggactcatacatcaatcacatgatcataccatcatcatcctcatcgtcgccaatctcttgtggacagtacgtcataacttaa

SEQ ID NO: 179427 - DNA, 109 bp, Arabidopsis thaliana landsberg
ctgtgtccgagagcgacggcaccataaaggagccatctcacggtggcgggaccaaacctctattcgacttatccacgtcagacctgactcgactaaaaccacgctttga

SEQ ID NO: 179428 - DNA, 351 bp, Arabidopsis thaliana landsberg
atgaagaactgtgagtactgcattcttggaaaatctcataagactccctacaagacaggaaaacatacctctaaggagattctagagtatgttcactcagatctgtggggatctccaaatgttactctaagcttgagtaagtgtcaatattacatctcctttgtagatgacttctcaagaaaggtgtggatttatttcctgaagacaaaagatgaagcctacacgaaatttgttgagtggctagcattagttgaaaatcaaagtgggaaaaggttaaaagtcttaaggactgacaatggtctggaatactgcaacaagagctttgatgactattgcaaagaaagaggaatt

SEQ ID NO: 179429 - DNA, 499 bp, Arabidopsis thaliana landsberg
  unsure (1)..(499): unsure at all n locations
atggtctcaacacctccaaccctattaatgctatttgatgatggagatgctggtcctagtactggtttagttcaccgagaaaaatctgatgctgttaatgaagaagcccacgcaacatcagtacctcctcatgcaccgccacaaaccctttggctattagataacttcaacattgaggactcttatgaccgagatgctggtcctagtactggtnnnnnnnnnnnnnnnnnnnnnnnnnnnnttaatgaagaagcccacgcaacatcaatacctcctcatgcaccgccacaaaccctttggctattagataacttcaacattgaggactcttatgaccgagatgccggtcctagtactagtccaatagaccgagaagcatctcatgaagtcaatgaagatgcccacgcaacatcagcaccttctcatgtaatggtctcaccactacaaaacagaagaccatttgatcaattcaacaaccaaccttatgatgcgagtgctg

SEQ ID NO: 179430 - DNA, 783 bp, Arabidopsis thaliana landsberg
ggattgccatgccatatgtactttgatttggagttcaatcagaaagaaaatgaaggaaaaaatgtggatgaaatggttgatatcttgatatcagtcattctggaagccgtgcatgagaaatatgctatcgaaggacaagaggactggatagtagagcttgattcctcaactaaaggtactgtaatatatatgctctcccagctgctagttgaatatgaggtgtcctttttccatcagctttattctgtgagtgctttcaaaaaaatgccagttattgttaaaaaaaagtttcatggatattgtaaactatttttcctttaatatttctgtatgagaaggtaggttccttttgactaagaattcctagaaaagttcatatgctgataagcttttttttatatcaatatgaatgtcatatgcagataagttctctcgtcatgtaattgtaatcattccaaaggttgcctttaaggataactcacacgttggtgcttttattggagaggtatgcttcagttgatatttcacttttattgcctgaaaatatggcttattttcatcttcatgtttctccagctatgctcacggatagtaaatgcgaaggaaacagatgaaaggttgcgcaagctgtttgttcacaaagaggctaatgattcggcatccctactttttgtggatactgctgtttactctagaaaccgttgcttccgtcttgcactatcatcaaaagctggaaagacatcagttcttttacctacaggacgattcaaatgtaaggatatg

SEQ ID NO: 179431 - DNA, 138 bp, Arabidopsis thaliana landsberg
agcaactatctctccgttttgactcgattaattgagctcagtggttgtcggtacaccaaatctagaagcggaaaagacacgaagaagaaagcactcaccggagatagtgaacttgaaggtgacagagagcgacgctaa

SEQ ID NO: 179432 - DNA, 551 bp, Arabidopsis thaliana landsberg
atgcaacaaaaaggaaaggaagagaacaagtcccgacgccggcaagcaacggctttgccggtgtcagaaagcattgttgaaagaggtttgtgggaacgtcattaaatattgaattttctatgagaagacatatattctctctctatctcatgttccttaaccagagacaaaaaaaaaattctttctatcaaaggtaatggaacttatacttttgttgctgactctactcttgcttctggttttgcacttgaaccaccgaccctgcctaaagaattatgtatgatattttttctggtcttttttaatgttaggtcattttgatattgatttatttttcttttgtagtacatgtcttaaaaatagtcgaaaagaagttaacgaagaccggttggaagttcactgtgaatccatgtgacgtttcaaagagtggagtatggagaaatcttacaactctggaaggatctgaagatattgtatatgcagctgcaacggatctatatgccacatcactaacatgtaaaacttatatttgtgtgatatttcatgtttaa

SEQ ID NO: 179433 - DNA, 162 bp, Arabidopsis thaliana landsberg
gagattactgatgaccccatggatgtgtttgttaccccactacaatcagagcactctaatcaggctgatgcaaatgaaggcaaccctatttatgacacagatgtcaaagatcaaaatgccaatgaaggagatgttgatagccaaatgcatgtacttatataa

SEQ ID NO: 179434 - DNA, 204 bp, Arabidopsis thaliana landsberg
atgcaaaactcaaggcgggagaggaaggaaccatatgatgtttcgctgcaaactagtgatgaaataaaaggagaagctgtgcgattctttaaagagttgctgacacatcatccaagtgattttcagggcctgtcagatgccaacttaagaaacctgatgtcatttagatgttctgcaactgatcaggacatgttgacaagagag

SEQ ID NO: 179435 - DNA, 129 bp, Arabidopsis thaliana landsberg
atgtacgtatcaactaagagtttgcttgtcaaaaaccaggttgattctaaacagttaggagatggacttgtggctgcttcaaagattgttgacggcattacacaaaatgttggaaactatatgccaaag

SEQ ID NO: 179436 - DNA, 521 bp, Arabidopsis thaliana landsberg
atgcggcttttaaacaatgatttaagtgttgatgaagctaaagaaatccaagaattttccgattggttattggctgttggtgatggaagggtcaatgagcctaatgatggtgaggtgataattgatatacctgaagaattgttgattcaagaagcagataatcctatagaagctattagtagagaaatttatggagatccaactaaactgcacgaaatcagtgatccaaaattctttcagaggagagctattctagctccgaaaaatgaggatgttaacacaataaatcagtatatgctagagcatctcgatagtaagtttacatatactatattgattatttagtgcatcgttttatgttctgtattaatcattattttgctgaagatttaaatgttacttgatttggacaggtgaagaaagaatctatctatcagctgatagtatagatccttcggattcggactcactaaaaaatcctgttatcactccagatttcttaaacagtattaaggtatcag

SEQ ID NO: 179437 - DNA, 119 bp, Arabidopsis thaliana landsberg
ccccaaagttcggttacgttaatattggacatcaaccaaaccgaatgcaacctggacccaaattggagtactcatcggattcactcacatccgatcgcttcatttggattttgtattga

SEQ ID NO: 179438 - DNA, 111 bp, Arabidopsis thaliana landsberg
caagattttgcggataaggcgaaggcaacgatggaaaacgcggaaccagatcggaagcaatggcagactctctgcaaaaactttctcaaaggaagatccgagcaagtttaa

SEQ ID NO: 179439 - DNA, 419 bp, Arabidopsis thaliana landsberg
atgaacggactaaagttacgacaagggtacatgtcggattgccacgtggaaaattttgtggaaactttgccacgtagcagtgccggtccaaaatataattttttttcaagaatattttattaaacataaggttacaagacctaaaaatctattaaaattataaagatcagagagtaaaactcaataagaattcattaattttacaccgaaagcgaaggaattttagcgtttgtactctatccaaaaatacgtgtcaaactgaaattatgattgcaacacgtgttgaaaagtcatcggaagtgtaccgacatcaaccaccgctgttgagctccaattccggcgaagaagatatcgacgataaacaatcgcacgaaatcccttttgtgttaccggaaaattttgaacaaagctctaattaa

SEQ ID NO: 179440 - DNA, 1439 bp, Arabidopsis thaliana landsberg
atgaagtatagaagaaatactatagagaaagcatttgaagcaagacgaggactaattccagaagatcaatggagagaatttgtggaaatacagttcactgataaggctaaggtaaaacctattaaaatctgcttaccctactttatagtttgtatatatcacatataaatatgtactgctttgttgtaataaagaaagtgagagagcgtaatattaatagtcgaaacaatcataaaataccacatacacttgaaagaaagagtttagcaagaaaacctaatgaaatggtacgtttattaaacccttagtcagatttatggttctgttaatcctctttaatttgttgtaattttccatttattaggaagaggagacaggcaaagaaccaaatcgagctgaactttttattgtatcaaggactaagtcagatgaaagtttattgtgcaacgaagcaagattcactttggtaaacttgtcatctttgctttttgattgaaggttctgtgtttcactttggtaatcatgtctgttttgcaggataagctttcccaagtaatgacccagaatattcaagatgaagcatccaagacgagtactgagtctagaccatatgatgcatttgaacaagtatttggttatgaaccttcgggtcgagttcgatgtatgggacgtggagtaacaccatccaagtatcttttgaatcatgaatctatgacgtctaatactgaaattttagagatgaagactcgtttgaagggacttgaagagaagctagacattgtgacagatgctcttcttgttcttgttaaatcaaaaagccaattccaagtaagttacaatttctttctgatccaaatgttatcatatcatgaagataatagaaactttattttttataggtgactgcaagtgcaacaactggaaataaaaaagtgaaaaccgatcttcatcaatcatctagtatcaacagtgaccaggtaacaaaagtttatgtacatgtgacggttttggcgtatgaaattgttgcaatggcaattgaattcatggttcttttgtttagctaaaaattgaatttgaactggaatttcaggaaaatggcattttaagaactggaatttgaactacaacatagattaatgtgatttggatggaaacttgtatgtctctcttctctcttctctcttggatggttttgttattatagtgattctcgtttgtagttaaggctaagttgtagttaaagaatcaaaaggtacaagtagtgttattatcgtctaagttgtagttgtagaataaaaagatcatgttattatagtgttgtaagactgagaaaaattgagactgccatatgcccatatatgtttttgtttcagttcagatatgcttcagaagaggtacaagaagaagtgcatatcagatttgatataaaaattggatga

SEQ ID NO: 179441 - DNA, 601 bp, Arabidopsis thaliana landsberg
atgctgcagatactatcattcgtagcaggagttccatacattgtcgttggatttaggtatgaatttgccaaccattctaaggataaactcaaaaagtctaaacctttcgccatttaagcaaatcagttcaagataacattaccatatcccttttcatcttgatgtagagatgatggaggaagactagtacgcacagagagactaacaacgagagatattgcgcatagagccagattgaaaaactattggcaggtaagtgttatcagttctcattacagacatgaatgataagaaacactaatgaatttgggaactagggaggagtgtgcttggcatttgccgatgaagttctttgctggctatacggcactgttaaagaaagtaagttcattttttgttacgtctacatagaacaatggaagaagatcttttaaatttacatttcccaacaatgtgttttgcagacgaagattacatacttcagttcgtgcaccctttcatgagactagagcttcttcaagctcaatcttgtcctgatgccatcactaatcatgttcaccttctacaaaatcctgcatcaccaccaccaccacctcagtaa

SEQ ID NO: 179442 - DNA, 75 bp, Arabidopsis thaliana landsberg
ctaattacccgatcggattcagttttcaaataaccatggatatcatcgggtattaccgaaccgaacccaataccc

SEQ ID NO: 179443 - DNA, 1333 bp, Arabidopsis thaliana landsberg
  unsure (1)..(1333): unsure at all n locations
atgcctcctcacggtcctaattctcaaggtggtcgtcgaggcggaggtcattcctccggtcgtcgtggtggacgcggcggcggcggtcgtggcggtggtggtggcggccggggggaacagcgatggtgggatcctgtgtggagagctgagcgtttgcgccagcaacaagctgaggtaattgatacattgttcttgtagattctgagttcattacttcaatttaacgattagacattgatacataatttcgaatcagatgatgaagtagtcataatttatctcagatggaagtacttgatgagaatgaatggtggaacaagattgagcaatggaaaacaggaggagaacaagagatgctaattaagcgtaattttagccgtggagatcagcaaacactttctgatatggctttgcagatgggtctttacttgtaagactctatatcttcttcgacaacttcgttttaagttcatatggtgagagtatgtcatgaatttgcttatcgttttttggaatggaagtcatgcgtacaataaagggaaggctcttgttgttagcaaagttcctttaccagattatcgagcggatcttgatgaacggcatggatccactcagaaagaggtaatagagatgttgctagtacgaaagttttgtactcagtggtggctgctaaaacgcttatactctttttcttgtagattanaatgtccacagagactgagagaaaacttggaagtcttttgaaaacaacacaagaatcagggtcctctggtgcctctgcttcagcttttaacgatcaacaggatcgtacttcaactcttggcttgaaaagacctgattctgcttccaaattgccggattctcttgagaaagaaaaattcagttttgcactcaaggaaaggcaggaaaagcttaaggtacatgtattgctaaagtaaaccgtatgcattatggtagatgtagattctggacataacatcaatttataaccgtttcaacacaggcaactgagagtgtaaaagcacttaaagcgttcagagaaaagctacctgcttttaaaatgaaagaggagtttcttaactctgtttcacaaaaccaggtaattgtttggtatgtttttcttctctgtattccatcagctattatttctgcctctctccaataatattgtcaagctattttttttagttgtcttgtgttgtgttgatcttgcgcttatagttgtgtccgttgtttatttttcaggtattggtagtttcaggagagaccgggtgtggtaaaacaacacagcttcctcaatttatattggaagaagaaatatcatccctaagag

SEQ ID NO: 179444 - DNA, 110 bp, Arabidopsis thaliana landsberg
acaaagcaataaatcaagtaattaaatttgtagccagcgcgacgaccatcgtcaacgagggacacatcaaaacttggacttgcatagctctcatcgtacgtcggcgataa

SEQ ID NO: 179445 - DNA, 70 bp, Arabidopsis thaliana landsberg
tgagtggcgttttaaaactaaaagcaaacggatcaagatagagaaagccacgatcaaagcaaaaccataa

SEQ ID NO: 179446 - DNA, 89 bp, Arabidopsis thaliana landsberg
agtggggctatttccacgttcactactcgacagctgctattaaccactatgctggtttcaatcaatggcagagagtctgtgatcggtga

SEQ ID NO: 179447 - DNA, 196 bp, Arabidopsis thaliana landsberg
agggcagaggttcataatcgtagaccaattatcaatgcattcaaagcagaacctgaaatttaacagacatagacacaaattaccagactgctccttaacaaacacccatagcaactttgcaatatttaaagacaatgaaaagcgaaaacaagcttttaccagtgctgacagcaatcaagaacgcctctatcaataa

SEQ ID NO: 179448 - DNA, 161 bp, Arabidopsis thaliana landsberg
gattcgccagatccgttggccatttctcttatgcggcctcaaattcctggaacccttatacttgaacttgattggctgcctctccgaactagcaaatttgactcgcttgtgttgtgcgttgctgggactgatggtagcttccgcctggtggaggttcattt

SEQ ID NO: 179449 - DNA, 110 bp, Arabidopsis thaliana landsberg
atgggactggtccaactcatgaaggatatcctcatcgatgtcaaatccagtttggtggcccggttttgttcctttaataaacctgcaaaaataaatacaggaatcagaaa

SEQ ID NO: 179450 - DNA, 296 bp, Arabidopsis thaliana landsberg
gcctcacaaacttcaatattcgcctctctaatcaagaaaacaaattaagagagataattcgcatcatcgacaagatcatcttacatggcaggaacaacaggacctgcttacaagaaaaatatccacctggatggacagctctcaacaccaagaagatgcaacatcttcactcccacgacttcaatgaagatgaggatttgtcactcatgtcactcccacgatttaattttgtttggatctcgaatcacttgaatgagtcgggttatttaccctgttgtatggtgctcggatcctaa

SEQ ID NO: 179451 - DNA, 3371 bp, Arabidopsis thaliana landsberg
  unsure (1)..(3371): unsure at all n locations
aagaaagaataaagataagagcctctttcatagtatcaatggcttccttcaaccactttgtgttactgcttctgttaataatcactcttattctatccgctgaagcaactaaggaacgccgagcaataccatcaaaggcagaaaggaatgaaatgaagagacaactcaaagctatcaacaagcctgcaatcaagagtttcaaggttggtttagccttccttcttcttccatgcttatattgtttcatatctaacttttttttcttatgaacagactgaacatggtgatatattcgattgtatcgatattcacaaacaactagcatttgatcatcacctactaaaaaaccactctgttcaggtttgattttatacatatttaattctctctttatctactgtcttttcaattaaaagatgcctctccttagagaatgactgactttgtatatgcagctaaggccaacaacagtacctgaatatatcactggaaacaacatttcagagagttttagtcttttgcaagaaggtataagctgtccagatggcacagtaattgtaaaaaggactacaatgcaagatcttatgcatgcacaacgtttgaaatccatgggattcgagggcccgagaccttttctcacagagacaaacaacatgaattttaatggaaaattctacgtaagaacccttataagttgatagtatatatagcaaccaccatttttgttttccactttcattttctgagtttctttcttctttatggatattaggatgcaagagctgattatggaccgaacccttttgctggagttgcaggaaacattaacatatggaaaccaaaaatcttgcaagatcaagttagtattggatacatggcagttagtggggggcctattgaagaagatttcgccagcatttcagttggatggattgtaagttaattctggttccttagcaaaagtgaccatgttcgtcaactgtaagttgcatgaatttaaagttgacaaaagtttgaaatatgtatatacaacaggtgaatccatcgatgcaccatggtgatcatgttcgtttatacgcctactggactgtaagttttgaattatactagtaagagcttacaccaatagtttctttatcaacttgtctgtgtcttataagttctttatgtatatgtttccttataattgtgttaatagttacatggaagcagtactggcggctgctacggcatgtcatgtcctggatttgtgcaagttagcaagactataccagttggtgccgttcttcaaccattttccatctataatggtcgacaatatgaattgcgtttaggcttgtttcaggtaaagtctactcaactttttatcacttctcttaaagtcatttgaattcatatttcaaaattgggaacaggatagtggcacgggaaattggtggtttgtatttaaagaggagattattggatactggccagcatcattgttcaagtcctnnnnnnnnnnnnnnnnnnnaaattatgcatcttggggagggcaagtgtatagccctatcagagagaagagtccacctatgggaagtggtcattggcctagtgagggctttcataaagctgcttttattagtggcctcaaactcttcgatggtcacgggaaagtttataatccaggacgcgggacagtgaaggtacatgagagcagaccaatctgttacaaagccagatatgttcatgatgttgataaaccttggttaaaatctgtttactttggaggtcctggagggtgcatagggtaattgatctacgagataaagagtaacaatatcataagattttaattttacacaggctataggaaaaatcaacagatttgaaatatatctaagcattacttgcgctctaataaataataataaagtattagaaattcacaactttcagcacaaatttctatagtttattgagcatagattgatagctaactcaccttaaagtacattaaaaataaaaatctcattctcaactgcaaaaaaatgttacaaagtcacatatgttcatgatgataaggatccttggttaagagctatttactgtggaggtcctgcaggatgcatttggacataatatatgatatgcagagttacaagataaatcttatatatgtttgtatgaataataaagtttccatgaatcctcacaacttttttgcaataagtttgatgtttatgcctaattgtaaaaatgtcacaatctaatcatcaatttacaatcctttctaatacagacataatgataaccaaaaatgtgggttctactgttactgcatttgtctgaaacatttctaaagcctcttttaatcatgtcttaaatatatatatccctatccatagcatagcttgcccctactcataacctctaaactctttagacaactaaatatataatataatgtctgaacttcattcttctctgcagcttcctgtgttagacttaacacaaccaattgagtcctctatactgtcttctctctctgaggcttgtaaagagtggggattcttctatgtcaccaatcatggaatctctaaagagatgttcagcaaaatttgttccttgtccagagatgttttcaaagctcctcttgaatcaaagctcaagcttggtcccatttcatatactcctcggtacatcgcctctccttatttcgaaagccttgttgtctctggacctgatttctctgattctgccaaagcttcagcagatgttttgttccaagatcatcataaaccagagttaaggttgtcattacaacacaaatcagtgtttctttttacatattgtgtgtttcacatctttttattggcttgaaccttttacctctcctctttttttgttcagagaaacaatgcaagaatacggagctaaaatggcagaattgtccaaaagactcataaagattctcttgatgatgactttaggagatgaaaccggaaagagactctaccaaactgactttagcaactgtcatggatacttaaggctagtgaactacacacctccacacgacgtggagaagcaagaagagctcgttgaaggtctcgggatgcacactgatatgagctgcataacaatagtctatcaagattccgttggtgggcttcagatgaggtctaaagaagggaaatggatcgatataaacccgtgcaacgatttccttgttgttaatattggagaccttatgcaagcatggagtaatggacggctgagatcatctgaacatcgagttgtattgagaaagttggtgaacagagtctctctggcgttttttctctgttttgaggatgagaaagtgatacttgcacctcaagaaattgtgg

SEQ ID NO: 179452 - DNA, 255 bp, Arabidopsis thaliana landsberg
  unsure (1)..(255): unsure at all n locations
gtatcaaatacctgaggaatggccatataatgaagctcgaaaacttttcaaagaacctgacgtaataacagatgaagagcagcttgatattaagtggacctctccagatgaagaggtagaaacctagttctcccctattctgctccacgcatattttggattcttcgggaattnttcttaggtacctccttttgtcttccttgccagggtatagttcaagttttggtgaatgaaaatggattcaacatagacagg

SEQ ID NO: 179453 - DNA, 287 bp, Arabidopsis thaliana landsberg
aggaaaccctcaaaggattgacacggcctcgtcaactaagcggattatatatgcctatgaacaggtatgttaagaatcagtgagatgctgttgctgaaattttggaggactaatctccgaaatgtgtttatttctgaactgactgactattactctggttttacagtgtctgatgtgtttatatcactatcccgatgtatggtatgactatgctgagtggcacgtaaaatctggttccacggatgctgcaatcaaagtatttcagcgagctcttaaagccattcctg

SEQ ID NO: 179454 - DNA, 669 bp, Arabidopsis thaliana landsberg
atggcgccgagaggcaatgagtatgcaacacagagttttccgggcgggaatcagaacttggatgttgtgagaacaattcccaactcaaagtatcttaaggcggctcaacagcttctagatgaggctgttaatgtaaagaaagctctaaagcagtttcaggcagagggagataaaaacaatgagaaccctcaagaaccgaatcagagcactcaagactcgagcacgaatcctcctgcggacatctctcagtcggagagacaagaaatgcagagcaagttgacaaaactcttgtcaatgttggatgaggtaataacttgagacctaatcttcttaatttgatcatgtgatggttaccttttataggccttttgttataatattttaaatgcaaaaaagcatacatttaaataaattgcagccataatgttgttacatttggtatatataggatatgttgaatatttaagaaaatgagatatttcttgattttggtaaaggtggatagaagatataagcaatattaccagcagatgcagatagttgtatcctcgttcgatgtgatagctggttatggagcagctaagccatacacagcactcgcccttcaaacaatttctcgcccctttcgtagcctaagggatgcgaaatccggaaaaatcctcgtgctac

SEQ ID NO: 179455 - DNA, 2828 bp, Arabidopsis thaliana landsberg
gttgatgtgtttatagacagtgcttttggagctgttctcaatgttgtgatatctttgaaagcgaagttgctgtatagacaaactgactccccaaaaaagttaggcgcaagttctgtagaggaggttaacttccactgccaacaagctgaagctgctttgcagttccttcattctctatgccaacacaaaccctttagagaacgtgtcgctaaaaacaaggtttctctattgcttggtgtttgtacattaatcacgagttgttaataattcgttttgcttaattcatgattttatggaggacgactctcagaattatgttttctggtattttctctcaggagctatgtggaaaaggtggcgttcttaggctagctcaatccatactatcactagctattacacctgaatttgttggtgcaaccgtaactatagcttccacatctagaatgaaagcaaaagttctttcaattgtaagtctattgaaatttagcaaaaattttctctacttactatctgcaactcataccaaagttcatgtgcctgcagttgcagcatctgtttgaagcggaaagtgtctcattccttgacgaggttgcaaatgcaggaaacttgcatttagccaaaactgttgcctcagaggttagttctaattagggtctctgctctaaaatcgataggactttttccttcttgattcgaaaggtttaccactgagtgacgcttctatttataaagattccatacaaattgacaatcttatttgttttgatacgttgtaactagtcatagaacaaacctcactgcaaaaagctcgtgttggctaagtgataatcagctctgctctagagtctaaacctacagtttcctaaatggcatatgttgttaaattgacattttgtacttttctgttcctcatttctctccaggatagtttatccatgtgaagttagtgttgacctattcagtgatgatatatctgtaatataggttcttaaattattgaggcttggcctttctaaagcttccatggctactgcttctcctgactacccaatgggttttgtgctacttaacgctatgcgcttggctgacgtgctcactgatgactcaaattttcgatcttttttcactgaacattttgtaagtatcaaattattcctgcctctgccaaagtctcttgttttatttattgttttggcacatatgattcatacaatttatgagctgtcgtcggtatggttataaattaattgcgttactgaaattctgtaatttgttgtgtgacggatgtttaatttttctccagagcatggttctcagcgcggtatggtgtctctctcatggagatttcttgtcaatgttgtgctcttctgatctttcttcaagggaggatgatgcgaatgttgattacgatctgtttaagtcagccggatggattctaagtgtattttcaccttctgggcaatcagtcacacctcaattcaagctcagtttacaaaataaccttaccatgtcttcatatgcacatcaacgaacatccttatttattaaaatgattgcgaatcttcactgtttcgttcccaacgtctgccaaggtgacttttttgcctgccactatcttctgcattttcctgtatcatattggtagtttgccttcgtttgttagttactaagtgtattcgctgttaatatctgcagaacaggataggaaccgtttcattcagaatgttatgagtggattgcgaaaagatccttcaagcatattgattaagatgttaccaggctcttcatatactcctgtggcacagagaggcactggtgtttgcagaaacctaggtatgtatctctatcccgagacacatatattatttcttatatacacatgttttgctgatttcgttttaatggatatttgtatatgtaggttctctgttgcgccatgcagaatccttgatccctagttccctcaatgaggaagattttctgcttttgaggtaacataaagcctcttcagttattctacttttcacctatgactacattaaagttttgtagttctcgagctgtactattttatgtagccgttgatattacttttttccggtatattgtcttctgcagggtgttttgtgaccagttacagccgttaatccattccgagtttgaggaaagtcaagtacagatgaaggtgaaaaagctttttgctctcttatacattggttttacaattctctggcttatctgtttagttacactgatacaagtaggtgtaacaaggttttactcatgtccatcgtatgttgattttctacaaaagacagatcttttgctaagcttcaaatgttatgttgtactaggatattgaaggtaggggcgggaatttatctggtaagctaaaagagcttctgaaccttaacaatgaggaagcttcagaggattgtgatgtccgagttgaaggtgtgatgacaaagcaaggcgtgaacgaggagatagacacagttgaacggttgaaagagagcgatgcagatgctagcaatcttgaaaccagtggttcagatacaagctctaacagagggaagggtctggttgaagagggagagttggttcagaatatgagcaagcgatttaaaggcagtgcatcaggagaggtgaaggaggatgagaaatctgaaaccttccttgtctttgagaagcagaagaagaaacggaagcgtagtattatgaatgctgatcaaatggggatgattgagaaggcgcttgctgaagaacctgatttgcagcggaattcagcttcgagacagttatgggctgataaaataagtcaaaag

SEQ ID NO: 179456 - DNA, 156 bp, Arabidopsis thaliana landsberg
atgaacatgtaagaggatgataagctctggctctcttataaaaatagtttatacgtgatccctttagaaaatgatgataatcacaatattaccagtgacataaaaggaatatatcggacttcagctgcacgcatgcaacaaaagaataacatatga

SEQ ID NO: 179457 - DNA, 1036 bp, Arabidopsis thaliana landsberg
atccacgcattcttgaagggggtggggtacataaatcaacagaagttagtctcactgataaagaaagagaaatagcgcaccgatatgttctaatgaacacagcagtcatgaatccttatgttgagtaagttctcttgtctatcaaactttctaaaactttgagatctatatataagacgttttcttttattgtgtgaacaacattagtcatgttctaaatattgaattttaccacagtatgcatttggaagagttgcagaacactgatatccgatgcagaaaaaatgaaactcagttatggaagattcatggtgaaaaattttcacagtggataaaggaaaaggtatggtcacggtcttggattattatcttcttttcttgtcattgaattttgctaattatcttcttttcttgtcattagatccccacaaactcagctgatcattccactaagctgaggtggttagcatttggaccaaggaatatagtgcagagctataaggggtacatcattaatgggcatcggtttcaaatagatgatgttaagaggaagactcaaaacagtggtgtcacatacgaagctttcagcatgtgcagatcgagcgcaagagatatgaatcaaatagcagatatagttttgtactatggagtgatacaagagattatattgctagactaccacatgttccaggttcccttattcaagtgcaaatgggcaaacaaagggaatggtgttaaggaagaagacggttttacgcttgtgaacctgcatgttaaccaatcagcttatcttcatgatccatatattctgccatcccaagcgaaacaagtgttctactccagagaagaagactcctcgccttggtatgtcgttatgagagcgccaccaagaggctatcacgaattagagacagaagcagagtttattgctgcaccatcaaacatccaagagattgatgatctagagaatcaatcttcagacgatgagagtttctatgttagggatgactgtgaaggagtcttagtgatggattaa

SEQ ID NO: 179458 - DNA, 1208 bp, Arabidopsis thaliana landsberg
atgtcatttctcctcctaacaccgccgccgtgtcttctcattcctccgccgccgctatctcatcgccggagctcatctctctttctcaaacatccatttcaaccatctccgagacctttgagcttctgtaaaccctccgctctccgtctccgagccaatacaacagtcaattcactaaaagccctcgaaactattaaaccctatcttcaatcggaatctaaaaccgtcctacttggctggctctgcagctgtgtctctgttgtctcgctttctcagattgttcctaggctcggctccttcacttccaaccttaacgcaaacgccgcgagcttgacgaagctcaaaggcgaatgtctcgttttggcgggtctggttttggctaaggttgttgcttattatctgcagcaagcgtttctttgggaagctgctttgaatactgtttacaagattcgggttttcgcgtataggagggttttagagagagaactagagttctttgaaggtggcaatgggatttcatcaggagacattgcttacaggatcactgctgaagcttctgaagttgctgacactatctatgctcttctcaacgtgagtgttttgcttgttatgaatgttttgcgaagagaaagtttccttcttttcagaattttttgatacattgtggtgattttggctaacaactataagctctacacttcatttatatggcagacagttgtgcccagtgctattcagatatctgtaatgacggcacatatgattgttgcaagtcctgccttgacactagtctctgcaatggtaagtgaatcaattgtctctgtttgtgtctcttttgctctagagttttcttattagtttgggtattgttctaggtgataccatctgttgcgcttcttatagcatatcttggtgaccggcttcgtaagatatctagaaaagcacagattgcctctgctcaactttctacctacttgaatgaggtattagtcttttctacaattggtgtttttcttcttcttgttaatttacgggaaaattactaaagcagagctttttatgtttaggttcttcctgcaattttgtttgtcaaggctaataacgcagagatctctgagagtgtgaggtttcagaggtttgctcgtgctgacctagatgaacggtttaagaagaagaaaatgaagtcacttatccctcagattgttcaa

SEQ ID NO: 179459 - DNA, 150 bp, Arabidopsis thaliana landsberg
gttttcgtcggatcaacatcgtaagaagagcattcagatcatgggccctacgtaaggatgccgccaacttcttgttgggcggaaaagaaccaacgtcgtcatcacagcggccacttctgggtatgatggactacggctcactatcaaaag

SEQ ID NO: 179460 - DNA, 711 bp, Arabidopsis thaliana landsberg
atggttcgggttctgctcttccgaccacagtccattatcttgcctttgaagagtgacaaagtaaagccggtgaaagaacagctttccaatgttcatcctgaggttctgttgtttttgtcaaagatcaaacgtctctctatcagagaacattgcctagatcctaagctcagtactgtgaactcaatagggattgttagtgagactaactttgtgacgaggaggagcattgatgcggagtcatacacgatacatctctcagcttctgagaaagggaaaaactctgaacaagaatgctcctactatatgtggaggcaaaagtttccagtgaaacatgagaaccgtgtggacaggagaagcgaagttgaggagtgggtgatcactttagcgtttccattcgaagagcgtcttggccatggaaataactctcctggtatctatgcgtttcttcccacagaaatggtaacaaactttcccttcatcattcaagccgatttcattctagcatcgtctagagaaatgatccttttagatgatatatggaaccaagggattctcaactgtgtacctctagcatttttgaatgcattcacgtctttggtcaaaacgactgatgctccagtgtctagtttgctgcctgcttttaggttcttgccctgtaaagaatctaactatgcaaagctgaatgtggtccgagaatctatcagggcaagg

SEQ ID NO: 179461 - DNA, 119 bp, Arabidopsis thaliana landsberg
attttgaaatgaaaattccaaaaggacaacttaaggtttcggccgattatttccgcaacctagaaaccatcgtagataacaacaaacagtttccaaatttcaaccaatccaagccttaa

SEQ ID NO: 179462 - DNA, 268 bp, Arabidopsis thaliana landsberg
cggattttggtcaacagtaaaggcatttctttcccagattccttttgtcggatggataatacagtatcctctcatggtaagtaatccacaacaacacttgcctttttctctaatgctcctttcttatgctttttgtacattcagagcttcctgtcagggccttgttcttgaacaacattccgtgctcctgcctcaatttattcagttccttgttgtttctttagttagcctttctcggaaatggatagagccaatggacgtttcctga

SEQ ID NO: 179463 - DNA, 415 bp, Arabidopsis thaliana landsberg
atggctttgcgcattcagtgtgtggaggagaggatgcgaggactactgtttaatataatacgaatatcaaagcaggtcagtctactttctcttctcatgcctccttagatcttgctgtatctaaatctttctgaagttacaagagcttttgcagcggactggtgcagagaagtgtagaaatcgggcttttatcacatctgatatccggaaagaaattaatgaaatgaatcagaaggtgaaagaggaatgggaaaagaaacatgctggagaagaaaaggtaatggtttgtcctgagcttaatatctatttgtcttatttatcagaagtaatgtctcgtttttttaaaatatattctttgatgtagaacaacgaaaacgataccgaaaaagaagaccaacgttcaaaacaagtgaag

SEQ ID NO: 179464 - DNA, 1362 bp, Arabidopsis thaliana landsberg
  unsure (1)..(1362): unsure at all n locations
atggcaagatcttcgtcatggcaccgaatgtcaaatttcatgagaaagtatcgaaaaattcctcattcgtctttcaaaaccaaatggaacgagaatctcaagcagaagtacgccatggaagagctaagaagcaaccttctcgcagattcagagaatgcttctgttatgcgaaccctcttaagctcattccaactccataactgtgagcccactcctcaagcttacagattcgttatcaaaaccctagctaaatcctctcagcttgagaatatttcatctgttctttaccaccttgaagtctctgagaagttcgatacacctgaatccattttcagagatgtcatcgctgcttatggcttctccggtagaatcgaagaggcgattgaggttttcttcaaaatccctaatttcaggtgcgtgccttctgcttacacgctcaatgctttgctcttagttcttgtgagaaaaagacagagtcttgaattggttcctgagattttggtgaaagcttgtagaatgggtgttaggttagaggaatctactttcgggatattgatcgatgcgctttgtagaataggtgaggtagattgtgctactgagttagtgagatacatgagtcaggatagtgttattgttgatccaagattatactctcggttactgagttctgtatgtaaacacaaggattcgtcatgtttcgatgtaattggatatttggaannnnnnnnnnnnnnnnnnnnnnnnnnnnnnnnnngggattatacagttgtgatgaggttcttggtggaaggaggaagggggaaagaagttgtaagtgtactgaatcagatgagatgtgacagagtagagcctgatcttgtttgttatacaatcatgttgcaaggcgttattgcggatgaggatgacccgaaagcagacaagttgtttgatgagttgctcttgttaggtttggctcctgatgtttatacctataatgtgtatatcaatgggttatgcaagcagaacgatattgaaggcgccttaaagatgatgtcttcaatgaacaagctaggttctgagcctaatgtagttacatacaatatattgatcaaggcattggtaaaagctggagatctgagtcgagctaagactctatggaaagagatggagacgaatggagttaaccggaacagccacacatttgatattatgattagtgcatatattgaggtagacgaggttgtttgtgctcatggtttattggaagaagcatttaacatgaacgtgttcgttaagagttcgagaattgaggaagtcattagcagattatgtgagaaaggtttgatggatcaagcagtcgaacttttagcacacctggtttaa

SEQ ID NO: 179465 - DNA, 648 bp, Arabidopsis thaliana landsberg
gggtctagtttgggacagtttttcagtcagtatctggaacctataaagctaaacgatgtgaaggtaagcgtaagtgtgttttttacccccttttgttgcatcactagttttcactggtttcctatttcattcataaaggttgactggaaagcaaaggacctgggatacctgacagaggtaacatttacagaactccggccttttttttttataccattttgcatgttttgagtggagaaatgtagtttttaacctgttctctcatgtctatcaaagggaaactataccaagtacttttctggcttagtgagacaagcacgaccaattcaaggttctgaccttgtcttaaaggctcaaaacataaaggatgatgttcgtatccggtataaagaccaagtagagtttgaacgcattgcaggggaatttggtatatttgaagaatggaaggtaaatttgagatgattgaactataatcttcaataattgtaggtccaaatgggtcactttttttgtacccctttgattgtgtaggatggtgtgcctcgaacagcatataaaggagtagtggtgtttcgaatccagacaacaagacgtgtattcctggttgggccagattctgtaatgcagcttggaattcgaaattcctga

SEQ ID NO: 179466 - DNA, 1216 bp, Arabidopsis thaliana landsberg
gaactgtttagatgcctggccatctgtcacactgtccttcctgaaggtgatgagtcccctgagaagattgtttatcaagctgcatctccagatgaagctgccttagttactgctgccaagaattttggattcttcttttataggtaattctcattacattttaaattccaaagatttgaaattgctggcattaaatctgacaagataaatttacaatttgttgacttgtcccatgattccttgttctaatttatagattgttttcataagtgcttttgtttctcaagtctctggtagtttgtttgagactactttcatgtattttcaggcgtactccaactatggtgtatgttcgcgagtctcatgtggagaagatgggaaagattcaagacgtggcctatgagatcctaaacgttctcgagttcaacaggtctatatgacagtgaattgtttgtttattttcttttcgtcatgatttaagcatactaattatatcttacacaatgcacaacagtactaggaagcgccagtctgttgtatgtcgtttcccagatggaaggcttgtactctactgtaaggtaatagttctttacatacttggttctctgtgtacttctggatcagtttttgatcattgcttggaacattgtccacagggcgctgataatgttatctttgagagattggctaatggtatggacgatgttaggaaagtaacaagagaacatttggaacattttgggtcttctggattgcgtaccctttgcctagcctataaagatttaaatcctgaaacctatgatagttggaatgaaaagttcatccaagccaaatctgcattacgagaccgtgagaagaagttagatgaggtatactactatttcttacccatatgtattctcttgtttgtaaacaggagtgaaaatgattttatgattatgtccttaagtaatgtgaatgattgtatcaatgaatacatttttttgagtcgcccaggaaataacttataatttttgatgaatgtgtcgtgtcttgatctatgaaggtggcagaactcatcgagaaggatcttatcctcatcggatcaactgcgatagaagacaaacttcaggaaggggtgcctacctgcatagaaacattatcaagagctggaattaagatctgggtgttaacaggggacaaaatggaaacggctattaatattgcatatggtatg

SEQ ID NO: 179467 - DNA, 483 bp, Arabidopsis thaliana landsberg
atggagaggtctctttcccttttgttgccgttaatcggaactttggcaatcattcatattgttcaagctcagagccaacaaggtattcacattttaatttagatatatacatatttgtgtatgcttcttcttctccatcttactaccatttttgttcttgatcgtagtgttaatttttatccatttctgttctacaggattcatcagtttggattgcgggctccccgccaatgaactgtctccttataaagaatcaaatactgaaatagagtactcttcagacgcaacattcatccagagtggaaaaactggtaaagtccaggcaaatatggaggctagatttctgaagccatactcaacgctgagatattttccagaaggaatacggaactgctacaatctaaacgtagagaagggaataaatcatctgatcagagcttggtttatctatggaaattatgatggccaagacaaagacccgag

SEQ ID NO: 179468 - DNA, 256 bp, Arabidopsis thaliana landsberg
atggaggaggagaaagggattgagcccaatgttgttacttacaactctctcatcaaacctctatgcaaggctagaaaaaccgaacaggctaaacaggttttcgatgagatgctggagaaaggactcttcccaacaatccgtacatatcatgcgtttatgcggattctaagaacaggagaggaggtttttgagctattagctaaaatgagaaagatgggctgtgaaccaactgtggagacatacataatgctgatcc

SEQ ID NO: 179469 - DNA, 919 bp, Arabidopsis thaliana landsberg
atgaatgtttcaattgcgtttaactctatgtttaacgctgaagactcccggaggtatattggtggttccaatacattgttggaaattacacaggtgtgtttatgtcttaattatctccttttgttcctgtggttctcttattactatcatagcatcttaggtattttttctatcttgttgagaattttgttgcaagtcatgttcgctttctagtttctccttagtgtttgtaagttcctttagcagaatcactttctctggatttattttgtgcaagactagacctctgaagtttttctcattctgctccgaggatacagaaaaccagtttgctcctaaacaatctgctagatgtggctgaggaatttcatttagctcaaatgaatataccaaatttggtccaaggaaactttgattctccatcaggtgatctattttcctcctctcacttctctttgggtcaaactagtctaacagtagtggccaataaatgtgcaatttagaaatcctttaatgactagttctgtctgagataggaacactagtgtcttgttgattgcagcggagcagctacatttgcagattagctttcttgattgcacaaacttgagaaaactaagcgtgattctcgatgtgacatgtttgatccagtaagtatctaagcagctcagtaactaatcaagttcttataactttccaataatgaaactgtgttctctattgtaacagtgggaaatatcctagtgatgtagttccttgcgagttccgtaaagtttcaggcacaaaaagagacggtgttgtgtcgaaacaactgaagaaggagatagaatctacaattgatgatgttggagtgggatatcctcggatattgagactctgtcgttgcatttccaaagcgttgcaatcagaaaagagatga

SEQ ID NO: 179470 - DNA, 170 bp, Arabidopsis thaliana landsberg
gggcgatattctagtcgagctaaagagaaaatataatgataccaacaaatcatctaaaaaccttcttggagggagtgagtggtattgccaacaggcgtatcgtgctttaaatcaagcagcaggacgatgtatccgtcataggtttgattatggtgccatcatattcttag

SEQ ID NO: 179471 - DNA, 758 bp, Arabidopsis thaliana landsberg
atggagaagataggggtgatcgacacatggattgataagcaccgttcgatctatacggcggctacacgtcatgcttttgtcgtctcgatccgtgacggatccgttgatctctcgtccttcagaacttggctggtactgtaattagtaattactgatgaaaccaaggcaaaatatgaaatctcactcgatgacttttaaacgacgttgtttccttgtaggggcaagattatctgttcgtgaggaggtttgtgccgtttgtagcgagtgtgttgatcagagcttgcaaagattccggcgagagttccgatatggaagtggtgcttggtggtatagcatcgttgaatgatgaaatagaatggtttaaaagagaaggatcgaaatgggatgttgatttctcgaccgttgtgcctcaaagagctaatcaagaatatggcaggttattgatttcatatatgctgattgaatagatttctcacactcgaaaatgatattaggaaccagcaaataaaccggagtttctggttaattcaggtttttggaagatctgatgagcagtgaggtgaagtatccggtgattatgacagctttctgggcaattgaagcagtgtatcaagagagctttgctcattgtttagaagacgggaacaaaactccggtggagcttaccggtgcttgtcatcgttgggggaatgacgggtttaaacagtattgttcgtctgtcaagaacattgccgaacgttgtctggagaatgcctccg

SEQ ID NO: 179472 - DNA, 423 bp, Arabidopsis thaliana landsberg
atctctgatcagctaaagagccgtttcaattctgggctttctctgcctcaactctcagaaaattttgtgaaagcggcatatgatcctcgtattgctggagtctaccttcacattgatcctttgagttgtgggtggggaaaggttgaagaaattagaaggcatatcttgaattttaagaaatcaggttactcctgaatctacattatctattgaatatcagagtttataattttccaattgtgttcatacatgcttcctgtgacctaatcatacacatcttgttaggtaaattcattgttggatatatcagcatttgtgggctaaaggagtactatcttggatgtgcatgcaacgagctctttgccccacctagtgcctattcctttctgtatggtttgactgttcaagcatcttttcttggcg

SEQ ID NO: 179473 - DNA, 311 bp, Arabidopsis thaliana landsberg
atgaatggatctggagagctgcgaaggtagtgatttgtggctcatgaactcccagtgcttgtccctgggtgaaactggtggaggaggaggaggcattgatgtttgttgtcgcaccattcgctcttgtctcatttcctcccgcatctcttgcctctcctagcgcatctcttgacgttcctgtcgcatctgagcttgcatatccgtcatattatttgtcatttgttgcagcatctgcatctaggctgcaaccactggatcagtcccagtcggtggaggatttggacgatccatctctgcttgatattgtctag

SEQ ID NO: 179474 - DNA, 385 bp, Arabidopsis thaliana landsberg
cgtgacgaaaaactactttgagaatttggtgaaagctctggagaacggtcttgctgatgtagactcacatgcggcttgcagcagcaaatcaacaagctctaaatcaacaggttgcagtagcaaaacaagaggtaaaggcaaaggaagttccagaactggtggatccagcagaaacccagatgacaacttataataatgtttctcatgtcctcgccaaggtacaaaacccgaattgatcgtatgcaattgtacaatgcacacgctcgaggaaaagcccaaactgcatgcacatagtggaattctaattcttctgtcatgcgtgtatgcgatttggatcatcggatttgtgacaagtttcctacttatgtatagtgtaaaagaatat

SEQ ID NO: 179475 - DNA, 138 bp, Arabidopsis thaliana landsberg
atgaccgacacaaactgtgtgcctgacatgaatttgcacaagaacaatcatgtcctatacgtgaaaatcttaagcatctgggatcatcagtctatgatctgtggaactcctgctaccatgatcctctgtgatgtgaag

SEQ ID NO: 179476 - DNA, 491 bp, Arabidopsis thaliana landsberg
atgactaacaacaacaacaacaacaacaacaacaacaaaaaccctcttagtgaaggtgtcttaattagtcctaaagtcgtcaacaaagccaacattattgtcaccaccgccgtgacgacggacacgactaatctccgtcgttgttatcaagattctggatttctcgaacattgttttctctgtagacgaaaacttcttccagcgaaagatatctacatgtataagtaagtcatcatctataaatggctaaatccatatatattcttttgtttgtttcctgagatctttgatatttttgttttagaggtgatagagcgttttgtagcgtggagtgtagatcgaagcagatgattatggacgaagaagaaagcttgagaagagagtattgttctttaatggatgttaagaagaagaaatttgattctccggcgactgcgccgtcgcgttaccgtcgagatccgagaaaccaagcaggcggtttcgcttactga

SEQ ID NO: 179477 - DNA, 789 bp, Arabidopsis thaliana landsberg
agctctcgatcgcgcgcaccgatatcgtcatcttctattcggcgtgtccgagtgtcgatgtttggctggttgtcacggttcggcgcattttcacgggtgtgctcgtcgatagacccaacgatgatggaagcatgcctgttgcgtcggttcgccggtctttctttgattggagttcgctggggcggtactgtttcggcatcgctaagttgtcgaccggcgcgagctgcagaggactagagttgctagatctgattctgcgaggccttttgggcagcgacaatcgcgttgatgcgttcggcagttcttgcgtcctgtaagtcgagtcggtcgaggtaagatcggatgacttcgtcgagattggtttttcgtggagttgtttctccgggttcagcaggagctgtgacaagagttacgtcggaagctgcgataggagttgcggctggaactgcgacaggagctgcggctggaggtggtgtcgttggccgagctggtggtggcatcgttggtcgagctggtggtgcggcacgaggcgcgctggttctgactccttaatattagaagaaaactctgcctagccccacagtgggcgccaattgtttgtaccgaggttgtaacaataaataactaaggggtttggggagaacggagtaacttctttattaatgacgaacggaaagacagtaattaacagaacggaaaatcgtaagtacagaacggagaaccgaaagtacaggtcggaaaatcgatattaatggtcggaaaaccagaaaatacataacggaaaactag

SEQ ID NO: 179478 - DNA, 826 bp, Arabidopsis thaliana landsberg
atgaagagacttcagttagatgtggataaacagcttgacttgcttgatgatgaggttcaaaaagtggatacctctaatagtagtttagccagtaaagacttgacagatatcactgtgaaggttttgaatttgataagaaaggtccctttgtcgtctgagaggcagaaacagaagaaagcctcacctgatgatcaggacggcgacaagactaaaaaacgcattgtttgcttgcctggcatccacgcaaatgaagacgacctcaaacgactcgaggttttcagagatgtaaaacgaaaatttgagggtcttagagatgatgaacagaggatctgcctgctgagctttgctgtgttcccggagaataaagaggtgaatcgaacgatgcttatgtattggtggatgggtgaaggcattctgagttctcaacacataccatccggaaagggcattcgcaaacccgaagatgttgtgaaggagattcttgatgatttcacggagaaaaacttgattgaacctgttgaaaacaaacgcaaagtggagccaagtggctataagatgaccccttttgtgaatgcttcagtggttcttatctccaagaaggtagggctttttgatatgtatgatgaaaaggagaagccacccatgaaccaatctggactgcacaaggtctgccttgtgaaagggtcatcactccaagacgaagcaaaaagtagaagaaaaatgaatgcagaaaacatcgaaacagtgttcaatgtttccgagatgtttccagaattcacaagcaagtggttcacacgtatgaagaagctcaaagttctttatctag

SEQ ID NO: 179479 - DNA, 925 bp, Arabidopsis thaliana landsberg
atgaagttcttggagttgcttgcgtttggacaccctttttcagaattgacaaccattcgagaagcagatatggtcttctaccgtcagaaatactcggttgacatctacgagcacggcaagcgggaggtcggtagtgtgcaattgctttaatcgtccaagaacaatattttgactctttgcaactaattattatgaacaaacctatcttacatatatgattgcaactacatttaatttggagattgtctgaagttaatttagtttcctcgatcatattgtcgtacacatcgttcacttctaattacataatgtaaatgtgtacgtacatatctatatgtctcgtacactgcatattaactttataacataactcaagcgataaattgatttgacagccaacgcttaccaacacaagtatgacattcatttcaaccgtaattgccccaaccaaattcacagtagtggttattaaagtgaagaaattactgacgatctctgactatctcatttcaaacatggttaacccgactcttcccgacgatttactctcgaagatagctaagaacctggctgaccaatgctggtccgaccttggtccactggtacgatcaggcactcgtggaagagacattgtctaccgtccggatgtcctcaaagatgccaatattctcaccttgtgtaactcgcccgatgacttccaagctggagggggccacaatccctccggatccgctgatgaaggccgacatcgaccatttttcttaaggtgttttgcagctaataatcccacggccgtatattacgaaggtgttcatgttctaatgcatgaacgaaacatcaatggagccatcaggctcttacagcgtcatgctccagtacgagcaaatgcaacacttgcatgcgccattgtattcatatgtgctgg

SEQ ID NO: 179480 - DNA, 133 bp, Arabidopsis thaliana landsberg
atgggtcgcgttagctttggttgggtcgggttagtgatagtggaccaatttggcgtctcagttctcaacaacttgatctttgtcactgagaacatcatcaaccaaattcacaacgcgacggtgaccggtatag

SEQ ID NO: 179481 - DNA, 330 bp, Arabidopsis thaliana landsberg
atggacattcccatcgtcgtgaatcctaaagaggtatcttaatttgtcttctaggggtgtttgcgagttacatagtatggtggtgtctaggcaagtggtcctccataccgcttccgcatgcggacaggaaaaaaagatgtgattccctgtttcagcttctgtgcaacagtgtgcacggtatggattgatgatgatgttccgtcgccttaggttatcggcaaccccgagagcacgcgacgtgtcctccacaagaaatgcttcaatttggggacaatgtttagttccataaacggtcggcaatatcagggtgtgaagatagcggcggagtga

SEQ ID NO: 179482 - DNA, 3124 bp, Arabidopsis thaliana landsberg
atggcgtcatcttacgtcacctactcaacggtcactccggtggtcagcagcagtaacattcgaggagtctttcgtttggcattcacgcgccgccgtgttactctatcgccgaatgctcggaggagaatattgagagtttcggcgaaagcgtcgacgaagaatgctatggagtataggaaattaggagattccgatctcaacatcagcgaagttactatgggcactgtaagaacaatatctctttatctcctgcaattgtagtccattgttcaattttgaagttttgatgaaatttggaatttcagatgacatttggggagcaaaatactgagaaagaatctcatgagatgctgagttatgcaattgaagagggcatcaattgcattgacactgctgaagctgtgagtttttatcttcattgttcatctttctcttcttgcctggtgaatttgattgcaagtgtttatgtgaatgttttatactttatgtataattctggtgaatttagcactgttgtgtttagctttctggaatctgcttagtctgtggtaaattttcaagtatcattgtttatttccagtatcccataccgatgaagaaggagacgcaaggtaaaacggatctttatatcagtagctggttgaagtctcagcaacgtgacaaggtatcaaccatttatcatactttggatgcatattggtcacgaatgtatatgatatcagcaaaacctaatcgaagttataaaaattgatattgatgttcattgtttctgtatacagatagttttggcaactaaagtatgtgggtactcagaaaggtcagcttacataagggacagtggtgagattctgcgtgtagatgctgctaatatcaaagaaagtgttgagaaaagtcttaagcgccttggaactgattacattgacttgcttcaaatacactggtaacatcgccttatttttgctttatgtcttaactcatattctacattgtttgagcaagtgtctttctatttcatgcgcaaaatatttcgtttttcatcatcaaatgtcagaaaatcatgacactgatctttttttcagtccaggccagatcgatacgtaccactcttcggtgatttttactatgaaacgtcgaaatggagacctagtgtgccattcgctgagcaactaagagcctttcaggatctcatagttgaaggaaaggtagtgctactccttaaaaatcagatgttatattgagttatataacctcaaacacagagttttgaagtgttcctcgaattctgcaacaggttcgctatatcggtgtctcgaatgaaacttcatacggagtgacggagtttgttaacacagcaaaactcgaaggactaccaaagattgtgagcatccagaatggttacagcttgctagttagatgtcggtatgaaggtaaatctttctagaataccttgagagcaagtgtgtcggaggagcatgttctaaactcttttgttttgggttaaaaccacagttgatctggtagaagtatgccacccaaaaaattgcaatgttggcttgcttgcttattcccctcttggaggcggctcgttgtctgggaaatacttggctacagaccaagaagctacaaaaaatgcaaggctgaatcttttcccaggatatatggaacgttacaagggatcactagccaaggtttcttcttgatccaactatgcttacttctttttatgtcgtaaaacaatttaagaaaccgtattagctcgaatttagttgtaaagcctattcgtaaaagtgttttgaggtcaattttatctttgttctgatttcaggaagcaaccatacaatacgttgaggtggcgaagaagtacggtttaactccggttgagttagcactcgggtttgtacgtgacaggccctttgtgacgagcacgatcatcggggccacatcggtaaaacaacttaaagaagacattgatgcttttctgatgacggagcggccgttttcgcaggaagttatggcagacattgacgccgttttcaaaaggttcaaagacccttctttcgtttgaaagaaaataaggtttctcatgagtttgtgacctcaccgtgaaagtacacagttatatgtagcttgaatttgtttcttacagttgcttatgatatgatagatattacagtactcatgtaatgtaccacagttgcaaaacgtttcaacgcttttattgatctataatggaccttaaatcaaatcaaatttatccattaagcctcatatcggacatgtcaacaaatttaaaagaattggtgggtttgggcctatctcgacagcccatcaagaatacaactttaagtagtttaagtgtaacacgtgttgcggtcttgcggacaaggtaactgtgagttagccgttgagatgtcagaacgggaacggtaacttagaaacggtaacttacttcaaaattcagaaactatccgttactactttttctcaacggtaaagaaagcttctctatatatatagtaatacacacagcccccgatatcgttaaaaacataatccaaaagatgtaaatggaaactttaaaaactctcgtctcttcttgtccctctctctttcttcatctccggatccggcggcaaaacgcagcaaatcataaggtgagagttacctttatacacgttttaattttaattaagagttttaaattcacgactgcgtccatatctttagataagtgtgctctatctagtttaatttccagtttcttgccgtattgtttgggtttttattcgctcggattacttctactggctcaattagtgctttgttttgacctatgttgattttgatttctatactattatattattgttgctatttctagcttagaacttctggattgcaatgctaaataatcacggcacaatgttttatactatgatcagtctcataattttgctttgattatataggcttgataatgttattaatcaaaatacttttttttcttccaaggaatactgttgaggaggcgataaaaaggaatctgttgaggtggagagagctttcaagccaacaacaatttccactacttagagcaacagtccaaaacatgatctgcaattga

SEQ ID NO: 179483 - DNA, 351 bp, Arabidopsis thaliana landsberg
atgttccatagcaaaggacggccacgatctcatatacgaacagcgagtaaagctctccggtcagactctagatctgaagtcaccgcagcgagatagaagacaaagaggaagacaacagagagacttagcttacgcttatacttcatcttcttcttcttcttcaaaaaccgtgtaaattcttcgtctccttggttccaaaaattcaataaatatatcgactttttcggatatgggtttttggaaaatttatttcggctacgcgtaaacgagtgtttgaacaaagagacttttgtgttttttggtttacaagagtttcagctctgtctttcttctctctctagagccggctaa

SEQ ID NO: 179484 - DNA, 99 bp, Arabidopsis thaliana landsberg
aggatcggagagatccccgagactgtggagatggagcgtggtgatctctacgttacaagattgtataaagagcaatcgaatctggccaaattgacttga

SEQ ID NO: 179485 - DNA, 257 bp, Arabidopsis thaliana landsberg
atgcagctgtacgaaaaagcgctagacctttgcgcagatgaccaatcaactgcagtaagtacttgcagtcattttgcacgccatgttcactactcaaagaagctagtgcctaacactttcttttctccttgtcctaggctgactcacataggcatctgctgagaacaacagaacctacaattgctgatacacttcttcatggcttgagacgtcaaaaattaagtggagattctaaggccatcttcatattgatttaa

SEQ ID NO: 179486 - DNA, 657 bp, Arabidopsis thaliana landsberg
atgattccacaaaaggctagtgaactgagtttactagaaggtgcaggaacgcttcttactacagtgaatgaaagaagtgacgggattttttatgcaaggaagattcaaggtacagacaagaaacaaattactggttcttctatgactgacatagtgttcatgaatggagttaggcttattgaatcttctgtccttagccgaattttggatcccggagaaatctttgggttagtgaactttaacggtggtgataaaatgttgatgaagtggtggcggtctcatgaaagcgagtttcaggaaagtataagtttggtcaaggaatttcaagtgccatccccggatcgactgtgtcattgtgttgaggttctgactttggagattaaggctggtattgacaagacattatgtcacaactctgtacttgcaaaccatgtttgggaacccggtggaatgtcagctgaacaagttcagctgtacttgttagtggaattctatggttatgatagaatgttgatgatgctgcaaaggtttcatgttatgggttttcagagaatcattactatgtccaaagtttttagttttgataaggttctttctctagaaatccaagctggtaatgatgtgatatatgcgctagactccgataactctaatcag

SEQ ID NO: 179487 - DNA, 325 bp, Arabidopsis thaliana landsberg
atgttgcaacagtcggtcagcgagaatcatattccagatatcctcttggagagactcgtatctaataacacagaattcccaccggcttgtgccatcattggagggattctaggacaggtacagttctctatctcgcttctctaggactttgttagttatctagattaagcacttagcagagtaatgtgactcaaaaaagttgtatttgtacgtacaggaggtgataaaagttatatcaggcaaaggagagccgttgaagaacttcttctactttgatgcagaggatgggaaaggtgtaatcgaggacctatcccacaagctttaa

SEQ ID NO: 179488 - DNA, 312 bp, Arabidopsis thaliana landsberg
caactatactctctgtttgatcctgtacacggtgctcagaaaatccagcagcagaacttaacttctcaagagattgatgtccttgaacaaaatttcctagcttacttgtttcaggttactctctttgattaggatattatctcctcccttatatttatctatgtcattgttcttgaaatgtgcctctttttccccccgcttataaaggttatggagaagagcaactttaaaataacaagtaatgaagagatggaagttgcacactctgggcagtatcttctcaatcttcccatcaaagttgatgagtctaag

SEQ ID NO: 179489 - DNA, 130 bp, Arabidopsis thaliana landsberg
gtccaaacttgcggaacaatgtccgtaccaatcggtaacagatttgatctacaactccggcgaaaaccatacgacctttcttctccgtcttagccgcgttgttgaagaagtagcttccgcttctctgtag

SEQ ID NO: 179490 - DNA, 597 bp, Arabidopsis thaliana landsberg
attgctcaacaaacggcgcagaaggtttacatccagaattctgggaagattgaacgatgcacagtggctaattgtggtgatcctcaggtgatctaccatggagacaatccaaaggagagaagagaaatatccaacgatgaaaagaaagcctcaccagctctccacgcatcaggagttgatttccctgcactgtgggaattccaagataaacttgacgtcaggtacttgtatagcaacagcattcacgatatgctcaacatttttggagttgaagcagctagagaaacaataatcagggaaataaaccacgtcttcaaatcatatggcatttctgtaagcatcagacacttgaacctcattgcagattatatgaccttttccggtggataccgaccaatgagccgtatgggaggaattgcagaatcaacttcaccattctgcagaatgacttttgaaacagccactaagttcattgtccaagcagctacttatggagaaaaggacacattagaaaccccctctgctagaatctgtcttggcttgcctgcgctttcaggaactggatgcttcgatttgatgcagagagtggagctctga

SEQ ID NO: 179491 - DNA, 650 bp, Arabidopsis thaliana landsberg
atgaggcaggtaagaagaagacagcacaagtaagcgatttcaacacatgactgcaacagagtttgttgactttctaatcttaacaggctcttgcgaaagatgttccttggaaactcaaagatgcaagagttgcagagattctccaagcggtaggtaaacttagagtattaggactaattaaagccccttcgacaggttagtttatcatccaaaatgtgtatgtgtctctgcagattgatagcaacactgatggtttggtgaatttcactgagtttgtggtggctgctttgcacgtgaaccaattggaggagcatgactctgagaagtggcaacagaggtcaagagcagcatttgacaagtttgacatagacggagatgggtttataactcccgaagaacttagattggtcagtctcatgcttttcacactcccctctttgtctaccttgtctcactagaatcaatgtttgcagcaaacgggtttaaaaggctccatcgaaccacttcttgaagaggccgacgtagatgaagatgggagaatcagcatcaatgagtttcgcagacttttgagaagtgcaagcctcaagtcaaaaaatgttaaaagccctcctggtcaatctcaagtcaacaagctttcacaaaagatgtaa

SEQ ID NO: 179492 - DNA, 401 bp, Arabidopsis thaliana landsberg
aaaaagttaacttatcgaagtcgggttctctgaaacgtgttgctgatcaccggtcggtcagggatttggtccggagtaagtcttatgatatggagaggttccgaccatactatcctcttggtaaaacattagtaagataccaacccaaagacctatcctaaaggcacgtttttttattattatactacttgacatgatcctttttttttcctcggtgcatctttgatatgattatcttaagtttaaggagcataatgaattaccttttcaattgatctatgtagagtaagggagattggagaccaacaagctacaatcctgacttttggaaaggacgttggggttggttgctagttggatgccacgtctacgtgctaacgtatgcattgatgcacaaatag

SEQ ID NO: 179493 - DNA, 181 bp, Arabidopsis thaliana landsberg
atgtggctcgggacgttactgatggaacgcagtgaagacatctacagaatgaaaggtctcctctcggtccacaccatggaggagagattcgtgtttcaaggagtccatgacatatttcaaggatcaccagacaggttatggggaagagaggaggagagagtgaataagatcgttttcattg

SEQ ID NO: 179494 - DNA, 60 bp, Arabidopsis thaliana landsberg
atgggtatatttcctggatttggtggcttgatcaaccagaacactcaagagcctcctaag

SEQ ID NO: 179495 - DNA, 924 bp, Arabidopsis thaliana landsberg
gaactaaacacaccatttgcaacagagagcttaaattctttattggcctccactgaagcgaaccagaacttatacacagtgccaccacataatttcggatatggtgagcccattggttctttatatgaaactagtaacagaacttatcagcttcaacgtggacactctcactatcaggtatcatcaaatatgatcttatccgtttcatctgctcaaaagtgtccatgttttataagactatgagttggtaatatatgttgtgatcatattctgtaggaactatacacaccatcagttgaatttcagacgttattcccactgccacctcttaatattaatttcaatgagcctggtggtggtggttcttcaattgctgctgattttagtcaacaacaattcagctcaaatctacctatgtggcatgaaaatcagttgaacataggttcttttgactctggaccttcctcttctacagaggtaatgtcaaacatggacctatccacattcggtaaattctctgaaatttgcaataaagcttacagatttgatatattaatcacacttgtcattaggtatcatcatcatcatcatcatcatcagaaaaccaacaagatcatcatgaacaagttgtaccaccaaatgaacttgatccattgaccatccagagaaatcaataccgagaggaagcaaaacagagatattttgagaagaagaggagtcgcaagtaagtgtttcgtttagctttctatttagggctgggatttcatcttcttattattgaggattttggtgaatctttgcagattcgtgaaggcacaccgatatgaaagtcgagcacaaacagctgcgaagaaaaaacgaagcagaggtagatttgtgaaaaacgatgacgaattcgacaatgaccccccagctatacagtga

SEQ ID NO: 179496 - DNA, 354 bp, Arabidopsis thaliana landsberg
accttcctgcgccaaaaggttactctggcctcctctgttccgaccaaagccaaaaaatctgcaaataaaggtagtgaaggatccgagtcagtggatgaattgcattcgccgaatgagtgtgggaacaagaattgtcgtgagacgtacagagaaacaggacaacgctgttcaaagtctggagtcttacgctacgcacttcatcttaaatttatttgccctttacgcaagaaagcctccaaattaggtcagaagaaaagcttggatgcaggagatgatggagagcggagattctatttatataatgaattgagagttgtgtttcctcaacgccacacagattctgatgaaggaaag

SEQ ID NO: 179497 - DNA, 25 bp, Arabidopsis thaliana landsberg
atggagcacgagaaatacgccgtta

SEQ ID NO: 179498 - DNA, 172 bp, Arabidopsis thaliana landsberg
ggaatgtcctttggatctaaaagaagcgatatcaagtgtatgttttgctgcgccgaggtgctctgacttgacagagctgcagcaggttcagatactgtttgtatctaagtatggaaaggaatttgttgcagctgcatctgagctcaagccggattctggtgtcaatcgtaag

SEQ ID NO: 179499 - DNA, 566 bp, Arabidopsis thaliana landsberg
aagtacgggataatcagctttatgccaaatttaccaagtgtgacttctggcttgatgaagtacattttctcgggcatatcatctccaaaggaggaattgttgttgatccagctaaagtaacagaaataatggattggaagacaccaagtacagtctcggagatccggagtttcttgggactcgcaggttattaccggcaattcattgaagggttctccaagattgctaagcctttgacctcattgttagacaagagcaaggagtttaagtggactgaggaatgccaagagagtttcgatcagttgagatctaagttgatggatgctccagtactgattatgccacatctacagaagaattttgatatatattgtgatgcaagtcgcaaaggcctgggatgtgtgcttatgcaggaaggacacgtcattgcctacgcgtctcgccagttgtggaaacatgagttgaactaccccactcatgacttagaactggcagccgttgtgcatgctctcaagatttggaggcattatataatggggccaagtgccaagtctatactaacataa

SEQ ID NO: 179500 - DNA, 1191 bp, Arabidopsis thaliana landsberg
atggaggcaactgatatttggggagaaattgaacgttctgagaggtattcttgagaatttgcttaaattttaatttttcatgcttgcgaattttggttccggcgttggccatgtgtataagcagaagtcaagattttctcagaattagttatcacgataattatctatccggctttgattcagtcatgtatagagtttgtagaaaaacgattcatcacagacttgacaagaaacaagttcaaatgaaattgcccatgatgatgtccactcaaatttatctcatacttgtaaaaattatctgttttcaagttgagaaattggctcagtaccaatttcattactcatttttttttttgttggatgtgtatagttacctagtgtgctctatgtatgaagaggcagagtcattatcttcctctatactgaaaagaatatttggcaacattgatgttttatccgacgaagcttctcaaggtgatcatcaatttcatgatatgttggaatctgctggtatggtcttagttcaatccttgcatggaatcggcaggtatatttcatttactgtattcagatgttataacatgagtagttcttttgcctcttacttctgtttggaattggatgctctaaagaaactttagagtcttggacgcttgttgtagttttggctatgtgatagtttttgccaacaaatgcctttttcatgcaggacagttgagattgtaaatgagttaagagatgtgtttaaaaagtaacagctattcctgttcaagttcttcttactgggtattgatcttgttctcaatctttcaaagcattacagcttaagatgctttaaaaggagaatatttggttctttttgcagtttatttttcaaaactaggagtaaaatacattcattttatttgctaactttttcttgggaaggggagtacaataacattcattttatttgcaaactttttcttcttaaggggagtacaatactgctctctggatgcattagcatagacaaaagtcacagaacaagattgttgaaatctagtttattgatcttcttccctttttttcccttttagagtatgccttcaaatatcaaatggttcctatttgggtgtacgtgatattctggaagagttctttagaatatgggtttacaaggacaaccactatatcctaaatgatgctgga

SEQ ID NO: 179501 - DNA, 877 bp, Arabidopsis thaliana landsberg
atggatgtggtggttgaagtagcagagctttctggtcatcttccattaggtctccgtgtgttaggttctcatatgcgcggaaagagcaaggatcggtggaaacttgaactaggaaggctcacaactagtcttgacgaaaaggtggagaaaatattaaaaatcagctatgatgacttacatattagggataaagctttgttccttcacattgcatgtatgttcaatggtgagaacattgatcttgtgaagcaaatgcttgtcaatagtgacttagatgtgagtcttgggctccaactcttgcttgataaatctctcattcaaataaatgatgatagagaaatagtcatgcatagtttgttactaaaaatgggaaaagaagtcgtttgtcagcattcaagcgagcctggaaaacgtcagttcttgttcaatacaaaggagacttgtaacatactttcaaataatacagtacgtatgttaacaaactttgatcatgattcatgagcttggcttgatgaacttgtttgacgttcatttcacacattttttttttcattggtaacaatatttacagggttcagaagcagtacttggcatatcattagatacatctgagatccaaaaagatgtcttcatgagtgagagagtttttgaagacatgcgcaatctaaagttcctaagattctacaacaagaaaattgatgaaaacccaagtttgaaactccacctacctcgagggctaaactacttgcctgctgtaagattattacattgggattcatatcccatgaagtataaaccttctcaatttcgtccagaatgccttgtggaactccgcatgatgcatagcaaagtggtgaagctttgggaaggaacccag

SEQ ID NO: 179502 - DNA, 411 bp, Arabidopsis thaliana landsberg
atgccaggtcagaagattgaaacgggtcatgaggacattgtccatgatgtgcagatggattactatggaaagcgaattgcaactgcatcatctgactgcaccatcaagataaccggtgtcagcaacaacggtggatcgcagcaactagccacattaaccggccaccgtggtcctgtctgggaagtcgcgtgggcacacccaaagtatggatcaatccttgcttcatgctcctatgatggtcaagtcatactctggaaagaaggcaaccagaaccaatggacccaagatcatgttttcacagaccacaaatcttcagtcaactccattgcatgggctcctcatgatatcggactatccttggcctgcgggtcatctgatggcaacatttcggtttcacagcccgtgctgacg

SEQ ID NO: 179503 - DNA, 54 bp, Arabidopsis thaliana landsberg
gtgcgtcttcacaacaagcaaaccctagctgccgccgacaccgagagctgctaa

SEQ ID NO: 179504 - DNA, 51 bp, Arabidopsis thaliana landsberg
atgaacggaaaagaacatatgttatcggaaaggaaggacttccagacaccg

SEQ ID NO: 179505 - DNA, 388 bp, Arabidopsis thaliana landsberg
atggtttggagctcgtcggaagatgccgaaccgagttcgagtcaccagggtgatgcggcttcatcatctaatacgcccgaagagccgagccctttcatggctcaagaagatacttccgctgatatagctcgggaactcgatcttcgagaggatcctgagccatctcttgttcgaaggcctcatgtcccaactgctaacgaggctggaacatcgaattggcgagatgtgtccgaacccttgtttccccaggtgaaggttgaggataatctttacttcgagccctacgagaccgagggcatcttccaggcggccgagcggattgcgatgcgcaaagctgacaaggcgaaaaagaaaaggaaaaagaaacgggttatgcccaacccgcctg

SEQ ID NO: 179506 - DNA, 322 bp, Arabidopsis thaliana landsberg
gtaataataatcatgttcttgagaatttagatgatcccttttacggaagttcagatgaagaagactatagtgaagctcgcgtgttgggcaatgagaataagcagagacgtgtgaaattccactcggtattctttcttacttgatcattctctcatctctgtgtctaaaatgctttttttaatggtaaattgaaattgtaggctggatatcgtgatgggattgttgccgggaaagaagctattgcgcaggaaggttataactttggctataaggaatcagttcttaatggttaccagtttggtcttgttagaggtgtttccag

SEQ ID NO: 179507 - DNA, 1786 bp, Arabidopsis thaliana landsberg
  unsure (1)..(1786): unsure at all n locations
atgtggcggtgccttcgagttgcgtcgtcgtcgaggagatcggaatctaatggcgctttcatcacttctcaactctccagattcttctcagctcctccttcggtacgagacattgtttgaatcatcgatctcgtttagtctttggggtttctcatcatttcattggttgactaatttctagctttgtttcgattagaacacaatttttggtatgattttgcgtagttggtttggttttgatttgttgtgttctttgttggaaaaaggcagggataaatcatcgtatacgatcgtagatcatacatatgatgcggttgttgtaggagctggtggtgctgggctaagagcagcaataggattatcagagcatggttttaacacggcttgtatcactaagctttttccaactcgttcccatactgttgcagctcaggtgccaacatttgcttactcttgtttttagccttataattaagcttgcttttgtttttgattgagttatgaaatttgttgtgaagggaggtataaatgctgcgttgggtaatatgagtgtagatgactggagatggcatatgtatgatactgtcaaaggaagtgattggttaggtacgctgatgatctacttatgtatacacagataaaacttgcttctttgttaccctacaagttacttatttcggcaagtttctatatttatatgtaacttgtgttttttggttctgtaggtgatcaagatgcaattcagtatatgtgcagggaagcaccaaaagctgtgatagagcttgagaattacggattgccattttctagaacagaagatggaaaaatatatcaacgagctttcggtggccagagtctcgagtttggaataggttttaattgttgacttattgaatctcatgtatctgtttaatgtggaagattacttgcttaaccttctcatagttatttctttatctctgtgtttttttcaggtggtcaagcatatcgttgcgcatgtgctgctgaccgcactgggcatgctctgttacatactctgtatggccaagcaatgaaacacaacactcaattctttgttgaatactttgccttggatttgataatgaacagtgatggtaaggtctaagaaggtttattaagagtatactctatatattatccatcatgttgcaaaatcaatattgttgaatgcttttggtgtatatgaatatatgatgagcaggaacctgtcaaggagtcattgcactgaacatggaagatggaactttacatcgtttccatgcgggttccacgatattggctaccggggtaaagagaacttgttgtggctcataatgtatcttgttttgaattggtgaaccacacagtaatgaatcatgatccataaaatgacttcagggctatggaagagcttatttctctgcaacttcagcacatacatgcacaggagatggaaatgctatggttgcacgagccgggctaccgcttcaagatttggagtttgttcagtttcatcctactggtatatatggagctggatgtctcatcnnnnnnnnnnnnnnnnnnnnnnngcattaatcaaatcattgaggatttagacagacatatattggttcttgactttatcaaatttgaacatataggagctagaggtgaaggaggaattctcagaaacagtgaaggtgagaaattcatggatcgatatgctcccacggctagagatctggcttcaagagatgttgtttcaagatcaatgactatggaaatccgacaggacgtggtgcag

SEQ ID NO: 179508 - DNA, 296 bp, Arabidopsis thaliana landsberg
aacaaggcagcgtcaaccaaggaaggtctagatttagtcctcttaaaagctttcttcttgtgatcacccaacaacaaaacaacctcttcctcggacacaagcgccacgtaaaaatcggagctcggctcaggcccgccgttgaatttcgcagacctaaaatcccaatagacatctacttggtttccttcgacctcaaacgatttgtaacctttcttgtaccaaaagtgccatggcttaagatcaaccttgcaacagtaattcatatcgccttgtacgctagtgaccatcacggttaa

SEQ ID NO: 179509 - DNA, 941 bp, Arabidopsis thaliana landsberg
aacttagatgcattgaacctgaagctgagcagagtagtggacaaccagcagcatgcgaaagccatgactcattagacgacatcgttgataagatagctatctctgaggttctctcacctagaaaggaagaaactttaccaggtctggaacacgaacaaagctataacccttctacaggtattgagaaagccgagaatgaagacatggagattagcatacctgcagcaaaggaagaaactttaccagctctagaatacgaacaaagctataactcttatacaggtaatgagagagccgagaatgaagtcatggagattagcacacctagaaaggacgaaccattatcagctctggaatacgaacaaagctataactcttctacaagtaatgagaaagccgagaatgaagatatggagattagcacacctgcagaaaaggaaaatgttgacttatctttaaaaacaatagatgtgaatgctaagcctgagacctatgagctaactctaaagaactcggatttggagataggcccatcagttgaagctcaagaatcacaggaatctgtgaatgaagaggaacaaatgaagaatgaagagaggaaaatgagtccttccacaaagcaagctgagcaatgcttaaataaagaagaaaatgctcagtcagaacagcaatcaacggaagactgtgaattgaattcactccctattaataaccaatcagaagcaacagtcgaagtggagttaacacccaacgatgctaagttagatgaggatgcgacatctggagataagtgggagagcaaacagcaacaagaggctgataaagattgtaacgaatcatctgtctgcaaaaatattgggacagatgataatgacaacgacacctaccccgctttgaaagaaaaagttaggaaatgcaaaagaaaattgaataccttatga

SEQ ID NO: 179510 - DNA, 398 bp, Arabidopsis thaliana landsberg
attgaaagccatcgttgaacttgcagcagattataagcttgacattgatatttcaacggaccttattgccaaactcatgtttcataaagaaaacccaacaccacctgagcttcattactctgttgaagcaccaagcccatcaacaaatggtgggtcttcaggttcaacggtgggacttcaagttcctaaacgcgagactaaagccttcgtgaacccatcaacaaatggtaggttttaatgtcagatactcattatgtgttaaggatctagtaggaaccagttcagcttgtaataggtctctctctctatcaaatgtattcaggttgcaaaatactgtgtttcagattcttttggtctaatttgatttttgcatctttatagacgagtcagtgaattaa

SEQ ID NO: 179511 - DNA, 34 bp, Arabidopsis thaliana landsberg
atggttagagaagaaggtgaagaagaagaagaag

SEQ ID NO: 179512 - DNA, 1887 bp, Arabidopsis thaliana landsberg
atgactaaagcagtagatggactcacatttccgatgtcgagagtatcggagtcagcttctcgacttaaaaccatcatttccgatatgcttcctcgctttactgacgattactccgacgacctctctgttcgtcatcttcttctttttattttcatcttcctctttgttctagagacgattcttaggtgtttagttcgatttccttggtttttacttgtgagctcttgtacgcactcttctctgctcgcagaagtaacattatcttcgtcgtctctctaatttatgtgaattttacccgatggatttgatattggcgcttctcacctactttttcccttatcgttttgattgttcgatgcaaattatcatcgattatcgtttagcagctcttgtagaggttatgttgcataatgattttggaaaatctgagttacaggatccgtaatagggctatgtgtatgtaatcactttgtgtggactggtttcatcttgttgaattgtaaaattgatccgcgggagcagaaattgcaggttgatgagtgtttttgtgtgaagatcacgtaagtttgtgtttactgatgaatcagcttgtttcaggagtatgttacggtgcttgtttgtaatggaaagagtcagagacaggcaagcgaagatttggaggcatttcttaaggagcaatcttggaaatttgttgtctggtttgatatttgcatcccctctttgttggcttgatacaggtattggtgacttatatgacgattttgataggtgtttttattttcagcttgtgggagcttctagtgaagtacttctctcaaagtaattctgcttctggacctaagactgatgttgactttggctctaatgatactctaatcaaacaaggtttaagctccagaaagtatgatgattatgattgcaaagctgccgatggtactaattcgatgaatgtaagactacgacatctgcttctttcatatgtgtgtatgatgcaccagtttttttggtcatggtcttaatgtgaatggctttgcaggaacagctgatatcagttactgctcccatagatgacattgaggctcctgtatcaccaaaagttgaaaaaatgaagatgtcacgacaagagctcattgatagcccttgtacaagggcacggcgaagaaagaaagaaaattggaactcgtctggttactctagaaaagtactgcgctctgtcattgtttcagccactcagcaaccatgtgataggaatcctgctaaatatgaaaaggttggaaggttaataatttctggttctgaattggtttatcaattgtttatgcaatttccatctcttaattgatccttgcacatatgtgaagcagtctatgaatgaaaggagtagaaccctaaagaagcgcccatactcaccagaaagagaattggattctcggtttgctccttcaggtactattttgcttcttgacaagttatgatcttctgaatatatgacgagtgacattttgcactaataaaaacgtctcaggaagagctgtgtctgcaagataccatgatgcatctctacaccaagaaacggagcctcatgttagtgtttgggatcgtttgggccgagcaagctccgaatgtgttcttgacacagaaagccgtacattgtctaagtttggtatccagacacgtgaaacaaaagtgcatcagcagcatggaccagtatttcctgcagcgtatagtgaacaacatagcgagatatttcaaagagaagttcttgcagttggttacaggcacagagttccccaattcgataaagataggaaacccaagagtgaaactatcacatccactgaaccgcatattgcatataacctcagcagaaagagacgttatggcatg

SEQ ID NO: 179513 - DNA, 165 bp, Arabidopsis thaliana landsberg
ttaaaatattgttattttaactgtgaagggctggttgttactttggttttggaagccaataccctatactacagcggtaaaaacttgaaagtgtcagaatgtaatcgaaatttacatgaattcaactccaagaaaccggtggaagaactactacaagcaaattaa

SEQ ID NO: 179514 - DNA, 1745 bp, Arabidopsis thaliana landsberg
aggttaagagcatttaccagttgttagaggaaggactgagcaagagagaattgagagagacagagcccagtctcttgtcagaagcaggagccaaagaaggaatgattcctgatgaaagccttcgcgaagcagagagagctgttgaatccggtgagagcggcttgctcgtgctccgtctaagggaaatggctcaccgggaacagagcgagcagtgccttcaagggtttgaggtgaagaaacgttctgatcccaaaacactgaatcaatagctgagttaagattcgccattttcttcttcctcttcttctttccttatctcagtctctcctgtgtacgaagctgggagacaaagggggtttaagcattttcatgggccttttcttcaccctttaatgggccttgttttaaaatcgattccttagaaagattcactcaccgggcttattcctgggccttattctaaaactctgtgtgtttccctgatcaagacaagaaatataaaccggttttaaccgattaaagcagaatcagagaagaatttaaccggcttttggtttttggctaaagccctcaatttgattgattcactcagttgttctctagtctcctcctcctaatagctctcgatgtctaacgccgacgaaccaccgcagaaaaccaaccaaccaccgtcgtcttcattgacgccgccgtcattgttctcactcccggtggacatcgtattgaacatcttagccttggtaccaaaacgatattacccaatcctctgttgcgtctccaagtccttgcggagtctaattcgctcgccggagattcacaagacgcgatctttacacggaaaggactctctttatctatgcttctcgaccagaactacatacccgaaccggaaccggacgacttttcactggttcactctccggaggaatgataacaagatgaatacgactgagaatgtcttcgtctccatcgatgttccttatcgtcccgggcatgcttcttaccctctttccaatatcgcaattgatacagagatttactgcattcccggatataattttccctcatcatcaatcgtatggatctttgacacccaatctggacagtggcgtcaaggacctagtatgcaagtggagcgattatcagctaccgtaggactagtcggtggtaagatctatgtgatcggaggcaacagaggcgaagagatcctagcggaagtatttgacttaaagacacaaacttgggaagcagcgccgattcctaaggcaaaggatagaaacgaatggttcacgcatgcaagtgtttcacttgataggaaggtttatgctttaaattcgagggaatacatgaattcttacgatactagagatggttcttatcaaagatatacgatacctaaagataactggtggaagacaggaaaatgcgtgattgacaatgtgctcttcgtttacttccttagatttgggttaatgtggtatgactctgagctgatgttgtggagagtggtttatggtttagatcttgacaaagctcgatgcattgggatcggggaatactacggaaagttggcgtttatatggggaaaaccaagtaatgttagtgaaagcaaagagatttggtgtagaatgattggcttgcttaggagtgaagtaggaattcatggaactgaagaaccgtctcaacttctcagaatcgttcctaacaactatagtttgcgccattgtctgtctctttcgggttaa

SEQ ID NO: 179515 - DNA, 811 bp, Arabidopsis thaliana landsberg
atgaatccaaagattctaagaagaatggagatgatggatgggctgctttgttttctttattggcaaatggtgagattgcgacattgtggcttatctttctgatgatgtagaactggtttaatggagactcctccagcaaaccgtcaccaccaacaccaagagtgagtaaaccaacagtgacttatatccgatggcaattcgccatctccggtgcagagcactcgtctttcaatagaccgttcaccgcaaactgttaactccaagcctgtttctgatcgtcggactgcaagagttcctactcctcctgaggcaagtaaaaccatctccatccaataacttgatgcttcacgtgttttgattttcaactttgaaagactatttcttgatcatcatttgtatggcatttcagaaatcgcaatcacggttagggaagggaactgggctactggttcaacaaactcaagaggatttaaggaaagctaatgagcaaatagaaaggctcaagaaagataaagctaaagctcttgatgatcttaaagaatctgagaaactgactaaagaagccaatgagaaactgagagaggcattggcagctcagcatcacgcagagaagagttctgagattgagaaattcagagcggttgaactagaacaggcgggaattgaagcagttcacaaaaaggaagtttcttggaagaaagaagttgagtctattagaagccagcatgctttggacatctcagctcttctctctaccacagaagagcttcacaggattaaacaagaattggctattactgctgatgtttaa

SEQ ID NO: 179516 - DNA, 963 bp, Arabidopsis thaliana landsberg
tctagttggagataccattactctgacttttacctatgctcaggtgataaaatgtgtcgtaaaaaaaaataaaaaaatttgtttcctcaaatgtattaaaaaaccctatctgatcgttacgctaacttcaagctcttgtagcaattaccgacgtattatataactccatctgttttcaaattaaggttttgacacacatattaaaaaaattattttatcaattctacctttttaataatatgcttgacagaaatatatatatacttgacagcaaaatttattggtcaatacgttaaatcactaggaataaaaatgtatattttatcataaaatgatattcaaaatgtaaatcgagaattattttaaacaaaatttagattctaaaatgacacttaactgaaaacaaaaagagtaggataattgtgtttctctcattttaacactaggttataagcccccatgatgttgccggggaactttttcaacaaaaaatttgtattgcaaaagtacatttgattgtgtttatatattaagttattattctgacgtatatcattagacttttgttaccgataatatccggatctaactcgctttagcgaggtttcgatctcaattccttggcgcttcattgttttcactgattctcttcaaagcttctctgtctctccaattgcttgaggaattaacatcttcatcacctccaattgctcaagataagaacgtaattggatttagatttacatcaaggtggatgtagtcggtggtggagcctcctcagaattggcgattttagaaaaacttttgaagctgtgctacttctcaatccggttagagatcggtagaaggaaagcggatacacatcgctctatggatggttggcagcggctgatcgtactctcggtgatgtttggcgactcattgacggcggtgctcacattcacgacacaaagtcaagcgtag

SEQ ID NO: 179517 - DNA, 95 bp, Arabidopsis thaliana landsberg
atgcagtgtaattgttatcctcgtttgatgccaaatcgaaatctcgagatttcctcaacgatcggcttctgcttaacacaacttgaggagctttc

SEQ ID NO: 179518 - DNA, 1626 bp, Arabidopsis thaliana landsberg
ggtttgcatattattgatgatggtaacagtcacagtttcttttgcaccctacgcctcgttgttgatagtcagggtgcagaaccacaaaagctttttcctcaaagtgctaggacaaagtgtgtcaagccttccactacaattgtcaacgacttgatggagtgcacttccaagtggaatgaactttttatttttgaaattccacggaaggtagttcataaggaaacagttaatctatgcttcctttattcatattctctgtttcttcaaatatgcggtatacataagcgcttaagcctagttgctatccctgtatacattatgatttagatggttagtggtacaagttagattggtatgtctgtctgcaatattcatttctaaactgaaaacagttgtcatgattttggaacttatctcatatgagtatctgtttttttcttttctatttgtttaattgttatagggagttgccagattggaggttgaggtcacaaaccttgctgctaaagctggaaaaggttcaatcctattaattcttggactcttttctttgacctgtttaactataccttatgtgtgtgattgtgttctttttgagattgattggtattgtttagttttcattgagtccttggattgtttgcacctgattcgtgaataaaagatgactggacatttttccaagagttttcacaatgagtcaagatggtacctatgttgcatgatagttagctattgactattacaggggaggtcgtcgggtcactttcgtttcctgttggacatggggaaagtacgcttagaaaggtagcttcagtaaggatgctacatcaatcaagtgatgccgagaatataagttcgtatacgcttcagagaaaggttagctgtttttcatttatactagggtgtgttaacgtatatctcaagattttataacatgcattttcaattctccattttatcatgaaataaagaatgctgaagataaacatgacaacgggtgcttgcttatctcaacatcttactttgagaagacgacaatcccgaacacactaagaaatatggaaagtaaggattttgttgacggagacactggtttctggatcggggttcgtcctgatgactcatggcatagcattcgctcactgcttccgctctgtattgctccgaaatcactacaaaatgattttattgcaatggaagtttctatgagaaatgggagaaagcacgcaacattcagatgtttagctacagttgtaaatgattcagatgtcaatttagagatatctatatcttccgatcagaatgtctcttctggagtaagcaatcataatgctgtgattgcctctagatcttcatatgttttgccatggggatgtttatcaaaggataatgaacagtgcctgcatatccggccaaaggttgaaaactctcatcattcttatgcatggggttattgcatcgcagtgagttctggttgcggaaaagatcaaccatttgttgatcaaggtttactgactcggcagaatacaatcaaacaaagcagcagggcatctacattttttttgagattaaaccagcttgagaagaaggatatgcttttctgctgccagccttctactggga

SEQ ID NO: 179519 - DNA, 96 bp, Arabidopsis thaliana landsberg
gcgacaaagcttgaaaagaccattcatctacaagttggaaacgacaaagggaccggaatggttataacagaaaccagtaagtgtgttaaccactaa

SEQ ID NO: 179520 - DNA, 506 bp, Arabidopsis thaliana landsberg
atgggtctgcagtgtgctgaagaagctcaccgtcctgtagattgtgacactgtttctaagtgggtattgaagaatagtgctgagtcggagaatatgaattggtacgttgatttatgagtatcgttgagatatgttgttgttgtgctcgaccttaaagggtgcttagattttttaaaatatttgggttctttataaatagattgttttcttgtattatatattcgtagttatggctaccattttgtatagccaaaggaagccaaaatgttggatatgtttgcatttttaactataagaagaaaaccattttcggtttcttctcttccatctcctagcattagggtgcatcatgcttcacattttgttttgttgctgctaagttccatattgaatttcaggattttggcaaattccaagccttgtccaaaatgcaaacggccaatagagaaaaaccagggttgtatgcatattacgtgcaccccaccatgtaaatttgagttctgctg

SEQ ID NO: 179521 - DNA, 705 bp, Arabidopsis thaliana landsberg
atggaaatagaaatagatgctttggaaagctcaaacacttggtcagtgtgctctttacctcatggaaagaaaccaatcggatgtaaatgggtttttaaagttaaactcaatgctgatgggagtctagagaggtttaaggcgagactagttgccaaagggtacacacaaagagaaggcttggactattatgacactttttctccagtggcaaaaatgacaactgtgaagacattgttatctgttgcagctgctaaggaatggagtttacatcagcttgatatatccaatgcgtttctcaatggtgatttgaaagaagaaatttatatgagcttacctccaggatattctatgaagcagggaggagttttacctcaaaatcctgttctaaagttgcaaaaatctctctatggtttgaagcaagcatcaagacagtggtatttgaagttcagctctactctgaagaagcttggttttaagaaatctcaggcagaccatactctattcacgcgtattcgaggtacagctcacattgctctccttgtttatgtagatgacattgttattgcgggaaataatgatgagattatagaggaattgaagaaggatttagcaaaggcttttaaacttagagacttaggtcctctgaagtattttttaggcctggaaattgctagaaccaaagaaggaatatctgttcgcaaccaa

SEQ ID NO: 179522 - DNA, 63 bp, Arabidopsis thaliana landsberg
atggatcggaccaggaatgcttattccccattaggcgtcatcaatggaatcgaggacctcaag

SEQ ID NO: 179523 - DNA, 590 bp, Arabidopsis thaliana landsberg
gggacaaccttactattgcgaaagaaactggacgtagacttggtatgggaacaaacatgtacccaatcacatttttactcggtaaccacaaagatgatatcatcgcttactatcctattgatgagtcggttgatggcttttctggtgtctttccaggtttgttcaatagctttttttttgccatatggttccgaaatacatattgtaacactgtctttttttttccttaccaatcatgttcagagcacaaataccatattgtgaacaagttgcaagagaggcatatttgtggtatgattggtgatggagtggatgacgttccttcgttgaagaaagcggatgttggtatcgctgttgcgggtgcttctgaagctgcaagagctgcttctgatatcgttttgactgagcctggacttagtgttatcatcgacgcggttctagctagtcgagccactttgcaacaaatgaaacactacacaggtgagtgagcaatgctcttattaaactatacacagcctttttttttctttttttctgatgttttctcatgtatcagatttatgcagtttcaataaccattcgtgttgtgg

SEQ ID NO: 179524 - DNA, 896 bp, Arabidopsis thaliana landsberg
tacatcgtcttaagatttctgactttgttatgtctcctccagcattggttgtgtttgaagatggtttaacccaaaaatggagcaacgacgagtggcagggtttcagcgtttatcccggagaaaaccctaaccctaatattaatttcttggtgcagaaggcgactctgcagaaccagatgactgtctctcgcccatcgctgaacgaagagagcttcagaatggtcttacctctggcaatgtctccgccaagagacaacgctgtgcctcttcctgttcttcctgagccgatgatgaaaccacggaagaagcttagccaccaagaatccatgctttctctacgaaaatctcggtatcccgagaaaaacttctaccaagaagaagaaaatttcaagtgcaatgcgttctgtttatccctccccgggtttggaaaaagacctgtgcgatcaccaaaaagcgaggactctataaagaagaaaatgatcaaagcgtcatcattctcaaattccactgtctcactaagtgcctcgctagagaaattcgaatgtggatcatgggcttcaacgacagctctaacccgcgaaaacggcagattgtatttcgatctaccggtggagatgatcaaatgtggcggtggagatgtgcaagaaccagtgagttctggtttcttctttgacaaggaaacaggaagtctagctttgagaagcgttctaaagaaaagcagttctctgtctggaagacaattaagggatttggctgagacatccccgcaacgccgtgtcagattctcgaccacaacctcggattcgtgcccagcttcgccgcgaacatgtattaccccaagactgttgaaagctagagatgacttcaatacgttcttagcagcacagaacgcgtga

SEQ ID NO: 179525 - DNA, 262 bp, Arabidopsis thaliana landsberg
agaaactatacttgattgatttcgagtatggatcatacaactatagaggctttgacatcggaaatcacttcaatgaatatgcaggatacgactgtgattacagcctgtatgttcaacttccttgacttcttctgttgtctctaaaaatttcctcaacagatcaaaacataattgctgattgtggtttctttgtaggtacccaagtaaagaggaacaatatcacttcatcaagcattacttacagccagacaaaccagacgag

SEQ ID NO: 179526 - DNA, 744 bp, Arabidopsis thaliana landsberg
atggttaaggagagtgttgttgatcttcctcatgtcttcttgatgttcatcaacgaagtttcggaagagaccaatgatcctatcttccgcctcggcggcttggtatgtcttattggtttggtaagtatagttgttcggatgaacatctacactcatcacctcttgcaaatatcctcggtcatagccgaaagcttcatgtctggcagctccacaaggatgagaagagttgggccctcccacgtgttgatctccgggagatgggacgcagtggtggaacgggctaaccaagcggttagcttgcggccaattctcaatgaaggcggcggggtgatcattagagtagtgatcggtccggtaagctcctccattagacgggcaaggctgcaaagactcaccatgcatttgggatgcatcgggcgtgtagcggtcaattgagaaatgtgatacgcggtttgacccatggttcacacttgggtaatagctactggagtaatttctcgaattcatccttgagcttcctgaaactaagaaaaacaaaaacaaaaattaaaagcaaagtgtcctagagttcactctatttctcggacttgtggaactaacaatctctccccggcaaaggcctcaaaaagcttgatgcgtattttagttcgcttcaaactattacccgaaagaccacatgactactacaagtgcacagaatatcagagtagtattttaggatcgaatccacaaggagagaagtag

SEQ ID NO: 179527 - DNA, 1009 bp, Arabidopsis thaliana landsberg
gcgttgttcagagtcaaagtctactcagaaagtaaaagggaatgatacttccagcaaagacgaggagaagcagaaggaaaagctagaagatgatagctgcatggaatcagagccaatcatcacatggttggctcggtctagacatcgggacaaatcctccactcttaaggctgtacaaaaacggaaaaaaactgacgtaatgacatctaatgaatctgttaaaatgaatggggatgtcacagatagatcggctagttctcttgcatcatgtggattacctggaccaagtaaaaacgagttggaaagctctggttttcggaatggtagcatatttcctattgtctattgtaggagaagacttcatacagcaaagaaggatatctacaaagagtcaggttacaatagtgttgagtttttgaagcagtttcttgtatcaaaaagtccggatcctggtgtagagtttttgcctattgaagattctggggatctggagctttgttgcccgtggaatgaatcagagcaatttgagttgtccctcagcctacagggtgtttccttgatgagctactttcttatggccgatgttgactggctttcacgtgctgttcttttgcttcgtcatggtacacttgtgactttgtggccaagagttcgtttggaaatgattttcctgaataaccaagatgggttaaggtatctaatttttgaaggctgcttaatggaagttgttcaattgattttccgtatcttgatggtagtagatcattctaataagcaaggagcacaaggagcggatgctgacttgcagttgccagttttctcaattggtctccaagtttcttgcatcccaggtttccaaaggcagcttggatttcaaatctacagtttccatgaggtgaaacattcaaagtggtcatacttggaacagaatgtcaggagacattctttgctggttaagcaagtatcaattgcagagtgtactcacaataacatgaaggtcctgcagaag

SEQ ID NO: 179528 - DNA, 869 bp, Arabidopsis thaliana landsberg
ccttcggttactgctgtttaccggtgatcgtcaaccaactgcacgggtttttcatttggttcgattggtttactttggttctaagaaaccttttcttcctttccgtcgtcgtaagcattatcatcttcctgatttacgttatctttagcaaaatccaaaccacggaaaaaacggaaccagatctttacgatcaatatgtagccgccgtccctccaccctccaccgtcacgccgttcgattcctataatatgtcaaagtttgaagatgttggatattacaataactcgacttacagagagaatgtaccggcgtttcaagcggttaaggcggttgaggagagtagttatagttacgatcaagaagtggtggagatgagttcgaagagttacaggaggacgagcagatcggagaagaagatgacggagaggatggtggagtatcggaagacggaaacggagagagtgacgaaaacggggtcgtggaggtcgcagtctatggatggtttaagcagcggcgaggagtttcgtaggacgatacagacttttgtctcggagcagaagaagatgcatataatccgagctagcggcgtcgatgatcagttggaaaacggctacattcaccgagctagcggcgtcgatgatcgtgttcactattgggaacacggcgccgttcctcagtggcaaaacgatgacgttcctcagttgcaaaacggcggcgttcctcattggtggcaaaacggcagcgtttctcagttgcaaaacagcgatgttccacaatggcaaaacgtcggcgttcttcagttgcaaaacggtgatgttccacaatggcaaaccggcggcgtttctcagttacaaaatggtgtcccttag

SEQ ID NO: 179529 - DNA, 483 bp, Arabidopsis thaliana landsberg
cattacacattccttcccgttctgcaatacctcgtgttacttcaacgttctgcgaatggtggaggaagacgtatccagaattaatcaagtattcttctaaggagaaggatgctgatgaatcagttgaaacattaaacatcataagtgatgatactatttcaggctcaagcaacgatgaaatgactatagctgagtattcaaacaagagactcaagtgcgtagaggaagctcgtgacaagagacgcaagtacatggaacaagctcgtgaaagaggtaacaatgaatcagtaggaatattgaatttaagaaacatgtttggtgatcatagtagtttttgttctttcaggctctaagagaacaagcaatgatgaaatgaagatagctgaggattcaaacaagagacgcaagtacatgatgcaagatcgtaagaaggatgagagtactacgggtgtttgctctatttctgttcaccatcagaaatag

SEQ ID NO: 179530 - DNA, 297 bp, Arabidopsis thaliana landsberg
atggattacaacagtcagtggcaacaaccgccggcaccggcgatacagccaccggaaatgaatcagtcgacggcggttgatgcgtattacgcttcctattatggttactacgcaaatccaaaccctagttccatctccgatctccaaacttatgaatcctcagctattgcaattccaccaccgcctggagttgttgattctacggcggctgtgattgcgacgacatcatatgtgactgtggatacgacgccgtattatactttagatatgaatgctcagcagaactcggcttggcct

SEQ ID NO: 179531 - DNA, 135 bp, Arabidopsis thaliana landsberg
gtgcaagagactcaaaattctggtttcgatgttaacagaattcaaatagctgcccacttgattcgatttgttttgtatttggaaacaaccatggctggtcaaggcccagcccgttgtgcttctgaacctgcctag

SEQ ID NO: 179532 - DNA, 469 bp, Arabidopsis thaliana landsberg
atgaacctaaatgccgcaagtgatcacaattcacaaattgctaaccacttttcagaagcacatatcggatcagaggagccacggttctccttctttcagggtggttacgtagaagatcacaaaacaaatggtatcatagaaagctggatacattgttcagtcaacaatagccttttattttgttaattccatgagtttgacaaacagtgtgctacttgatgcagatcaagctaagaatggagaagaagacacaggagagacaatgacattggtacaagctgcagagaaagcattgcagttgagaggcaatgatcataactcattgactaaacaaaccgctgcaaaatcaggacctgagtatttccttaaccgagtttatcgcggtttggagataaatagtgagaatactttgccggagccttatatagttgggagaagcgggaaggcgtctggatacaagcatgagtag

SEQ ID NO: 179533 - DNA, 334 bp, Arabidopsis thaliana landsberg
atgcaggcaatgggtctaatgtccagacgtatagataactggggacatgtaagtgacccgatcataccttcaactgtattaacgagtctgatttttctcggatcagtggtccgatgtttcctctggtgaatttacattggtggcttacttggtggagccgcaattacatggcttcttggaccacagtggaagtatgaatatacaacaagagacggtcggagagtcttcatggacagtgctcctattcctctccttttgcggtggagaaatgaacagcgacggctttgattcaagaccaacgaagctgaacattttctctctcaatgccgtgtga

SEQ ID NO: 179534 - DNA, 165 bp, Arabidopsis thaliana landsberg
gtctggatggtctcgcggtacgcgacagcgtccacctgcacggagcacgtcgagtcgtcctacggtggagccttcacgaacgcctggtcgatgacggaccacgtatcatgcgatccatccgtcttgtgtgccgccgaactcatcgcagccgtaccagctcgctga

SEQ ID NO: 179535 - DNA, 202 bp, Arabidopsis thaliana landsberg
acgtgatagttacatcacgcatagggctttctgcgatgcattgatacaagagactgcaagaaaccctaccgtgagctttacgtcaatgacagctgctagtagtggtgtcggctccggcggaatctacgggagacttggcggtggcagtactctctcacaccaccatttgagtgaccatccaaattctggatttaaccctctc

SEQ ID NO: 179536 - DNA, 668 bp, Arabidopsis thaliana landsberg
atggatggttcatttcattcaccagaatggcatgcagctcgtttggccagtctcaagactacacacactcttacttgggaagaatataagcagaagcaaaaggtaatctttttgcctttttaacacttaagttcttctgtatgttgtatggaacggtggtccttgttataatgccatagaagataatcaattggccattgatgatttagtgttcataagattgctattattgtcgtcaatttagaagctttattccaacatatcattttcttttcctatgctgtttatcatcttcagccacagatacgcagtctttgtgtgtttatataaaaatgagtgtgtcttccttctacattacatctatccctatctcgcggttttcaagtaactctagtcatgctcattttttaaacatttttattatctgcaatatcagttttttactactacttgcagcagtctctctgtattgtgagtatggaacattaggaaatgtttaacattatatctttctttcgtgtaacatgtgtaggaagaagaattgaaaaagggagaacttgaagcagataccgataaactgatgcgtgagtatagagctcagctggatgcagaaaggtcgttgaaactctccaaaggaaggaactattctagtgataagtcacgaaaag

SEQ ID NO: 179537 - DNA, 15 bp, Arabidopsis thaliana landsberg
atgtcggattcacaa

SEQ ID NO: 179538 - DNA, 142 bp, Arabidopsis thaliana landsberg
gatttttgaaaatgacaatcgcgttgaagccaaatgccgtaaatcgggtttggcaggagttataggcgcgagaaatctcgtagagaagatctcccaaaagaaatctgaaacagatgaaatgaacattctcacatgtaaatag

SEQ ID NO: 179539 - DNA, 150 bp, Arabidopsis thaliana landsberg
gttccggtgaacctctgggctttctcgttcaaatataagctgcaaggctttgagatggttcgcgctttcacgaacaagccgaatagctttctgtttcggaagtggcattctatgcccgttcgcgcaatagatgatattgagaattctcag

SEQ ID NO: 179540 - DNA, 267 bp, Arabidopsis thaliana landsberg
ataaacaagccgagaagacctttcagcttccagagaatacagagagcagcaaaaaaacacatatgcttaccagttctgcagcgacggcgacggcgagtaaaggttggtatgagaacgcagggactccgacggcgcgctagggtttagcagccggagaaattgaaagaagctggaggaagaagaagaagaaggagaaacagagagagagagctgaaaaaggagagacaattcgaaagaggagagacaatcttatgttaatggcggaag

SEQ ID NO: 179541 - DNA, 1610 bp, Arabidopsis thaliana landsberg
atggacagtgaagctcaggagtcccttttacttcaaggggttgcagataattatggaggtgttaaggtgaacttgacagaaccaatgactattgaggattttgtcccaaagctgagagcttcacttgtgtattggagcaatcaggtatttcattaatagaccacttcagatttgagacttagagagactctttagaagacacttgtagtctagtggcaatgagttgagacatgtatttgcaggggacgaaggggatatggttaaagcttgccgatgggcttgacaatcttattgcacctgcaaaagcagtaagtaagatgtttatgtttgtaactatggctttggattggttcttgttcagcaatttagttggtaatttgacaggaagggtttgtgtgccaccatgccgagagggaatacaccatgcttacatcttggatcgctgatgttcctagtactcttcctgccaatgcgtctcatcgtattggagttggtgcctttgtcctaaacaagaagaccaaagaggtaacaactctttaccgtcttcttttcttggtccatctctttcaatcccaatggcttgataaagagtcaaaatcactagaaaaagtgtaagcatttctggtggaatgtagccagtgactggactagagaggccattaaggtcttctgtttgttcattgcctagtaagtattttgacctctggaatgatgagaacagaacttaacgagatatttccatgtgaaggtgcttgtggtccaggagattgatggtcatttcaaaggtacaggagtgtggaaactgcctaccggtgttgttaaagaggtgagcttatgggattttggcaccttgttaaaaaacctctcgttgttttgcttatgatttcgcacttccctctgatatcatacctaagccaagtgacatttcacagggtgagaatatttgggaaggagcacttagggaagtggaagaagaaactggtgtacgtatccagtttttgggttttctattgatgtagtgtaatctaattcatgttttcttatggtcttttgcttcagattaagacaaaatttgtagaagtcctggctctcaggtaacaagattatcttcatgccatctttattaagtatccatgagttcttgatctgtttaaccttgactgcattttaatgtcctctcgcagggaaagccaccaagcattcttggaaataaaaacggatatatttttcctctgtgagttagaaccaaccacttttgaaatcaagaaacaagactctgagatcttagctgctaaggtaaaacgtcttgtattgtatatcttttgatgaacctgaaccaaggatggttttttaactgcttagatctcttgttgtggctttctcagtggatgccaattgaagaatacgtaaaccaaccctggaaccagaagaaagaactgtttaggttcatggcgaacatctgcttgaagagattgcaggagatggaatacatgggtttctccaaagtccttactacgacttcatctgggaaagagagctatctttactgcaacaccgatcacgccaacctcctcaacgcaacgcgtggcctagcctccacctctggttga

SEQ ID NO: 179542 - DNA, 1439 bp, Arabidopsis thaliana landsberg
gtggtggtggtcatcggaaattttgctagcggtgccgatattagtagggacatagctaaggtcgcgaaagaagttcacattgcatctagagcgagtgaatctgatacatacgaaaagcttcccgtgcctcggaacaatctatggattcattcggaagtaaaacagacaaattttattttatttaaccataattttgattttaatttatactcgtggaatttaattttaaaggtaattatcgaatgctagtattaaaatgttttcctttttgatatgttgaaggtagacacggcatatgaagatgggtccattgttttcaaaaacggaaaggtggtatatgctgatagcattgtgtattgcactgggtatattcgtagttttcagtatttttatgctcatagttaccaaaattaataatgtgaaatgtactactgatttaccatatatttcggtctatgtgtgtagatataaatatcgcttcacattccttgaaaccaatggctatatgaacattgatgaaaaccgcgtagaacatctatacaagcatgtatttccacctgcgctttctcctggtctttcattcgttggtttaccatcgatggttagtctcaaacaatatcttggggttccgagttcaagtctcacttggtttttatctttatcttttttttatcagggcatacaatttgttatgtttgaaatccaaagcaaatgggtggcagcagtcttgtcaaggcgggttacacttcccacagaagataagatgatggaagatattagtgcgtggtatgcatcgcttgatgcggtaggcattcctaaaagatatacacataaattgggtaaaattcaggtgagtaccttatattctgaatatgattacatgcctatatctaaataaattcgattagttcaaaatcattttttcacgttttcttgtgaatttttttttttgaaacataattcacatgttttaattgtaaaacctctttttgttcaccataaaaagtttctgcaaagaaaaaatgcaaacgtaaggcttttaatttttagatttacaattaacaaagtatattttttttttgcctaaaattgttgatgaactttttttaaaaaactgaactaatagaaattcaagtaaaatgtaaacaaacaatcaaagaaatattatcgactcaagaataaaatcatgtcaatgactttgtttgaaaaaaatatatttcatcttgcagagtgagtacctcaattgggtcgcagaagaatgtggttgtccgctcgttgaacattggagaaatcaacaaatcgtccgcggataccagagacttgtctcacacccagaaacttatcgcgatgaatgggacgacaatgaccttatggaagaagcttacgaggactttgctaggaagaaattaattagattccatccttcccatatcctctaa

SEQ ID NO: 179543 - DNA, 842 bp, Arabidopsis thaliana landsberg
aaagtgatgcatcaagttatgatatagaagatccaattgatataaccactttaataggtaaactacgtattggaactcttcagacggatgctgcagaagaagcgaaaactgtaagacagcaggatgaatcacctccatcacccgattccgatgccaaagatgaatcatttttgggtgttaatgaagtatctgtttctagcatcagggcaagtcttgtcccgttttatcgtgggagcttgagaatgaagctatttcacaacgacacccctctgcatctgtgttggcatagcttgaaagttcggttcggaataagccggaagtttgtggatcatgcaggtcgtccaaagttgaatattattgttgacgcccctcttgatctatgcaagatcttggacgcagttgatgctgctgcgcacaacttaccaactgactcaagcacaaactcagattggagacccactgttataaggaaagaaggctttgccaactatcccacagccagactgcagtaagtattcaactctctcttaaatcttttacatatgataatgaatccattgagagtccctaacctctgatcccattcttatctggttgacagtataagctcagaatccaacggagatgataccctgtgtggaacgcaggtatatcaaaaagaagaacctttgggaaccaatcaaaagctcgatgtcagtagcgataacttggaaaagcttgagtcagcattacttcccggtactctggttgatgcattcttctcactcgagccttacagttatcagcaaatggcagggatacgtctagcagtcaaaaagttggtgatcctcctgaagaagtga

SEQ ID NO: 179544 - DNA, 180 bp, Arabidopsis thaliana landsberg
atccaaaatcgacatctagtaaccgaaaccgagaagaaaaaaacccgatcaattcgcctttgcgtaagagttttcgtccctgaacttgatgacggcatcacggatcatctcttcagcatatggcttcacaaacatactagtagtgtccagtttcagtacttgaattatgaacttctgtga

SEQ ID NO: 179545 - DNA, 246 bp, Arabidopsis thaliana landsberg
atgatgctcgtaatctacctttcttcgcttatccgaagtgtaatcgccctccacagtttgatcaacaacaaggtaagatagaccatcatctctctctttctctctagtaggtgattgatttgaatttgctctatgcaaaatttgttttgttaatctgtggatgctatgtttcagttgttgaataaggaacatgaaaaagcagaggactccaagcctgttgacatacccttaatcactgagagttaa

SEQ ID NO: 179546 - DNA, 51 bp, Arabidopsis thaliana landsberg
gaggatgcaaagactcttgatcgtgatgctaaacgtcgatatactgtatga

SEQ ID NO: 179547 - DNA, 262 bp, Arabidopsis thaliana landsberg
atgaagagacatctcaacgacgtcgtcttagtgtttctcgtttttatcttcggcgtgaaattggggaagggacagaatacgacaatccaagtaattaatgttggggttgtgactgatgttgggacaactgcctccaacttgagcttgctcgccattaacatgtctctctcagacttttactcttctcgtccagaatctcggaccaggcttcttcttaactttgccgactctagagacgatgttgttggcgctgcagcggctg

SEQ ID NO: 179548 - DNA, 800 bp, Arabidopsis thaliana landsberg
atgatgaaagagattagtagaagggagaaactgaaaggaatagttccagatcctgatattgatgcatacatgaaggtaaaataactatggatatttatttcatatgacaaatatatataacttggaacttgttttgatatttaagaaaacatctttggaattcaactttttatcatgacaggcagcttctattgagggttcaaaaacaaatctgcaaaccgactatatcttaaaagtaagatacattcagagtctgttctttttttatttcatctttagcttctactcttatcagaagttgattaatgcatctgcgtttcagatcctaggactcactatctgtgcagatacacgtgttggagatgcttcgagaccaggaatatctggtggccaaaagagaagattaactacaggtacttgtaaaatttcacaaactgctttaggttccttgcaaacattgttttgatgtttggtatatatctctgtaatctattgcaggtgagatgattgtaggtccaatcaaaactctgttcatggatgaaatatcgaatggtttggatagttcaactacattccagattctatcatgtctccaacagtttgcacgtctatctgaaggaaccatactggtttcactgcttcagcctgcaccagaaacgtttgagcttttcgacgatttgattcttatgggagaaggaaagataatctatcacggtccacgggattttatatgtagtttctttgaggattgtggatttaaatgtccacagaggaaatctgttgctgaattccttcaggag

SEQ ID NO: 179549 - DNA, 916 bp, Arabidopsis thaliana landsberg
atgaccggtgctgctccaccgtacgttttgttagggttagggtatcccgggaaacctctctgagggaatttcagatcttgtgagtgatggtaatgtcgaccgagacatcgagcaggtccaaatttcttcttgtctcctctgtgttttttatatgtatgtctctgttctgttttgatgaaacagagaatctttgatttgttgatcttaggcttaatacattttgtctgaagttttgcttttttgaattgggtagggtcatgtcttctaaagcgattagaattttgtaattaaatgtcatggtgaatggaaattatatgtcattcacatagtttggtcagaagaaaaatttggtcttttgttgtctctgtaattttgattttctagttacggacttgtttttctctttaccaagatgttcacaagagccctgctctatgttttgcaggctttaattgctttgaagaaaggtgctcaactcttgaaatatggtcggaaaggaaagccaaagttctgtccctttagactttccaatgtgagtgtactttagattggtgatgtacatgtagtctgcagatacctgatttcatagcttattgctttcaaaacttgcaatttatgtaactgcattttgttttggaatctacccaagaggttctttgtttatttttatgattcactgatccaagtggtgctataaggcagataatgtcctcgacttttttgtatccttgtgtttggtcacatatcagccttttaatcttaccatcttgggacatgttatttgcaggatgagacatctttgatctggatttcaaatggtggagaaaaacgattgaagttagcaactgtatctaagattgttccaggacaaagaactgcaatttctcttaaaattcagctttctgttttgatgtag

SEQ ID NO: 179550 - DNA, 71 bp, Arabidopsis thaliana landsberg
atggatattacaaaaccttatcagaacacagaagacattgcaaatgtccaagaagcatatatcaagacact

SEQ ID NO: 179551 - DNA, 2437 bp, Arabidopsis thaliana landsberg
atggaagccctcctcctccctccttcgccggaaccccaaaatcaaatcaccaatccggcgaattcaaagccaaatcatcaatctggtgacgtacataaagatgagacgatgatgatgaagaagaagaaggatacgaatccatcgaatttggaaaagagaaaactcaagggaaagaagaaagagattatggacaacgacgaagcttcttcgtcctattgttctacatcttctacctctaattcaaattctactaaaagggttacgagagtggttcatagattacgaaaccctatgcggttaggtatggctcgacgaagcgttggtgaacgacaagctgaaaaattggcgaagcctctgggcttttcacttgccgcttttgctaatatggttcgatcaatttccaaactttgatctttattgcatcacataactgttttgatacgaaattggctttgctggtacgggttgttcctatagttgaccttgcgtgaatactaggttttggttgtgttgaaagttttgatctttagatagtattaaatacaaagtctttcaatttaggctttgttgattcaaaactggacagaggagaggatctgaatcagagtcaaaaggattgaatctgaattttcttctctcagtacttgcgtgaattcttcaccctgaatcgaagagaggatcttctcctcaaattataatcagagtcaatcaatagaagctgaagttcttcttgggggtctctatgatcgagcttcaatgtaacattgcaaatttaaattgtcttctctctcacttgccttaaagcttgagcctttctagtttctactcggatttgtagttctgattgtgatttcaccaaatttcatcctacctagccgccaaagtcattgacttgcatatgctctgtagttcttactctgtttctactctgttttattgttctctaggttattgcgagaaagaatgccgcaggtcagaatgtttatgttgatgatcttgttgaggtaagtagtatgaacttcaaatgatttcttctcagtttctgttcaatctttcttttgccatcgttttggtagtgatacaagaacttcattgattatgctctccagatctttgctactcttgtcgaagaatcattagccaatgtaagctaaaatccccctctatgttttccgcatttttatatttatagactttctgattcataatgctgtggttacaggtttatggtaataagcttggttcctttgcgaccaactttgagcaaacattcagcagtactctaaagatccttaaattgaccaatgaatgtgcaaatccacatcagtcaaacaataatgatggtgggagttgtaatttagatcgctctaccatagacggatgctcagacaccgagctatttgagagggagacttcatctgctacgtctgcttatgaagtgatgcaaggcagtgcatcagcaacatctttgatgaatgagcgtgcccttgtcgaagagactatacaactctcttgtgtccctcctagaagttcagcgatggctttgaccacagacgaaaggtttttaaaacagcaaacacgagcaaacgacctaaagaccgtggagattggtcttcaaataagagagttaaggtgcaaagagacggcgctaggattaaaatttgaatcaaacaacctggggaaagcggcgctagagttggatgtttcgaaagctgcattcagagcggagaaattcaaaaccgaattagaagatacaagaaaagaagagatggtcacaagaatcatggattggctcctcgtaagtgtcttcagcatgttggcttctatggtacttggcgtttacaatttttcaataaagagaatcgaggatgctacctcagtatgcgaccaatccgaggagaaaagttcgtcgtggtgggttcctaaacaagtttcatcgattaactcaggcttcaacaccttcatctgccgggttcgagtttgggtgcagatatttttcggtgtgttaatgatcattgtcttcacttactttctaaacaaacgatcatcaggtacgaagcagacaatgccgataagtttcatcgttcttttcctcggtatattttgcggtgtatcgggtaaattgtgtgtggacacattgggcggtgatggcaaactctggctaatagtttgggaagtgttttgccttttgcaattcgttgcaaatgtcttcacattggctttgtatggtctaatgttcggtcctataaacgtgactcaagagaccagatcgaaccgttgtaacagtatgtttccatattgggcaaggcgcagtgtcgtgtatgtggtgattctgtttgttcttccagtcataaacggtcttttgccatttgcaacatttggtgaatggagagacttcgctatgtatcaccttcatggtgggtctgactatgcttga

SEQ ID NO: 179552 - DNA, 904 bp, Arabidopsis thaliana landsberg
caagaccaagctggtattattaaggcgactgtctcggttacctttgacaatgccgagacacacataagccctctcgtctacgaagaacatccagagattactgtgactagacaagtatgttctttgtctctcttttgttgtactcatcaattcatgtgcttgacacaattggagcctttaacttggcattgtgtctcttttggtgttaaaaagattgtagttggtggaaagaacaagtatttgatcaatgggaagcttgcacaaccaaatcaagttcagaatcttttccattcggtgcagcttaatgtgaacaatcctcattttctgattatgcaagggcgtattaccaaagttttaaacatgaaacctatggagattttatctatgcttgaagaagctgctggtacgagaatgtatgagaataagaaagaggctgcgttaaagacgttggagcaaaaagcaaactaaggttgatgagattaataagcttcttgagaaagatatattgccagctttggagaagttgaggagagaaaagtcgcagtatatgcagtgggctaatggtaatgcggaattagatcggttaaagaggttttgtgtcgcttttgggtatgtgcaagcggagaagattagagataattcgatacatgttgttgaagaaatgaagataaaaatgactggtattgatgagcagacagataagacacagggtgaaatatcggaactggagaaacagattaaagctttgactcaagcaagggaagctagtatgggaggagaagtaaaagctttgtctgacaaagttgattcattgtctaatgaagtgacacgtgaattatccaagcttactaatatggaggacacccttcaaggcgaagaaaagaatgctgaaaaggttccctga

SEQ ID NO: 179553 - DNA, 310 bp, Arabidopsis thaliana landsberg
gttgcagatttcggactcgctagactgaacgatactgcacagtcacacatatcaacgcgtgtcatgggcacattcgggtactgtcacttctcttatttgtttttttttaataaaatgttacgatacgatattaacaacattacataacataatgcaatgcaggtatctagcaccagaatatgcgtcaagcggaaagctaacggatagatcagatgtgttttcatttggagttgtgcttctcgaactcatcaccggtaaaaaacctgttgatacctctcaacctttgggtgaagaaagtctcgtcgaatgg

SEQ ID NO: 179554 - DNA, 353 bp, Arabidopsis thaliana landsberg
gaaaattggttactcttgacggcagattattcacagatagagttgcgacttatggcacacttttctagagattcctcgttgatttcaaagcttagtcagccagaaggcgatgtctttacgatgatagctgcaaaatggactggaaaagccgaggattctgttagtccacatgatagagatcagaccaaaagattgatctacggaattctttatggaatgggtgcaaacagactcgcagaacagcttgagtgcacctcagatgaagctaaggagaaaattcgaagctttaaaagttctttccctgcagtcacctattggataaacgaaacgatttcattctgccaggaaaaagg

SEQ ID NO: 179555 - DNA, 926 bp, Arabidopsis thaliana landsberg
atgaagaaggcgcaagaccaacaaaaaaagtacgcagatcgaaagatacgagaagtggagttccaagaaggagatatgctctacctaaaggtcacaactcaagaggcaaaatatcgatttggaaagatagggaagcttgcggttcgttatattggcccttatcaaattgtgagtcgagttggagaggttgcttataagttggacatgatagaaatcatgcgacttcataaggtgtttcatgtgtctcaattaaagaagcatataccaaatcccaatgttgttatttcagaaccgatacccgaattgaagaccaacctcacttatccagaggggccactcgaaatcgaagaacgccgtattcaaaagttcaagcagcggttaattcctcaaattaaagtgttctagggaaagcaaaaccgacgggtaataacatgggaagatgaagaaaaattgcaggtaaaatatcctcaattgttcgatactgaagaaggagacgacaatgaggccagcccatccaattcttagggaatttgggacaatgtagcaccccgcgcattgacctaggaggcgaatgaagggcaagaggaggaaaaaagaaaatgcgcattaggtgagagacgcggattgtctatttataaacaaggaaaacttggagctgtatccattcgggtgagccaacttggtgaccaagttttgtccttaagctgaagtggagcccaagtttcgtctcttaccccttaaactcgcacccttagcctgtaaacaggacctcacccctttagctgaacccttagagaactttacatcgaatcgctgcccaaatagagagaaagagagagagatcatccgaacctttagaaaaacccgagagacaaagagagagagagagcgagagcgttcgagcaagatatcgtccaaacccttag

SEQ ID NO: 179556 - DNA, 323 bp, Arabidopsis thaliana landsberg
tttccatgtttcagtaacagaatcaaccaatgcacatatgtaaataaggtaaagaagtcttgaacaagtaaaccatctcaaatcgagcctttttttcatcgcggtactaagcgagcattaaaccgtggttgcaggatgagttaatggagtgttacaaagcaatacaagagagagatattatagttggagaaaacgaaggaagcactgaaacagcagtaaatgtgcttgatcagcaattctcgagttgtgaaagcgataagagcatcacaatcacagcttcttcttcacctaagaggaggaaaactagtactcgtcgttactaa

SEQ ID NO: 179557 - DNA, 926 bp, Arabidopsis thaliana landsberg
atgttggtatatgagtacatgcccaacggttctcttcaagacgcactctctggtaagttcctaccttgtcttgtatatataaaagtgttgtgggaggattgagatagatgaatgtgaaactgcagcgaggtttagacaaccactgagtttggcgctgagactgagaatagcgctcgggtctgcgagagggattctgtatctgcacacagaagctgatccaccaatcatccatcgagacatcaaaccaagcaacattcttctagacagcaagatgaaccctaaagttgcagactttgggatctcaaagctcatagcactagatggtggaggagtgcaaagggatcacgtaactaccatcgtcaaaggcactcctgtatgttgctttaacattcctctgttttaaatcccttagggaaggtgactaattcccgaaacgtatggtacagggatatgtggatccagagtattacttgagccacaggctaacagaaaagagtgacgtatacagcctcggcattgtctttctcgaaattctcacaggaatgcgcccaatctcgcacggaagaaacatcgtgcgggaggtgaatgaagcatgcgatgctgggatgatgatgtcagtgatagacaggagcatggggcagtactcagaggaatgcgtcaagagattcatggaactagccatcagatgttgtcaggacaatccagaagcgcgtccgtggatgctggaaatagtgagggagctggagaacatctacgggatgattccaaaggaagagaagccatattcaagcccttcagtccaatcatctgcttcaggaatgtcaggcttcgctgctgcttccacaagaggcagttatactaccttctctgaattcacagctaaccaacttgtcagcggagtcattccctccatcgcaccgcgctaa

SEQ ID NO: 179558 - DNA, 173 bp, Arabidopsis thaliana landsberg
aagatgacgaagaagaagaaggtgatcctctgtctctagaactcctgatttcatcgaatcagaaaaaagaagaagagagtttacatatcaagatcgtgatcatagcagcaagaatcaaaatcaaaatcaaaatccaggtcaccgaaataatggaatccgattctgatgaatga

SEQ ID NO: 179559 - DNA, 1353 bp, Arabidopsis thaliana landsberg
atggctgttcgtctttttgatgcgctgaaattagaaacccaatctcttcgttcaaccatccaggaggcaatagtttctcttgctgctgcatacaaggtctgctactttaacattatatcgataagttatcatttcattttaaattttcgtccttatggtttcattttattttttgcattcttttggtggctcaccatgtcattattggtatttgtttctttaggactccccagagaatattctcagagacttggaggtgcttctgctagcaaattctctggcggtaagtgtgtgtatatatatatatatatatatttttttttttctctctctctttttgtgtattatttcaagatgattttgttaccaaagtatcaggggtttataaagtctagtatctttattgcttctattgaccaggaacaaaatgaagctcgcttttgtgctttacgatgggcaacttctttgtataattcacaacattgtccaagtctctatatttgcatgctgagtgcagcagatccgaagctagatataaggtacaggacatttatctcattgcttattgttgtgattgtggcatgatgaattgcgtaaaatgcatgttgactgtgtctgaagaacgttctccaattcagttttttttttctcccgatagattcgccctatatttatacatatataaaaatatatcaaagctgaaatcgaactgacacatgaaaaaaccctagctacccacacacgaatggagcacaaaactgtttgagctttgtccagtggagggtatacaaagtgggatctattccttctaattttgtagtacttttttgagttcaatctgtattaggttagttgacggactaccaaaacctcttccgttgatctatcatgacagaatcttcaatgcttcatttgtttctggttcttgctatttattgaagtgatgtgtatttattaactttttctgctttcagggaaatagcactcgaaggactctttctgaaagaagaaggtcgcagtatagtctctaatcatgaccataagtacccaaaatttattgagatgctggagtacattctcaagcaacagccaaaactgttagattcttcagaaatgagaagccagaagcttctctttccctcgcaagtctatctggtcatgataaagtttttagtgaagtgttttgagttagagatggaggagagcaatacccaggctgtagggactgaatttttggattcggcacaaaaaatgtgttcgttgttggaacattccttggcattcgaaggctcggctgaactacatgcttgtgcttctaaagcattggtttcagttggctcttaccttccggag

SEQ ID NO: 179560 - DNA, 486 bp, Arabidopsis thaliana landsberg
gataagcacacaagcaacaacacctaccagttcaacaagctgaatgtaaagagcaccaccgtcaccgatatgcgcaacctgctgccgggcagcaacagctttaacagcaagaccacgcaggaccaggtgagtgataaaacaagacataaactcaccagcatctatgagtggcagatagattcttccagctcattgaagctgactgtgcgcgcatcgaatgtaaaaggcaattccgtgagcaaataccttggccagtcgctggaccaggacgggaatattgtgaacgaaagcaacaggaccaccaatggtgatgatgataacaccaccatgaacaacaatatattctggcgcaagaagttcaagaaagcgggacgtacgatctcgctcaacagcgatatcaatttcaacaaccgcacacagaattccttcctgctggcgcagaacagttttaagacaaaggagcgatcatcagcagccagacggtag

SEQ ID NO: 179561 - DNA, 516 bp, Arabidopsis thaliana landsberg
atcgctccagcagatttggaggctgttcttgtttcacatcccttgattatcgacgctgcagtaacagcgtaagttcgaaaaaacaaatcttgatcatttactaaactagtttaataagtgaaagatactgcaaatccagttttggagaattcgacagagtctgttactctactgaaagtatccaaactttccatttcagtgccccaaatgaagaatgtggagagattccggtagcattcgttgtccggagacaagaaacaacactttcagaagaagatgtaataagctatgtagcttctcaggttaggttcccactaattcaaaatggcttttcccatttcaaaacactgatcattaatgtaatacattattatacattacgtgttctaggttgcaccctacaggaaggtgaggaaagtggtgatggtcaactctataccaaaatctccaactgggaagatattgagaaaggaactaaagagaattcttacaaactctgtttcttcaagactatga

SEQ ID NO: 179562 - DNA, 244 bp, Arabidopsis thaliana landsberg
atgccccaaagcggccgccgacccatccaggttcactcagcttttactgcacacttaaatcgctatgagcgaatacccggctgcggcaccaactgccctcaatggatcctgtaggatttaatgactcattccaataccaactgaaagagcccggattgttattattgtccacctcccgttcagattggaattggcgctgctcttcttgatgggtagcgtttcaggctccttcggaatcacctaa

SEQ ID NO: 179563 - DNA, 583 bp, Arabidopsis thaliana landsberg
gtacatattcaatcttgttggacaatttatcggctatccctcactacaagaccagtgttgtagtatagcgtcctgtttgctggatttgttcaaaagcaatcctgccaaaaaaattgttagtgtactaggtgaccaactccaagtaagtgttacttaatgttatcatttgggtcctcttctgaaataccaagggttttattactctagaaaatatggcttactttttctctatctgctggttttttagtttttggtttcaaagctggttacatgctgcattgatgctgaagcagataccaaaatttctggtgcgaagtcatctcaactggttaatttgctacacaagctagttgttagttcagactcttctcttaatgaagatatcagagtaggcgtcctacgtttaaagttgccttccttttgtcctaccagtgccaggaataatagagaaatatatatgttctgatttgttcatcgatttcaggacttggaaccactcccggatttaaaatatttccaagtcattcgtgaatcacacattaggatctgcgaagcatattctccgaggaatcatctgttgaag

SEQ ID NO: 179564 - DNA, 201 bp, Arabidopsis thaliana landsberg
atggtagttgagtatcgtcggcttttaacaatggtccaagtttccagcagacacgcagccggcgtgtgtgggccctcgttttgctctctgcggcgtaagttagaaaattctttgcgcttacgtcacttagtagtagggtccactcacagagtacggacatactcatttcttttctttctagctaacttggaagagtcttga

SEQ ID NO: 179565 - DNA, 101 bp, Arabidopsis thaliana landsberg
aaaaacataacatatatgacaaatgccgagaaggggtacgcaaacctgaaacagaaacaaacaaggccgagagccgaaacaagaggacgcagcccccgtaa

SEQ ID NO: 179566 - DNA, 380 bp, Arabidopsis thaliana landsberg
cgtcttggtgggagcccccgttcctgggcgccgatgacggcaataggtctgacatcctcggcgggtacaacacgcgcaagctcacccgccgaagcgacaagctgccggccattgagtgactggcgcgtagaatccaggcgcggacgacgcagttgtacctctgcgggctcttcttcgaccgaaaagagatgattccccgccaccttctctgggtaccgagccaacgggaccaatggtacaagggcgaggcaccatcgtggagctgggccgcatacgacgggacgatcgagatgtgggatggcaatccggtcctctttgacgactcgagctggtttcctactctccgtgggggctacgtgacctctgtcaaagagctctga

SEQ ID NO: 179567 - DNA, 1533 bp, Arabidopsis thaliana landsberg
atgaagaagcgcatgtggagaatctcactgatttcccagatatctgatctgctctgcctttcccgtggctcttcttcaaccttgaagactctgaccccattctgctttaccctctccaggtctcccttccaccaatccgggggcgatgatgatgcttcgggattgaaaaaccaattgttgcgcttccgtaatgattccggtaaagttgcctccgttttggagaggaacaaaatccaaggagctgcgtttgttgagctccttaggcagttacgtccatggcccgttttgtcccaactggtatacatacatcttttttgtcttcgaatttcacaaccacaaaagaaaaagccttttttccgtcatgtttgatgttgttgctttgcaggtgttcgactggagaagaaacaaggcactatgcgatgggttgcctatgactgctgatgaatacgctaagggcattaccatttctggtagactgaagaatgtcgatttggccctttccttgtttcacgagtctgcaaacaagaccacctccgtctacaatgctttgatgggtgcttacctctgcaacggtttgtctcatcccgcgagcagctcttccttgacttcaattctcaacaagacggaccctcctcttctactccatctgtctctacttacaacatcctcatttctctttatggccgtttgattatggttgagcggatggaatcagtattcctacagcttcaacaactcaatatccttcccgattccagcacctacaacaacttgattgctgggtacatctatgcttgggattgggataagatggaagcaactttccactccatgaagaacggccttgttaagcctacgcttgccacctatttgctgatgctcagagggtatgcaaactcgggaaatctgctacggatggaggacatgtatcaagccgtcaagcgtcacgttgacaggaatgagattaagttaatcgagtccatgatttgcgcatactacaggagttgtcacaaggataggatcagaaaaatcaagactttatccaaacttatccccaagaaaagttacaagccttggttgtatttgctcttgatgcaggtctatgctaaggatgataatctacatgccatggagaatttcatagaccaggctattacaaaaggactccagatagagacagatggtattatgagatcaatagtggctagttacttcaggtgcaatgcggttgataagcttgccaaattcgtgcagcgtgcaaactctgctggatggaaaatgagcaggtctatgttccatggcttaatgatcatgtatggatctcaaaagcgttttaaagagatggaaaacgtcctctctgaaatggaaagctttaaaataagccggtccaagaagacgctttgtattctgcttagagtatacgcagcaacgcatggacaggagcataaggttaatcaagtcgcaggaatgatgttaaagcatggacatgatttccaacgacctgaagcgagtaaaagagttatgggaaaatag

SEQ ID NO: 179568 - DNA, 1201 bp, Arabidopsis thaliana landsberg
atgttttcaaccaaggagctggtggcagtacagaataaaattgcaaaagtctctggtgctgtcataccaaaaaaatatcatggtgattcttccaaggacgtagtggctggttctgatagagtaagctcttctcattctcagacagcaaaccagagaagcaaaccagcttttggagaaaagccaactagcactccgaaagttgcaactcgtctggatgttgaagtgtcaagggacacttttgtgaacttgtctgctgacgtgtatgctttttttgtcttttcctatgtcattgatatgttcgtattttgcttggaggttatagtctttgtgctttttttgttatcataggattgatgtcaatcaagaaaatggaaatgccccattgttcagttttgggatgtcagattcttcttcttcatgtatgaaggatctaattgcagctgcccaggcaaaaagaaaacaagcacattcacagttttcaccgtttgtgaatctagaccataattcccttaacatcgattcgatgcagacgagtaaaagccctttcatggttcagaatgtttcatctcctgctgccgatgccacgctgattgttgctcaggaacatcaagaagttttgactccgtcaaatcatggccgccagtcctcatcaagtaaccaagctgggactgaagagaacgaagagagaaggtttagttcagggcataggtcagttgggggttcactgagtggtgccactgaggctgcgatttctcgagatacttttgagggaatgatagagactttatccagaactaaggaaagtattagacgtgcaacacgcgttgcaattgattgtgccaagtatgggattgccaatgaggtgagttaaattgtgtttcctcagctcaacacttttcttctttctgtggtttctttcaaggctagccaggcagaattttctatgataaacttaggaataggctgcatataaagaatcaataaaataatgtacctttaccggctaaaaattctcctttgtataacttggttaaatgttttgacaaaactatctacagcgtttgatggggaaatttttatcgtgttttgtaggttgtggaacttctaattcgaaagttggaaattgagcctcattttccccgtaaagtggacttgttctttctccttgattcgattatccagagttcacatagccaaaaag

SEQ ID NO: 179569 - DNA, 685 bp, Arabidopsis thaliana landsberg
tgatcggcaccgaagcatccgacactctttgctccaaaaagtccacactttttccagcctcttcttcccggtttcaagagccacatcgtaagtaatctctctgtttctctctatctgaacatatagactcatgtcacaattctattcgtttgttgcacaacattcctgtgaagttcttctccaagtatatcaaggggaaacacgaacgaaagaccgtcaaattgagatcagattcttcgaagagaacatgggaagtgaagattgtgggccatacactcaccgacggttggaaagagtttgctgtctcacatgatcttccaatcggtgacattgttgttttcagacaagagagtgacttggctttccatgtaacactgttgggacctagttgttgtgggattcaatatggttcgtgttcagtcgaaaagaacaacctcggtgacggtgagttgtgttctgtctctggctcttcaagaaacgtggtttgcttttggaatgtggatcagtgagtagagataaccagtttgactatataacacttagattctattatttttcagagaaaaagaaagtgaaggagaatccaaatggagaagcagagtcttcttcacgagatccctcttgttttgtggctaatgttgcgccttcgagtctacgttatgacttgatggtatttgactcttaa

SEQ ID NO: 179570 - DNA, 273 bp, Arabidopsis thaliana landsberg
atgagcaacaagaattacgtgtttgaagaggcaaaagagagtttaagctcaattttgttcaatggggattctgatagaacagaagctggcttttttgatggatctgtggaaagttggaacgatgaggatatgatcgatggagctaaatgggttgatagacttgtatccgagatgacaaaagcgataaacattgatgacatgaggcgacgtgttgcagtgatcttagaagctttagagagtatcataaagaagaacaccaacgcctcgaagaag

SEQ ID NO: 179571 - DNA, 948 bp, Arabidopsis thaliana landsberg
atggagccttcggcgaagacaaggcttccactccactccatcaaattattcattcgtcgccgacactccgtatcgctctccaatttggtataatcttcactcctatattatttaccaaagggggagaaagtttgaacaagggcttatatttcactcacaagtatccgtttttggcaattcatgccaaagggggagaaagtattagcccaaagcaaaagaaccgcaccaccaccaatttcaaaaatgtagtctttcaaatttgtgttaagagaagatttttccattggtatcttattattgataaaattttcaaattggtacaacccctttcaaaattaatatctaaaacactcttgaacactaagaggaggatttcattaaggggggtttgcttagtcaaaggaaaagcatttgaaacagggggagaaaatttcaaatattgaaaatgctttgcaaaatcttattcatttacctttgactatttgcaaaagaacttcgaaaaggatttacaaaatagtttgcaaaaacaaaacatgtggtgcaagcgtggtccaaaatgttaaaaacaaaagatcgatccatgcatatcttgtcagtatttatattggctcaattccaagcaaccttttcacttacattatgcaaactagttcaattatgcacttctatatttgctttggtttgtgtaggcatcaatcaccaaaaagggggagattgaaagggaattaggcttacacctagttcctaaataattttggtggttgaattgcccaacacaaatattggactgactagtttgctctagtgtataagttatacaggtgcaaaaggttcacatctagccaataaaaagaccaagtgttggattcaacaaaggagcaataaggcaaccgagggcacctctggctggaggcaccggactgtccggtgtgcaccggacagtgtccg

SEQ ID NO: 179572 - DNA, 1408 bp, Arabidopsis thaliana landsberg
aggctggctgagcttgtcaccgagcatatgggtggatctgcggaagattccagtatagtattggcaaggtggactgaaaaaagcagcgagttcaaggcagcattgaatacttgtgtattccctattggatttgtaaagattggtatctcaaggcatcgtgctctgcttttcaaggtatattctcaaaccctcttcctagatttagtctcttgtcttatcctacttgtggcaagtcatgaaatcgttgaatgattggaccagctagtaaaaagaaggaaacatgaaatctcatatgttaaggatgattgaacaaatgacttgtgctgttttcgcagaatcagatgctttgctgcttgtactcataaatcttgtttgattttgaaaactgatccgtgggcagtttacttctcccaatgtaggttttggcagatagtgtcaggttaccttgtaggttggtaaaaggtagccactacacaggcaatgaggatgatgctgtgaacacgataagactggaagatgaaaggtgtttttgattatctttttcactatgattccattattttcttttttctttttacgaaaatgtaacatatctccccttctttcagagagtacttggttgatcttatgacagatcctgggacgcttatacccgctgattttgcaagtgctagtaataacaccgttgagccatgtaactcaaatggaaacaaatttcctacagttcagttttcaaatgacgtgccgaagctctcagaaggtgaaggaagtagtcacagttctatggccaactatagttcttctttggatagaaggacagaggctgaaaggacagattcttcatacccaaaggtgggaccacttcggaacatagactatagttctccttctagcgtaactagttctactcagttggagaacaattcctcaacagcaattggaaaggggagtcgaggagccataattgaatgttcaagaacaaacatgaatatagttccttacaatcagaacagtgaggaagacccaaaaaaccttttcgcagaccttaatccatttcaaaataagggagctgacaagctgtatatgcccactaaatcaggtttgaataacgttgatgattttcatcaacagaaaaataatgctctggttggtagatcacctgcgccaatgatgtggaagaattacagttgcaatgaagccccaaagagaaaggagaatagttatatagaaaatcttctcccgaaactccaccgtgatcctcgttatggaaacactcaatcctcatatgctacctcaagctccaatggagctatttcctcaaatgtgcatggcagagacaatgtgacatttgtgtcaccggttgctgtaccatcatccttcacatccactgaaaatcagtttagaccaa

SEQ ID NO: 179573 - DNA, 976 bp, Arabidopsis thaliana landsberg
ccggatatggaatgagacttggttggagaagtttttctacaaaccgtgtaattacgaattattcgtcaaacaaaacttgaatatggaaatggctatcaccatggcaagggtacctgttacattcagttagtcactagaaagataaattatagaattgccaacttttttcacattctctccttttgcttggtatattataggatgctggtatggactggatactgcatcttgatactgatgagcttgtacatccttctggaacccgtgaatattccttgagaaatttgctcagagatgttcctgcagatgtggatgaagttatctttacaaattacgtgagttaaaagtctttgaagacattggaattggggtttctttctttggtttgacgatggtgatgactcgcaaatgttcctttttcaggagagcagcgttgagcgagatgatatcaaggaacctttcactgaagtacagaacattatcatctagagcttgctatcttgggacatatcttcatatgagttttatcatcaaaagtgtttgtttttgaacttttaggtatcaatgttcaagaagaattttaaacatcttcctagagaagtttactatggaaactataaagaggcaactcgtggcaatccaaactattttcttacctatgcaaatgggaaatccgctgctcggattcaagaccatcttcggcccaatggtgctcatcgctggcacaactacaagacgtatccaaagtatgttcttttcctcacttagcttaaacatagacattcattcttttgcttttgtaatctgacattgattccatctttgttgtgacagcatcaaggaactagacgaagctgcgattcttcactacacttactcgaaattttcagatcttacttcaagacgtgatcgatgtggctgcaaaccaacaaaaaaagatgtcaagagatgtttcatgctagactttgacagagcc

SEQ ID NO: 179574 - DNA, 893 bp, Arabidopsis thaliana landsberg
tatacttcaattaagccattgggagatcttgttttggtgaagatcaaggaggcagaggagaagactttaggtggtatcttacttccatccactgctcaatcaaaacctcaaggaggtgaagtcgttgctgtgggtgaaggaagaactattgggaagaacaaaattgatatcactgtccctgtaacaacctcactaccctgcaagccctctttcttcgtttgctttgttgtttgctaataaatatatctgatatgccttcatctttttcctgatgcagactggagcacaaattatctactccaaatacgcaggaactgaggtggagttcaatgatgtgaagcatcttatcctcaaggaagatgatattgttggcattcttgagacagaggacatcaaagatctcaaacctttgaatgaccgagtctttattaaggttcgtcccttctgttttaccttagtcattttattattgactctgcatgcaaatgttaacttctgttttgaaatgtctgagtttaggttgctgaggcggaggagaaaacagctggagggttgttgttaaccgagactaccaaagagaagccttctattggcacggtaagtactcacttgatatcatgtccattccgggaatctgatactttcttagtagcttgatgtgttagtcagttcatacacaagttccaactatatatattctcctcttcattttatggcaggtgatagcagttggaccgggttccctagacgaggaaggtaaaattacgcctctaccagtatcaaccggaagcacagtactttactccaagtatgctggtaacgacttcaagggcaaagatggttccaactacattgccctcagagcttcagatgtgatggctatactttcttag

SEQ ID NO: 179575 - DNA, 1650 bp, Arabidopsis thaliana landsberg
gcaacttaaccgttaacaccccttacgccgtcaacctcgaccgcctcatctcctctttatcatctctccgacgtaacgttaacggattttacaacatctcagtgggagactccgatgaaaaagtcaattcaatctcacagtgtagaggcgatgtcaaacttgaagtttgcatcaactgcatcgcaatggctggaaaaagacttgtcacgctgtgtccggttcagaaagaggcgattatttggtatgacaaatgtacgtttagatactcaaaccggacaatcttcaatagattaaagatttcccctcacacaagtataacgggaacaagaaacttcaccggagatcgtgatagttgggagaaatctttaaggggtttactcgaagggcttaaaaacagagcctctgttattggtcggagcaagaagaattttgttgtaggcgaaacgagcgggccttcatttcagacattgttcggtctggttcagtgcacaccggatatttcggaagaggattgttcgtattgtttgtctcagggtattgcaaagatcccaagctgttgtgatatgaaaatgggtagttatgtgatgtctcctagctgtatgttggcttatgctccctggagattctatgatccagtggacactgatgatccaagctcagtgcctgcaacgccatcacggccgccaaagaatgagacaagaagtgtcacacaaggtagggttgctacttcttatggatttgaaagttttgaactctaggattcaaatcagactgtagagatttttttatttcccaatgttacagacttacagtattaaacattttaagtgtgttttggtttttgttcaggggataaaaacagaggtgtacctaaagctttgatctttgcttctgcttcagttgctattgttgtcttatttatagtactcttagtcgttttcctaaagctgagaaggaaggagaacatcagaaattcagaaaacaaacatgaaagtaagctatcaaaatcggatatgaaaggagatttttcgtgtgttctgttttacatgttttttttccttctgtttcctctgtttcaatgatcctttgatatttgccgtgatttctaactccattttatcaatgcatggtttatctcatttctttacttacagatgaaaatattagcacggattccatgaaatttgatttcagtgtattacaagatgcaacaagtcatttttcactagaaaataaacttggagaaggtggattcggagcagtttataaggtaatctttcaaacttaagaagaatcagttgttataacgatttatcataacattcttgtatattatcattagggtgtgctttctgatggacaaaaaatagcggtgaaaaggttgtcgaaaaatgcacaacaaggtgaaaccgaattcaagaacgagttcttgttggtggctaagcttcagcatcgcaatctcgtgaagctcttaggttactcaatagaaggaactgaaaggcttcttgtctatgagttcctcccacacactagtctcgacaagttcatcttcggtacaactttcttcacattacaacgtcttcttggtaaccattcaactgttttttgtgtgtatgatgttctcaagtgtttgtatagatccgatccaag

SEQ ID NO: 179576 - DNA, 899 bp, Arabidopsis thaliana landsberg
gtgctggccgagaaccttcagaagctacttaattttccaaaagacttggtgagcttggaggctgcgacaaaggtacttttatttttctttaactcggtgtttaataatacacctcaattcgaattgtgcctttggtgataatctctctgaaaacattcctttatggtagattcaactaaaatacctggcagaggagatgcaagcaattagcaaagggttggagaaagttgtacaagagtttactgcatctgaaactgatggtcaaatatcaaaacactttcgaatggtaagctaaattagatattcaagaagcttctttcgttattggttgctagtgtttcatcatctgcttacacttgtacttgtattatgcagaacttgaaagagtttcttagcgttgctgaaggagaagtaaggtccttggcttctctctattcgactgtggtaaggaatctttaattctccaccttctccctggctttactttctaaagcactgtactgtggtaaggattcttttccgctatcattgacctgtgttttgtcatggcattcttagggtggaagcgccgatgctttggcgttatacttcggagaagatccagctcgtgtcccatttgagcaaggtaacaatttaatgcaaactcactattatggtttcttctcttcttacatcttattttctatacattatttccatttggtttttggagttgtgtcctttctgtccctgaccttaagatataccaaatcttggtgtttgatttgaatctgcagttgtatccactctgcaaaactttgttagaatatttgtgcgatcacacgaggaaaactgcaagcaagttgagtttgaccagaagagagcacagaaggaagcagagaataaaaaacttaaaaaag

SEQ ID NO: 179577 - DNA, 647 bp, Arabidopsis thaliana landsberg
gtgttcattgggtgatgttacgatttccgattcctgttatgaaaaagccctggaagtttcaaatgacaaatcagttcgtgctaaggtagtttgagatacaaaacagaaaaatctttttttgtccatctcttttagtccatgctctaattatcttcatcttgcagcgggctcttgctcgaagcgcatacaatcgcggtgattttgagaagtcgaagatactgtggtatgtttgaacattttggttctttccttattaattttttctttctctacaagggaaatggagttatgaacttggcccttcaggctgatttacttgtgagatgtctcatttttttctcctactctagggaggctgcaatggcgttaaattctctgtatttagatggttggtttgctcttggtgctgctgcgttgaaggtattttacttcatcttctccaatagcttagtagcaatatatttccactccaaatctaacttgataaacaattggaattcttgtcatgctggctgagagatatactaatttaacatgtccgacatgatacaataggccagggatcttcagaaagcactggatgcattcactttagctgttcatcttgatcctgacaattggctggcttggaacaacattgctagtct

SEQ ID NO: 179578 - DNA, 362 bp, Arabidopsis thaliana landsberg
atggtccagaaaatggttaatggagcaaaagtcacttcttggacttgcgtaagtttctctactcggattgaccgtggtttaccccaagagttctgcaaacagttgattgggatgtgtgtcaccaaaggaatggtctgtcttgtctcatgcttattgatacttgtcacaatttcataccaaaaaatttactaactcttttttttgttttaattctttgtgccaggaatttaagcctcaacctgctattccgttcatgtcttgtccccctgaacatattgaggaagctcgtatcgatatacacatgagggctcttggtcgccaactgttgattgtaataaaacgggatgagactggatcatatg

SEQ ID NO: 179579 - DNA, 533 bp, Arabidopsis thaliana landsberg
atgatcgaggagaacggcctaggtttgtcgaaaaaaggacaaaattggaaagaaacatgggaacctaagcattaagcccgggtgaatactaaactctttgtgggaatgatcgagtagtggaatccggagactaattcttttgacgtgaggaaaaattgtaacaactcaaatccaaaagaaatagagggtacaacccaagagcttgagacccaagtttctagtatatatgctaaaaacataaaagaagatcattgaaggtaatgggtttttcaataaatgatatgggcctattgtaacgaaaaccctaatttctatatacacttatatatacgctttctttcttcctcaagcgatcagatcagcaataacaagaaagacaatgatgatctccgatcttccgaacgatttggaatctgaaatactatctagggttccaaccaaggctctagcaaaattgcaaactacttgcaaacgatggtatgctttattcagagatccaaacttcatcaagaagaactttggtaacgcaccaa

SEQ ID NO: 179580 - DNA, 1450 bp, Arabidopsis thaliana landsberg
atgtcggcggcggagaaggtaatcattgatctctgtagttcggaagaggaggaagaagatgttttcggtgatgagaataactatgacgaaacggaagaggaagaagacgaagatacgaattcaaggtcggttccattgcttataatatcatctctcaatctttttttttttggggttatttcatcaattttgagtttttatttgaatcagtgaggatgatagcgattggagccacgacgatgatgatgctacagagtcagatgttgaagctgacgagatcggagtaaaaggcgataacgatgatggtgatgaagatgacaaagtcactcgcctcctcacaggttttgtcatcccctctttcttaaaacctttggttgactctcatgaatacttgtgagattttgaacactcgctttattgtatgtagccggaagcgatttgaaatctgtaaatgtgaaagagtgcaaagcatatctgagaaagcatggtctaagattatctggcaccaaaccagtttgcattgacagaattcttgagcattggaggtattattgacttctggctttcctgtatatagatctctctgtgtcttcttatgattgggaattcaaagtatactttttaatcttctttacaggattaaagatggaactggagaagcagtgtatccaagatcatcctttgctatcaattgtaaaggtaatattactaaaagtttttgatatgctaagttttgtttggcagagtttgatagtcttataaattggtgcaggtgatgtctgcaaaggagacattgttttgtttacacagaaggttcaccacaagtaataacttctctataataaactcatgctttttacttctcctatcactttttttttttttttgtgtttccctaaatcaatgatcttggggttgaataggtatgaaaagatgaaaaagagtggaaatattatggggagaagaactgtcgctggccaggttgttaaagaaagctatggtactgctaaacaacaacacacgttcactgtaagtctcacctctaatgtttgttgatcatctttatattctctgatcttgttgcctggtttcttctaacttccagtctgattaactaactatctggttttgtgtctttaccatagattgaagtgctctggtgtgaggggacacagaaattgccacctttgtatccattactagtcaaaggacgaaatctttataggttaatgaccttgaggcaggtgggttttcttttctattttttcatattcagtcatgagtcttgccggtttgcatatgcttatcagttggttgctccatttcttattccagcgatggccaaatgaagaagacagagtcaaagttcttaacgaaaagcataaccgtggtgccgcagcaagaaaggttatgagagaaaggaaaattaagtcaggctatgtactaaaag

SEQ ID NO: 179581 - DNA, 236 bp, Arabidopsis thaliana landsberg
ttgattccccggtggtccgcaccagcagccctctagcgccagagttttcctcacaggtttatcctctatccaaacccgttgattcatcggtacagacatcaagtgaagctactcttaatactacttcaagagatgctttcatctataataccgatgtcgatgacgacaacgatatagctcatgctcaaatttacaaatctcagcctccagctcccacattaccgtctcagtattaa

SEQ ID NO: 179582 - DNA, 136 bp, Arabidopsis thaliana landsberg
gaagacttcagggcttctcaaagacttggtagaaaacgagaattcccttgacagcaataagagtgtcaatcaacacaagtgtggtgtcgatcgacaccagcttctgaaaaacgtccttcaagatcttcgttgctga

SEQ ID NO: 179583 - DNA, 2937 bp, Arabidopsis thaliana landsberg
atggatcagactccacggcggaatgttcgtcggaaattggttcagtcgtctttgctcccccataaaccggaggatgtaattgactctaatggagatccgatgtgcgatgaaggaggagaagtaggagatggtggtagtcaagggaagaagacgagaaaacagaaagagagaactccgaagaacggagctaccaagaaggtttgtgttcgtctataaattacggtggggaactactttggagaagattttgtaagagtgatctctctatttttttttctctgatttaggtggctaaaggaaagagtcctcgaaaaacaactcctaagaaaagtgcaactaaaaacggaattgtagctgctggtgatcagatgattgctgccaatgtttcacctccagttgggaattggcgcctggaagctaagttaagagctgaggtaagttaattaagcatgttttggcaaaacttggtgtgacttttttttgtctcatctaaaattgtttttttttgctttctatttgatcaggaagattcgcggatgtctgctgggaagcaaatacatccgtttttctcgacttggaaaggaggtaaaagaaatcaagaagctgttgcagcagagaatggtacgtgtcttggtcgagggagagataaaatcgtcaccattggccctatccatgtatttgacaagtttcaggtatgactaatacatatagggtaacttcttcgatcgtttgtaataataaaggaatctgaatagcaaaatcttcttcttaggatgattatccaaccacccttgattggaagaactggactttctatgagcaaacatctactactgagagtcctgatcaacaaataaaatttaactctcttgaacctcggcccaaggagtttgatttaaatgaattgccatctctttcacatcctgacgtgtgtgtcatcgatgatgaggagcctgaacaatgcactagtcaatcagaaggtattgcagaggcatcttcggtagtcttaatagaagaccaggaggagaaacgtgggtgcctcggcttcttagatggagcagaatcggtgatgacctaaaactttctcttttggtctttattttttggtttgttggaaccattcataataaagggttattgtctatcattctttttaggattgtgaagttcatgaagcaattaacttgtctgatgatgctggtggtgcagccaatatttctcatgaaatgcaacacctgtcatgtcgagaaaggtagtgattttgtaattgatatcagtagcagcacacatgttttaagttgagcatactttttgttctttctagaatgcttgatctataatttctaatctatgcagtaatgactccagtggccaaccttgtaatcgattatgggtagataagtaccagccaagaagtgcctcggaggtcagacaatttgagcatactgctttcaaagtagatatgcctgtttatatcttcttaccaaacacaaatttctcacactttcttacccacgtatcttgcaggtatgtggtaatactgaatctgtaaaggtaatgaatgaatggctgcgccaatggtatgagagagggtttcagccaaacaaagactttttgagtagtgatgaagataaatcgcaagatgctgattacaactgttctgaaagtgactctgactcagaaaaaagtggtgctgaagatagccagaagaatgttctcttaattgttggtccagctggggtgtgtgattagatattctgccatgaactgtcagtttttacgtctacaatgctttctgagtttcatgtttatgagtacaattgtgcctgtgttgcagagtgggaaatctgcagccattcatgcatgcgccaaggaacaaggatttaaaatcctagaggtatgaactgtttccgctatatgtatctaaaagacctagcttcctcttctggcatggaaacgtttactttcaaaatagcttatgtctctaatgatttttgtctacagtccaatacatcagaatgccgaagtggaacagtagttaggcagaaatttggggaggctctcaagtcatatagcctgtcaaggtacatagaattgcaacaataatgcttggatttgttattttctccatttcagtcggtactatcaaacttgaaaatagcgtttgtattcacataatttgttttttcaggtccttggaccctcttttcaattcctgtactgatggcaatggggtagaggatgtagttgaagtgatgcccgtattacatatccagaatgatggagctaacttgaagcctttaattcttttcgaagatgtagatatttgctttgctgaagatcgtggtctcgtttctgctatccagcagattgctgtgaaagcaaaagggcctgtggtattgactgccaatggtacttttcgtccatgctaaaaacattatttttatttcatttgcagttcaccttaattaatctgctgatggcatctgtatcacatgcatatttacagacaagaatcatgggttaccagacaacttagagaggatagaaatatacttttcattgccatcaaaagaagaactgtttaaccacctttctctggttagtattctgatgcgtaacctttaaatttcaatggattcttttaacattttttgtttcacaggtttgtgcagcagaggaagttaaagttaatcatggttcactagaggaaatgaccacgttttgtggtggagatatacggaaagcaattatgcaattgcagttttggtttcagagtaaaccgaaaagaggtattttggatgtaaattgctacgtacgagaaaaaaaaattagtgaatgactaggtgtgaatattttcagttttatgaaggtttagacatttgatttattcatggtttaatttcccatacacagccagaaaggtgaagaatacag

SEQ ID NO: 179584 - DNA, 81 bp, Arabidopsis thaliana landsberg
atattagaaattggattaaacacttccatcgtcatattgtttgaaagcaacttgataatgatcacagacaaggatgattaa

SEQ ID NO: 179585 - DNA, 153 bp, Arabidopsis thaliana landsberg
aatcgaacaaagaatcaaacgaaacatagacatgaattagatcataaagaagaagctgaaacacgcaaaggggcactgagagaaatgaagaacctacctttaggaagaggcaaatcgtttggcgacgacgacaccgttacaatctgtctctag

SEQ ID NO: 179586 - DNA, 195 bp, Arabidopsis thaliana landsberg
atgaaagacatcgccaaagatcctaatacaagaataaaagttgacttcactgaacttggagaaccctgtggactaggttcagttaagttatcatcttacataggttctttggctagggaacatgttcctattataattgaagattggaggaagattggcgaagagcgcaagactgttctatggaaatctgttcag

SEQ ID NO: 179587 - DNA, 331 bp, Arabidopsis thaliana landsberg
atgaccgatttcccaactgcccctattattccatttaattacacgggtacgccaccaaacaacacaatggtctcaagagggaccaaagttgtggtcttgaagtacaacacaactgttgaattggtgttacagggcactagcatcttgggtattgaggcccaccctatacatcttcatggcttcaacttttatgtggtgggtcaaggctttggcaattttaacccggcccgtgacccaaaacattataacctagtcgatccggtcgaacgaaacaccatcaatatcccttccggtggatgggtcgccatccgcttccttgccgataatcccg

SEQ ID NO: 179588 - DNA, 781 bp, Arabidopsis thaliana landsberg
atgaaattcactgttgtggacactagtttggctactggaggaaagttgtgtgatttacggaatctgaatgcagagtgtctagtagtttctgagccaaacgttcgtctagaagttaaagattctcctgtgcttcaaaattctctggacagtcagaatgtggaaaagtcgcaagtgaggcctctggatgccaagaaccaagtggatgacccaatgcgattcacgattattgatacgagtgtagaccactgcgaaaaatcatctgggtttaggagatggagatatttaccaagtgatgaaacaaaaaggggtcatgtaggggctgattctggtataaaggaagagaagactttggagaaggttaaggatccatcaaagagggttattaagcatcggtctacccctcgagcagaaactaattatcatgctgtaaattctgcaccatatttgaaacgcagacggctcagtgcttgcatttccagagaaagtccagtgtccaaacatataccaggtgatgatgacacaaaaatgactgtttgtcttgaatcagagcagcaaagtatatgtgtggtccaacaacaaactagcacttgtgaagagatgaatcaggataaagagtctgtgccgttggttgagcatatgaaattaaagtctgatcaatcaaaaaagactggaactgggccatcatctttgcttgttgagattcaagaaacgacagagattgaaccaagcgggttaaattccaacactggtgtagacaagaactgttctccagagaaaataa

SEQ ID NO: 179589 - DNA, 606 bp, Arabidopsis thaliana landsberg
atgcagaaaatagaaaatcaaacagaaacagtaaaacactcgaccaacacagctctttgcagagcactgggtgaggtcgagtaacagacagaaaatgaaacagggatactcgactgcacagtctgttgccagacaactgggtggtcgagtaccaggtcgagtaacagtaaagaattgcagaaactaagcaacagatgacaggatgcagtaaacatcagtagagtaaacaataaaatcaatcagacaaagaattcctaaggatggggtaattgagtaatttcgtttcctcagtttacaggtgattgacatgctcaataaattaaccctagacaacaagttcatcaaccaaatctaagtgccaccgcaacagagactctcaagttaacctagtctcagactcaatcaccattgacgagagctaacctaacaggcattacgaatcaacaagttaaagccaaaacgctccctgcaaccaataccttggtacagggtcacgaatctctggaattagtggttcagacatttcagcgaacaccttttgggcgtggaaatgtctgggctcaaattccagttgatcagaaagctataggcattaagaacaactaa

SEQ ID NO: 179590 - DNA, 443 bp, Arabidopsis thaliana landsberg
atggctcgttctactcaagctagtcaaggtgtcgatccttcacggatcacagatctggatgagaaatttacccagactggtggagaggttggagacctccattcgcgcactacaagagagtcaagacgaagatcgtaagtggatgcatgagatgattgaagggtggggtcgagaaaaacaaatgggtaaagctgtttctgagagtccaatctcttcgtcacagactcagagtaacaacacacaggacagttgtgtcacgccaactgctccgatcaaggccaaaggtgacggaatcttacccttacctccgttggcgttatcgacccagcaaatggagacatcccagggttcatacagttttcatcagcagtccgttcagcagggatctccaagcaacaccttgggctcatcagggcgacgacttgagcctctgttgtttgaag

SEQ ID NO: 179591 - DNA, 141 bp, Arabidopsis thaliana landsberg
gactctgtttcgactgtgtataggaagagagtaatgacttgtgactgtacagagttggagaaggatttcgagaaaaaattggcattcttgaattcgactcagcttgagaatagagagtccatggacttttaccggatatga

SEQ ID NO: 179592 - DNA, 701 bp, Arabidopsis thaliana landsberg
atgaaaacggaaaaagttatggagagagagatcgagacaacgccaatagagccacttagcccaatgtcacatatgctaagttcgccaaatttcttcattgtcataacttttgggtttaaaactcgatgcaaccgatcggcctttgttgatggcatcaacaacacattgatcaatgctcccagattctccagtaaaatggtaaaaatatttattctacacgtatgcatgcatattatattatatgtagacgcataaaaacaagtatacgtaaatctactcgtatgtgtttttcttcttcttataatatcaaagaattcacaagttcattcttcagtatatattcttacaacttgtgtttttttattatatcaaagaatttaaattccctctctatttctatgtatgcaacacacatagatttgttctaagttatgtcttagggatcatattttttgttttgtttttggttccaggagataaaatataagaaaaaaggagagccggtctggattcctgccaaactccgagtagatgatcatattattgtgccggatcttgactattccaacatccaaaatcctgatcagttcatagaagactatacttcaaacatagctaatattccaatggacatgtccagacctctatgggaatttcatttactcaccatgcagacatcaaaagcagaagctttggctata

SEQ ID NO: 179593 - DNA, 111 bp, Arabidopsis thaliana landsberg
ccaatcagagcgctccggacttcgcccactcgcaccaacctcgcgccacgcgtcgattccatgcccactcgcaccaacctcgcgttgagcgcgtgtcgtcgatttctgtag

SEQ ID NO: 179594 - DNA, 95 bp, Arabidopsis thaliana landsberg
gtttaccgattgatgacgcatcgaggaagaagatggatttgacagcagaggagttgaaggaagagaaggacctcgcttactcatgcctctcttaa

SEQ ID NO: 179595 - DNA, 563 bp, Arabidopsis thaliana landsberg
atgatctttgaagttccgaacaataaggaaagaaaatatcttcaacttcatgctggatctaggattgtatctcgatcttcaaaatccaaggacggatcctttcaagaaggctgtggatcgaattctgggtggcaattcaatatttctaatgacaaattctatatgaatgggaaaagcgctcagaaactgcaaggaaatgctaagaaatctaccgtacacagtttgagagttttccattcggcaccagcgattaaattgcagacgatgaagatcgaattgagcaagtaagtgagtcatttgaatttttacatcttattgtatttgtacgcttcattgttacattcgtgtgtggtctcaatgttgccactggatatattttttaaatacatttttttagtggtttatgttaaaaagttttgatttaactcattgcagtaaagagagagcaaattttcaccggcccaaagctctgtggtatccacatgacaatgagctagccataaagcagcaaaaaattttacccacccaaggttccatgacaattgttgttaagagtctggggg

SEQ ID NO: 179596 - DNA, 549 bp, Arabidopsis thaliana landsberg
ttcatattttcaaccgccatagatgggaaaataaaagcctggctttatgataatctgggttccagagttgactatgatgctcccggtaaatggtgtacgaggatgctttacagtgctgatggtactaggtatgatcttaaactcataaacatttcaatcatctataccgcttgttcttcactcctcaatttccaaaatcttcagattcttttgttactccggaggatactgagttggagccttgatttactaatcttatcgttctgtactaagtttaccttttcagtgctttctgatgttttttcccccttcagattgttctcttgtggaacgagtaaagatggagattctttcctagttgagtggaatgaaagtgaaggatcaattaaaaggacgtataaagagtttcagaaaaagttggcaggtgtggttcagttcgatacctcaaaaaaccattttctggctgttggtgaagatggacaaatcaaattttgggatatgaacaacattaatgttctgactagcactgatgctgagggtggacttccg

SEQ ID NO: 179597 - DNA, 626 bp, Arabidopsis thaliana landsberg
  unsure (1)..(626): unsure at all n locations
agccccagattcatgaagatccagtggagaaccgtgaggaagatgatgaagaagaagatgatcagtatgagtttgacgatgggtttttagtgaatggttctgatgatggagaagaagaagaagagcagagacattgtagtgagaaaaagagtagaagtcgaaggaagaaagacgaatcctttactcttcacgaagatgattatctacttcttaaagataacaacgacaatttccaaagaaacaagtataaacgtttgaagaaatcttcagaggaagaggataagatcaataatgatgatgatgatgatggtttgagtcacttcattgtagatgannnnnnnnnnnnnnnnnaaggaatgaggaggaagaaaatgaaatataagcaaggaactgattcgaacgctttacgatacgctaatgatgtatttggtgatcctgaagaattgttgaaacttcggaaaaaggatttgatgtataacgaaaagatcgaaagaaagttagaagatgagtttgaaccaatggttctcactgagaagtatatgacggagaaagatgatgaaattaggaagctcgatgtttctgagagaatgcagatatttgaagaagccattggaactgtttcctag

SEQ ID NO: 179598 - DNA, 276 bp, Arabidopsis thaliana landsberg
atggaggatatagatccctttcgcaagatcagaagcgaagcagactatgcctatgccacaccagagacagtccttgaaggtaaccagtgagtcttaaacttcccatcttttctctatagctcaggatcaggtgctttaactcaatctacaacgaagaacaatctggacagctggaataaatctcaagaagctgtgagagactcagagtggatattgcaggagcgagcacatcactaccgggtcaagtttaaacccctgaaagagagaaagacctga

SEQ ID NO: 179599 - DNA, 200 bp, Arabidopsis thaliana landsberg
taactttagagcgtctcttaggaggaccaccaaacacgtcaccaaaatcgatgtccacgtcatcgccaccgggactacgcaacacaggtggtgctgagttggagcctaaaagaacggtttctgagcttggtaatgtctgcatagcacaaagacacagaatttgcaattgctccggagagggagatacatacagaggctga

SEQ ID NO: 179600 - DNA, 434 bp, Arabidopsis thaliana landsberg
atgaatttaatcaagaaggtaagagctttgttcgtaagccaaaacattaccattgtaatacttgcaaatttccagtgtatcatcttgtagttagtatgattattgtttttgctttctccagactcatataccagtgactaggaaaccagcatataggtggttagggtccaaaagcatagctgaaagaggattaaggttatttaattccggagatccgaagcgggtagttggaacagagatcacaaacttgagggcaaagagtaacacaacatattgttcgtcaatccgcaagcagattggatataagaaacatggcgaggtaaacggagagcaggaatcgaaaccagctgcaagtaaatatgtgtttggcccgttctccccaataggagcatgtaagacgatcattgtcaaagtcggaaaaggaagattattag

SEQ ID NO: 179601 - DNA, 126 bp, Arabidopsis thaliana landsberg
gaccacactgttgcgatgatgacgaagctggtcgacgccggcgtcggcttctacgcttgcgccaacacaatgaaggcgcagggtgtcaagctgaacgatctcacgcccggctttgtgtcggcctag

SEQ ID NO: 179602 - DNA, 424 bp, Arabidopsis thaliana landsberg
atggtcatgatgggcgtgatcgtggggcatggcggtctccaggcgccaatgtacgcggcggccacggtgttatgtaatgacgtcgggggcttgccagcacccgtcggacgcgtgcaagaatgtccaccggacatcagagattcccgggggaggtacggcgtgacgccagcaaggtggcgcaatcggggcgttgtgcgttggcagttgctgttgctgctgctggcggtcgtcgtcagcgtggccgggccgtactatttcacgcggcgcaccaccaacagtgcgctcaaggccagtcaatgggtcgcgcacagtgccgaagtgcgggtcacggtctacaagctgctgtttcgcctgcgcgacggagaggcggccacttattcggtgttgcagggcgtgcgcagccccgacctcaagcagcgcattc

SEQ ID NO: 179603 - DNA, 98 bp, Arabidopsis thaliana landsberg
tgttcatcctaatacgactccacatctatacattgtggtcttcaacccgaaggcaggtaattggagcatcgttccaactgtgttccactcaacagcag

SEQ ID NO: 179604 - DNA, 94 bp, Arabidopsis thaliana landsberg
atgcttgctgcacaagctggtaaaacaagtatcgttcggtgcttagttgcagctggtgctgacgtaaataaacccaataaacatgacgatactg

SEQ ID NO: 179605 - DNA, 488 bp, Arabidopsis thaliana landsberg
atgtcgaaaacacgcagaacggattattcttctcgtcgaaatgttacaggtatcatgatctgaatcgatatttgcttattgatagctttctgatcaaaagcatcttaaaagcgatagcgctattatgagttgataaagtaacaaaatcatttcctggctgaaacatttgcggctttttttctttttctaaaatcaggattcaggttttccttgcttcaaaggtggtccacgcaccattcagaatctaagaaaaaggttccatttaagtttaaccgaagaggtaaattacttgactccccttttattctaccaacttcagcaccgttctaaggatttatctttccaatcataactgtttccttttgccataaccagcaatgcgtctctttggtgctctctctaatcagcagcagcttagatgcttggcgaactcgacaatacgattactaccaaagggtgttgaatggaatacgatgatgttaatttaa

SEQ ID NO: 179606 - DNA, 550 bp, Arabidopsis thaliana landsberg
atgcaccgtatgctacaagaaatgggcagaaaaattgttcgcacacagtccattgacaagcctgggaaacgagaatttctggtggatccaaatgatatttctgatgtactcagtgaaggcattgtaagttctcttttaatatgtggtccttaatttcataacacagtatgtgaggttaagagaatgtcatccgataaatgatgaattgtatggttttgtctctttctcattaatatcatatttttttcagggtactcaaaaggttttaggtatatctttaaatacaggtgaaattgatgagttgtatgtacatgagagtgctttcaaagggatgcgtaatctccgtttcttagaaattgattcgaagaactttggaaaagcaggtagattgtacttacccgaaagtttggactatttgccccctagactcaaactattgtgttggcccaattttcctatgagatgtatgccttctaattttcgtcctgaaaaccttgtgacgctcaaaatgccgaatagcaagttacataagctgtgggaaggagttgcg

SEQ ID NO: 179607 - DNA, 520 bp, Arabidopsis thaliana landsberg
atgctcagcgttacggtcacggacaacggaacggggatcccggccgatgtctctcgcagcggcctgcgtaatctcgccgtccgcgccgagaaactcggcggtcagctgctgatcgagccggccagcccgaacgcggcgccaccgggaacccggctggagtggcgggtgcccgccgccggcgccgacagcggtgctggcgccggcacgctcgcctagcgctcgcctagacacgcagtcccaggtcatgacccgccagtcgcagttgttcacgaaccgacgggtgtgccacgttttcaatgatgccggccgcctggccggaagtgtcctggccccagaccggcgccgtgccctggtcgctgacgatgtagctgtgctggaacgacgtcaccggcccgtccagccacggcactaccgtggacacgtcggccttcgggtgccaggacggcagcgcgatgatcgcctggccgccgggggagtgcaacgcgccgaccacaaagtcggtctgcccgccgaaccctga

SEQ ID NO: 179608 - DNA, 166 bp, Arabidopsis thaliana landsberg
atgaaacgagaatttcaagagccgcgatcggcgacgatcgtgcgttttacgaaccggatgtttgacgagaccggcgtgcggccgaaggtgttcgcggcgccgctcgtcgaggagtatcacgggcgcgtgcgatcggaagaacgcagcgtgtcattccacgtcgacg

SEQ ID NO: 179609 - DNA, 77 bp, Arabidopsis thaliana landsberg
atgggtgaaagacccaaggcacaaactaagaagctgcagaaaaacccaaaccttaacagcgactcaatcagtaacgt

SEQ ID NO: 179610 - DNA, 207 bp, Arabidopsis thaliana landsberg
caaccccctcctcctccaccaccatcaccactgcaaccgccaaaaacgccacctttacagcagcaacagcaacttgaatccttcttcttttccttctttttggagcaagcaaatacggccatggttacaagttacaacgacagaagaaacatgaaaatcaagaacaaaacacccccaaaagcagcagcttctttcatgtcaaactaa

SEQ ID NO: 179611 - DNA, 578 bp, Arabidopsis thaliana landsberg
aaacagcagtaacattgcatctattggccgcatcgcaatccagtctttttgctctcccctgtgtgagtattctgaaaaggtaattaggagagttttctggaacttttagcctatatcaagtcaacaatgctttctaacgaaaattctcttgactctatagttaatgatagctgaagcttgtaccagtatcacgtcgttatgtattatcatgttaattttttgacattttgtttctatcaacacaggaatcagacatgctctcattcataagattgctgaaaagtatgcttatggtttcaaatgcggtagccattgttactttcccgccttccctgctctccccatcttcctctaaaagactgcagcatatggcagataccttgctctctatcaaagcaatcccaggtttgctttccctgattttcttattcataaatagattatcatagttgtttcttgacaagcatccttgccttttttttccagatggtgacaaggaattggagaaactcctcactggctacaaggttataaatggattcctcaacatacacaaggttgctcgtatcaacacacag

SEQ ID NO: 179612 - DNA, 79 bp, Arabidopsis thaliana landsberg
atggaaaagggttccagtgaccgatacttccaggataacaacggcaacgccgacaagttggtgccggaaggcatcgaag

SEQ ID NO: 179613 - DNA, 382 bp, Arabidopsis thaliana landsberg
atgcttcgaaatgagtggaaaaacaccatcgaagaggtccgacgatacgtttttgccacagatacaacgcaaactaccaattctaagcttccttggaagaataaaacaactattcctaagctttgtcacattcgtgataacctttacgccaattacacttctgttctctttccgcaaagaaaatggttaatttgggaagctgatgatgcttcttcggcagaaagccagaaaagagacgccattatcaattatatggcttgggctatcgaacaaccttcatttaagaaggaaattgataaggttattctagattatatcgactttggtaactggtttgctactggtgattgggctgatgaacgtatcgtacagcctgatggac

SEQ ID NO: 179614 - DNA, 106 bp, Arabidopsis thaliana landsberg
ggggttcttcaccatcgacgaaaatgctttaggccttgaaaaaacacgacccgaagatcatatccgaaaaatactcgatagaaacccattcgagtcttttgtatag

SEQ ID NO: 179615 - DNA, 183 bp, Arabidopsis thaliana landsberg
gcgcattcccacaatgattatgaacgggcacgcccgtttgaggatgcctatgaacagcagtcttgtgcggtggaagccgatatttttctggacaacgaatctctttttgtagcccataacctggaagatatccagcccaaccggacttttagcgcattatacctgctttccatgcttcaaaaa

SEQ ID NO: 179616 - DNA, 630 bp, Arabidopsis thaliana landsberg
ccgagggcgcgagcacctcgggacgctgatcaactagctgccccatctgcactatcgcctccccacaagtccgcgcttcttaatcagctgcagaataataagcagagcatgctttctcctatcaagacaaatctaatgtcttctccaaagaatgtggagcaacattctcttctgcagcaagcctcgtcaccccgaggcggagagcctatttccccaatgaatgctcgaatgaaacagcagctacattcacgcagcctaagctcccgtgattttggatctagtctgccccgtgatttaatgccgactgattctggttcgccattaagtccatggtcaagttgggaccagacccatggaagcaaggtggattggtcagtccaatcagatgagttaggtcggttgagaaaatctcattccttggctaataacccaaacagggaagcagatgtttcatgggctcagcagatgttaaaagactcttcatcacctaggaacggaaaccgtgttgtgaacatgaatggtgcaaggccattgactcaaggtggttcgagtgtgaatcctcacaacagtgacactcgtgagagcgacattcttgatgcgtggcttgaacagctgcacctagatcgctga

SEQ ID NO: 179617 - DNA, 290 bp, Arabidopsis thaliana landsberg
ctaatctacgacacaataaaaagcggcaatcctggaactgttgggtttgagaattgcttagagttcttccctgcagaaatgttctctgggaggtaggcttctattgcatgtttgcatgttgtcactagttgggatctaaatggaactatcctttcagatctggagcatggacagggggtgatggtgcctgggtcgagctctctgggaaaatgcatgttctctccagacttttggccaacctacgtcgaaaaactgatgaccgcatagtccttgtatcaaactacacacag

SEQ ID NO: 179618 - DNA, 474 bp, Arabidopsis thaliana landsberg
tcaaaatagcaagagccttgccggcggcattgccgagatcggcgtgttctacgggcgctcatattacctcttccgtaaaatctgcggtccggagcagaaggtcgtggcgatcgatcccttcgatctcggccagaccgatgacggcgcctcgccgcaatatggccgtttcctagagaatggccggcgtctcggacttgctgtcgatgaggagctggtcatcaagggcgatagcacgcggctttcagccgatgagatcagggccaaggcgagcgaaatccgattcttcagcatcgatggcgggcatatgctgccgcatgtcgtggccgacagccagctggcgaaagattgcctggcgccgcatggcgtgatcgcgttcgacgacaccttcaatccggcgtggccggaggtcacagtcaaggtcgaaaacttcctgcgcgagaatggcgcggagttctcggccttctgcatgaccaa

SEQ ID NO: 179619 - DNA, 452 bp, Arabidopsis thaliana landsberg
atgattgccaagctcattgtgcgaggcgatacacgagaacgcgccatcgctaagatggagagtgttctgcgtgcttacgagattgtcggtgttgctacaaacatcgagtttctcaagcgactctgccagactgacgcctttgttgccggtgacgtcgagacaggtttcatcgacaagtggcgagacgagctctttaagcctagacacatcaagaacgaagtattcgcccaagcagccctgggcatggtcaactttgagcttcgaaactctgtgccccatggccagacgctgggctttggcgaggccaacaccattggtgaacggaaacttgccttcaagatcctggacggatacagccaggaagaaggcgaggttgtagaggccagtgtgacacagacgggccacaaccttttcaacgtgtcgtttctcgcaagggcgaagagacacctcag

SEQ ID NO: 179620 - DNA, 222 bp, Arabidopsis thaliana landsberg
atgattgaagatactagggctatggttggtggtgttggtgtggcgatttgtgattcgactgataatttgatttgggaagtgaagaaggttttgggagctgaagagtgtaaaagccctgaaattgcggaattggaagcgattgttcatgggttagatgaagctttgacctttgatttgggaagagttacgtttttcgttgatcatttcaaggtcttccaatac

SEQ ID NO: 179621 - DNA, 402 bp, Arabidopsis thaliana landsberg
atgaactctgctatatctgacgtaagtattccaaattaatgatttcaatcaatcatgttttgtttgagtcttcatttttttcttgttttgatgtagttgatcaagaaacaccaggaccctaaaagccgacctaaaagagagttaggctctgctgataaaccctttgcgggaatgatgatctctctcatgggacgtctcacgagaacacatgtaatatgccctgactttgtaatgatctttattgcgattccttgctttagactctcttaagaatggctttcctctctttgttattgcagcaatattggaagaaaaagatcgagagaaacggtgggaaagtcttcaatactgttcaaggtgtaacatgtttggtggttttcgccgctgaaagacaacgaggtg

SEQ ID NO: 179622 - DNA, 213 bp, Arabidopsis thaliana landsberg
gtagcagcaatatcagaacaggcttctgcgacttcaggagactctccagaagataaaacgttgaagaaatcatcggaactgaaatcattcgacatgcattcagtagtttccgcaacagaagatctgctactgttcatattatccgagaaagggcagagagttcgggtcttccttcttcaagccataatcagagtggttgatattttcatggaa

SEQ ID NO: 179623 - DNA, 414 bp, Arabidopsis thaliana landsberg
gcgctgcaggtcgcggaggtcgatatcctcgccgccctggccatgctggacgcacgccatatcgccggcgatgatcggctgtcggcaggcctgatcgccggcattcgacagcaatggcgccaggggatcggcgcccgctacggcgagcttgtcgacgtgacacacgcccggtggcagcgcagtggggccatagccggcagcgccgaacccgatctgaaaggtggccgcggcggcttacgcgatgttcaattgctcggtgcgctggcggtggcacatgcgtccggcagctcgaggccgcatatcggcgggggtgccttgcgcgttgcctaccgcacggtgctcgacgtccgcaccgagctgcaccgggcctgccgacgcgcccaggatctgctgtcggcccagtacgccgaaaag

SEQ ID NO: 179624 - DNA, 385 bp, Arabidopsis thaliana landsberg
atgggctaccaaatgacggccggcagatttttcgaatttccggaggatgatactacagccatcatcgtcaatgaaactgctgcaaaaaaacttggactcaagaactacgaagaacacaccctgctttcgatttacgatcgtccggaaggaagaaaaagaaaggtcatcggaattataaaagattttcattttcagtcactgaaagaaccgatacaaccgcttgccatcattcccggatttgagcctaattgggagatggcgatacgcgtgaaagggaatgtagatgatgaaatcaaggacattgaaaatatatttaaaaaaatggcgccagacgctccatttgaatacagcgtactgcaaaacaacttcagtgaaaaacacgcgg

SEQ ID NO: 179625 - DNA, 137 bp, Arabidopsis thaliana landsberg
gtttctttgaagatgccattagggtttctggatctcctaaacatccaacgattagtgatctccatgaaactttcttcttcaccgccattgttgttgattttgtgtttcttttcttcttcttggttggtttgcaatga

SEQ ID NO: 179626 - DNA, 194 bp, Arabidopsis thaliana landsberg
aattatcattattgattacggagcagatgcgtcgactaagacctatcgtcgcagactaatgcagataaagtctctcgcaaactcgccggccaaacgaggatcggccgcctgccccagccagcggccaagggaggtgaaaacgaactggagcctcgccgacgctgattcgctgccgcttatccctggctcctgtg

SEQ ID NO: 179627 - DNA, 213 bp, Arabidopsis thaliana landsberg
ggatgggaggacgaggccctcaccaaccccgtctacgacgccgccacccgcgtgctgtcgcacttcccccacggccggggcctgggcgactgcggcctgatccagtcgtggacctggacggagcgaggcttccagccgcgcgagacgcgggcgatggacgaatgctggggcatgccgccggatctctggccgaccacctggcgcagccggtga

SEQ ID NO: 179628 - DNA, 401 bp, Arabidopsis thaliana landsberg
gtgagcgcatggcggaaacaaagcgtcaggagagtatcatgcaagttcacacgctacatccagcactatcgacccgcttgatagtggccgacatcaattccgagctgcgcgctgcagcactgcttctatccaatccccgcatcggcctggtggtcgtttgcgagagcgatgggcaggcggcaggcgtgctcagcaaatccgacctggtccgtcatctcgccacttccacgacgaacgatgcagtcgtggcatcgctgatgagccagccgatcgtgttctgcggtcccgacgaggatcttcattccgtctgggagctgatggccgcacgcaacctgcagaacattcccgtcttgggtcccgattcaggccgatcggcgtgctcgatatacgcgatgcgatga

SEQ ID NO: 179629 - DNA, 145 bp, Arabidopsis thaliana landsberg
cgtcgtggacaaaccttacgattgttccgcagaagcagaatttctatatgctcttattgtgaaagctaaatttgagaacaatcggtatcagaagccaaagaagaaacaacctgaatcttcaggaaaacatgtagactggttctga

SEQ ID NO: 179630 - DNA, 420 bp, Arabidopsis thaliana landsberg
atgatgccgattgcgccaaaaattcctccaaatacgatcacaatctggaaaactgccagccccaactgtgtccaggtaatgctccgtccactgctcaaggaatcaattggcgaaaaatcctgcaccatgttcactcctttcaggatcactttgaaaaccgggataaaaacaacatccagccaaggcgcaaccgattgaccggtcaccgtgctttttccggcaaccgttccgtcatctatgacccctttcaaagtccccgcggacaaaccaacaatcaatgccgtcacggcaaaaaacgtcgccacggggaaggaaagaaaactggcggcgcacaaaccaatggcggccatcaaggacaaccagcaaaggataatgccgaggccacgagcgaaattcacagcgaaaccgccttcgcgataa

SEQ ID NO: 179631 - DNA, 444 bp, Arabidopsis thaliana landsberg
atggcccctccacgagcactcgttccgcttactcacagtacacgcccgtaccgagaactctccgaccatcgtacgcggacaatgatcattatatattcttctaaaaaatgactaagtcacttaaatactccactaaaccttgttgtgtctgcatccaatcccattcgatcaccgcttgcttgtctcaacctaaaattactatttctcgataaaactagatttcttcgataaaaactaatcttgcgtctgaaacagtccagaaacgtccgttaactattcaatcgctccggtgaaatcctagctgcagacgtcacaaagctgcccaccaaatctcgtgccgatcggaaaacagacgagaccacgatctcagtttcaatcttcgctggtcctaattcgcgtctgagaaaatgtgtctcacgaaacttttatcacgatttgatatga

SEQ ID NO: 179632 - DNA, 91 bp, Arabidopsis thaliana landsberg
atggtcgtgcgtctgatcggcgtgaacgccgcggcggcaccgactgaggaagagaaggcggaatatcgccgctacatcgcgtcccgtgctg

SEQ ID NO: 179633 - DNA, 374 bp, Arabidopsis thaliana landsberg
atgagagtgttgtggctttggcgaatcggtgcattcacttgaggtcattgggcttatactactgcagaaacattacagacagagcaatgtactctttagctcagagcggagtcaagaacaaacacgagatgtggcgagcggtaaagaaaggaaaattcgatgaagaaggactaagaagccttaacattagtcaatgcacttacctaacaccttcagctgttcaagctgtctgtgatacattccctgctctccacacttgttcaggcagacattcacttgtcatgagcggttgtttgaatctacaatctgttcattgtgcttgtatccttcaagctcaccgcactcacaccgtttaccctcacccggcgcattga

SEQ ID NO: 179634 - DNA, 140 bp, Arabidopsis thaliana landsberg
ttacgggagcaaccagtatggaggagccaaacaaatatgaatcactaattttggccaccctgggatctgatttaaaatcactttgcagtggtcgcataaacgaaccgccattactcgttactttccaggctgtggcatag

SEQ ID NO: 179635 - DNA, 77 bp, Arabidopsis thaliana landsberg
catcgatctggaaggacatcggcctagagtacggcggtatgcttatggattaaaaaagcttatccgaattgggcaag

SEQ ID NO: 179636 - DNA, 105 bp, Arabidopsis thaliana landsberg
atggcgctgataccaggagaaggcccatttattgacatgggaccagtacgaattgtgactcttatgacggatgacaaaatgcgagttacaaaaagaagtcttgcg

SEQ ID NO: 179637 - DNA, 49 bp, Arabidopsis thaliana landsberg
gatttctccgacttcgtctcgctttcgcaacggcaaagttcgtcggcag

SEQ ID NO: 179638 - DNA, 1596 bp, Arabidopsis thaliana landsberg
  unsure (1)..(1596): unsure at all n locations
ctacagccgttattttggcaaattcaagagtaaaggtatcgaaatcgaacccttctctcggtacaatgcagccccaataaaaataactaatcaaacactattcggattcacaaacaccaacctaaacgctatagaatcaaaaaaatttgatgtgaaaaccctaaaactaggcgtcgtaatgtaagagatgatgtagctgaaacgttgaagcgatgtttatataagagagaacatcaggggtataaacgtcttttgctaaaccctctgtgaggacgcttctagggcaaaacgattagccaagaaccctctggcttaggcagagtctttctctttctcaaacaaaagcaattattgttaagtataattagattagcctataattatcacacacgtgtcaatagtcgaaaccttctagctcgacaagagtcttctacttgaaggaaaaaccaataaaattggtcgcttcgcaaaaactgagatctgagttcttccttcggtggaaagagcanattntacttttaagaaatttgaaaacaaagtttcattaaacagattggtgggattttaaatttgaattttgatcagtgaatcaacgataaacgattcgtcgttatggaaggagttggtgcacggttaggcaggtcctcgacacggtacggaccggcaacggttttcaccggtccggtgcggaagtggaagaagaagtgggtacacgtctctccatccactaagaaagacaataataatagcttctccggttccgccgctgctgcagcttccgtcgttaatggtggttcgaattctgacggcagtaatggatcgcatttgttgctgtataagtgggcaccattgtcccagaacggtaacgggaatgaagatggtaaaagtgagagtaattctccgagcgaggacacggtggcgacggtggcagaagatcctccgcggcggagattcaaatacgttccggttagtttttggtttttggttcaatgtcttgttgcattggagtgagctataaggtttttgctaggagtctgattagggttttaatcaccttattagcttgaaaaaaaggatccgttttgagcattgttgaaggagtaattggactggcttatgtctctgcttcgtcatttgtgattcttcggagtaattggactggattagtgtttttagtagctgtgatttggaaggatttgtaagatggaatcataaggtttatcactggttgaagtagatgatctttgtttaagaacctgtttgcagtatcattgaatcgtgttggattgtaaatttgggatttcaaactttgtatatctaatttagttttgattattagtgtatcatttgaagtgaggtgtgattaaaatggtgcagatagcagtacttgaggaacagaagaaggaaattacagaaattgaggacgatgataagattgaggaggatgacaagattgatgaggataataaggtcgagcaggaagacaaggttgatgaggacaaaactgtagaggagtcgagcgagaagaaagcggaagtggaagtggaagtggaggaaaagcctgatatcaatgatgttccaatggaagatattcag

SEQ ID NO: 179639 - DNA, 208 bp, Arabidopsis thaliana landsberg
ctatgtcatcaatggccggaagagctggacgagccgggtcgagcagtccgacttgctcctgcttctggctcgaacctcagcccgtgccgaggttgccaggcgaaccgacggtctgagcctgttcttgatcgacctgcgtgactaccgagacagtgaccagctcatcgtcgagccaaagcagacaatgctcaactacgccacctatcag

SEQ ID NO: 179640 - DNA, 676 bp, Arabidopsis thaliana landsberg
atgcttctcttgcaacaaccaccactggtttcatctcgatttcactctctctacttcctcactcaccaccaccaccaccaccaccaccggtttttccaaccaccaatctacgctttctctgcaacaacctctgcttctttaccttcaccatctccatcttcttcttcttcttacttctcctcatggaatggtttagatacaaatgaagaagaagaagacaatgaattctcctccgaggttcaccgtcgctacgacttctctccactcctaaaattcctctcaagattcggaccagtcgacttagttctagattcggaatcagaatcagaagcttcaccggaatcgcttaatcctgtagagttcgagctagtcgaatcatacagagcagtaccagcaccatactggcactcactgataaaatcgttaacctcatcaacatcatctcttggtttagcttacgctgtagtgtcatggctacaaaaacataacctctgtttctcctacgagcttctttactcgattctcatccacgcgcttggccgttcggagaagctttacgaggcgtttcttctctcccagaaacaaacgttaacaccattgacatacaatgccttgattggtgcttgtgctcggaacaacgatatcgaaaaagctcttaatttgatcgctaagatgc

SEQ ID NO: 179641 - DNA, 222 bp, Arabidopsis thaliana landsberg
atggaaaggtgagtttccataacatatttagacatacaattttaggaaacgcgttttcgtgagtttccatcatgtttctatgagtttttttttctaaacgttttggaaacgggaaacgtactgcgtagagaattttcatgcaacgtaagaccaatgtttctttctttccttcataggcactgcctggtcgtaacaactccaaaaataacacatcggatctga

SEQ ID NO: 179642 - DNA, 187 bp, Arabidopsis thaliana landsberg
ggactttgcgactacggtgtgaagaataaaaccgaaggaaagaaaaatatcgaggcgggtgtaaaaggcatcaagaacatccagagctttgacgaccttaccaaagaagaccagggcatcatgaaacttgctttaatggaatacaccaatttcctgatcgaatcaaaagatttctcgggagctaaaa

SEQ ID NO: 179643 - DNA, 56 bp, Arabidopsis thaliana landsberg
atggagagagagagaggagaagaagaagaagaagatgatggaggaaaaaagggagg

SEQ ID NO: 179644 - DNA, 52 bp, Arabidopsis thaliana landsberg
atgcctgaacccagcgttcataatagcggccacaaaacagaggtggaccgtg

SEQ ID NO: 179645 - DNA, 468 bp, Arabidopsis thaliana landsberg
cccgcggatctcgtcaccgcatcggcttttttcgatctggcctccgaggcgtacattcgcacccttgcaaagaccctctccgagcgcgcgatggcgttctatgccgccctcacctacaacggcctgcggcgctggacgccacatcgaccggcagacaaccagatggccgccgccttccaccgtcatcagatgtcggacaaaggtcttggaaccgcggccggccctttggccgctgcgcatcttggagaccagttccgccttaatggatatacggtcatggagggcgacagcagctggcgcctcgaacgcagcgaacggatgctgatcgaggaactcgtccgcggtcacgccgtcgccgtatccgaaatcggcagcgttgacgcaaagaccatcgtcgattgggtcaaggtccagcgaaccggcgtactcgtcggccacaccgatgtatttgcgacccccgcgacttga

SEQ ID NO: 179646 - DNA, 411 bp, Arabidopsis thaliana landsberg
atgctggttgcgcaatccgccggacaggcgttgccgaccgtagcgcaatgggaactgaccgtagccttgcctgcgcaggaaaaaggcacgcacatgtcgcgttttgtggcattgcttgagggctaccgggtcaagccaatgacacctttgctgttttgccagatggcgcaagacatgctgcccttgcttaacgcactagaaggcgacatttcggccagctttccttatttcctgaccaagaaggcgcccgtatcgggtgtggaaagccttttggactacgacatcgcctgggccgtgcatgtcgatgcgcagggtacccgctttcagttgtcgatacaggtaccgttgaccagcctttgtccctgctccaaggccatctccgagtacggcgcccacaaccagcgctcgcag

SEQ ID NO: 179647 - DNA, 450 bp, Arabidopsis thaliana landsberg
ggaggtagggccaattatggtcccagcgctggttaccacccgtctgaaaagagtacgcttcgcagtttaaagaagtctggtggtggcgctccgaaatctgatcctatcgctgaggctatgggacaacttttcggtttagcacaatccgcggacgctactccttctgtagcggggtattctgctgccgacattcagaagatgctttctggtgctggtgcggcaggttcttctatgactgcacagattcacactattcgtgacatgaatcaaggtgcacgaaatgatacggctaagggtacgaagcaagttaacgctatgtatcgtgctctcgctcagtctgacgctatggctggaaaccaggctgcaaacgctcaaaagaatcttgctcaacagatcaaccgaatggtcgctacaggaaatgcaggggatcaagcatacgctcaagcataa

SEQ ID NO: 179648 - DNA, 130 bp, Arabidopsis thaliana landsberg
tcactctctcgcgctcgcggattcgctctcgccctcggcctctccgtctctcctcctgctctgctggctgctgctcaccgcctcaccgtcggccgtcgccgtagtctctgtcggatctacgtcggcgtag

SEQ ID NO: 179649 - DNA, 30 bp, Arabidopsis thaliana landsberg
atgtccgtgttcgcccagcttatgtcttgt

SEQ ID NO: 179650 - DNA, 348 bp, Arabidopsis thaliana landsberg
atgtgggccgcctatatgccgccggccgagcgcgagaatcccaacacgcaggatccgcatcggatcgtgcgctgccgggcgcatccggagacgttgtggatccagcatcacaatgcgcagttccgctcgaccgacggcgccggcgagtggggtacgatctcggaaaccttcggcttcgccgtcgcggcgcatcccaaggatccccagaccgcctggttcgttccggcgcagaaggacgagatgcggatcccgagcgatcaggatttctgcgtgctgaagaccgaggatggcggcaagagcttccgacggatcaccgccgccctgccgcccaagccctgtttcgacctg

SEQ ID NO: 179651 - DNA, 510 bp, Arabidopsis thaliana landsberg
atggaagcaacatacgatcgtgctagtgaggtaaaagcttttgacgagttgaagatcggcgtaaaaggtctcctagacgccggagttactcagatcccacgtatcttccatcatccacatcttaatttaaccgactcaaatctacttctttcctctacaacgatggttataccaacaatcgatcttaaaggaggcgtgttcgacgagtacacagtcacgcgagagagcgtcatcgcgatgatcagagacgcggttgagagattcgggtttttccaggtgattaaccatgggattagtaatgatgttatggagaagatgaaagatgggattcgtgggtttcatgagcaagactcagacgttaggaaaaagttttatactcgtgacgtcaccaaaacagttaagtataacagtaattttgatctttatagctctccttcagcgaactggagagataccttgagttgctttatggctcctgatgttccagaaacagaggacttaccagatatt

SEQ ID NO: 179652 - DNA, 613 bp, Arabidopsis thaliana landsberg
atggaccctaaaagttgtgagaattcgagtgatgttaagggtcagaccagtgactctgtatcaaaaaaggtgttgattgaggaagaggaagatgtaaagaaaccacaacagggaaaagaaaatgattcaagaatggccaaagatggtgttagttgcagtagtaacatttcagctcatgttgttcatgaggaagttgcggataatgttactgcggtaagctgcaacgaggcagagagtgatatatcgaaagcaaaggcgaaggagttccacactattgatttgagtggtgtaggagaaagaatctgtaggatttgtcattttggttctgatcaatcacctgaggcttctggtgatgataagtcagtaagtccggagttgattgagattggtggcaaatgtaaaaacgagcttggccttgcacatttccattgcgctgaagcctggttcaagttaagaggattcaggtaatcaattctatatcttcgtctgttattagcttagtaagagtatggactaatggacaagattcaacattaagtcaaactcggtgcttttgtttggtgttcttggcagtgtgtgtgaaatatacggttgcacagcgaagaatgttaca

SEQ ID NO: 179653 - DNA, 79 bp, Arabidopsis thaliana landsberg
gatttacaagaatcatattccgttgttgctaaaagatgacatagagggtcgcttcctcgatgttctctctcagaatctg

SEQ ID NO: 179654 - DNA, 169 bp, Arabidopsis thaliana landsberg
cgttattaggcttgtccggatcaagaatgttcgagaggagaagcatcaaccaagggaccaatccatccaaggcgtagatcgatcagtccagcattttcgtcgaatcttggaagatcactcttttcttagtccatacatatccctttccattggtttccatcagttataa

SEQ ID NO: 179655 - DNA, 449 bp, Arabidopsis thaliana landsberg
ctctgccaaattgacgaagggcaaagatacaccaaaaggctcaatgagaagcaagtgactgcattgctaaaagctacctgccaacgaccccctgatagagagaactcgatcaaaaacgtaggtttagtcctctttacattacatatacagtagttcctccatcggaaaaatagtctttaattttgcacctctgttttgactaacatcacgtttgttgtttatattattagttggttgtgaaaaataattacaatgatgatctgagcaaggagtttgggatgtcagtgactacccaactagcctcgattgaagctcgtgtacttcccccaccgatggtgattatctttctccatttttgttattaatttgctttattatcatgcattttcttgtcaatgttgctcatcacgatgttctttctgttaacagttgaagtaccatgacagtgg

SEQ ID NO: 179656 - DNA, 342 bp, Arabidopsis thaliana landsberg
atgatcatcgactacctgcgcgcggaacaggacctcgaccgcgtcaccgcggacgccgacattccggtgctggcccggacgctgatcggcgcggcgcacctgcatttcgccgaccgtgccggtgatctgcctgcgccggacagtgtccgcgccatggtgcacggcgtcctgtccggcgtgctgacggcgtgatccgtcccgtaggtcgctgcgcccgtgcggtcaggaatcaccgtagggcgcggcgctatcgccgaccagtccgacatcttccccgaccttcgaaacccctcgttccaggacaacgccaagcaggccatccaccgcttcatccccacctga

SEQ ID NO: 179657 - DNA, 418 bp, Arabidopsis thaliana landsberg
atgacagacgaacagcgcaaacagctgtcgcctgaatctgaggaatatcgtctgcgtgtgggaggttccaaggtccaggtgaccggctggtctctgtatactttattgctatggcttttgaagacgtgtatgaccgtcttttactcccgtttgacgtgagattccctgttgcatttcacattttcttcgaacggagcaggcgttgagaccttctgcttgatgaaagtgctaacgatgactcagtgctggcttggtcaacatgcgagtccgaatccatatcgcatacggtttgattgccaccacatatattgctaccctttgctccattctcttcggctgccacccgatgcataagaactggcagatctatccagaccctgggagtaagcgggatggtcctctcacgagctcagagaat

SEQ ID NO: 179658 - DNA, 457 bp, Arabidopsis thaliana landsberg
atggcgatcgccgtccgttgcgcacgcgatcaggtcagctttgcggcggtcgcgcttgatgagggtcgcgccgatgcggtgctgcaagtggagtcggccttgttcgtcgccggtacggcggccatcgagaacgccggcaagaacatccagattcacggcggtatcggcttcagcgacgaggccgatccgcatctgctgctgaagcgcgcaagagtgcagatcgccatcgccggcggcctggaagcggcgaacgcgcgcattgcaaacacgaaaacggagtggtgacatgcaggtagcaatcatcaccggtgccagcagtggcatcggattcggcacggccgtcaaatttgccgaatccggcatcgccgtcgtcggcgtcggccgcgatgcgaacaagctggcggagctcgaaaaggcgatcggcaatccggatctgatcgagacgctggccgtcgac

SEQ ID NO: 179659 - DNA, 1431 bp, Arabidopsis thaliana landsberg
atgtgttcaatcggagtaactgctctctgttctccggctaaatttcatcatcgccgggaacaatcactgatttttactccgacccatttgcgtaatccaaatgggttccaatttcggtggagaaagtcccgacctttcgctcccagactcgcccaacccgacaatttcgctccgccgctccctctcatacgctcttcgacgtctcttctttcttccaaggatttcgttcagatgctggcgagaaaagccgccattttacttgttgggtcgtttgtctttctagggttctgctcttcgaaacctgctttagcgctacccactgcaactgtagtctcccaggcagagttagaggacgagaaaatgttcgagaagcttctggaaaatgagccagagaacatggaggctatgaaggctgttgtgtataagaagatgaggagagggaaaaatgaagatgctgtgaaatatgttgagaagctgatgaaattagagcctcatgaagttgagtggaagcttttagaagcgctttgctatgaaacaatgggggaattgagcaaagccaagagattgtataaggatattctcaaagaacaacctcttttgatcagagctttgcacgtatgtgtttctcaccttttggtgcttctttaggattagagtctttttatgaaactgtgaataagtggatgtttaggagaaatggtgtaggtaatagaatggtatcttgatttcaatattgcagtattcaattttaggtcttgtcttgtttcttgcagggtcttgctatggtaatgcataagactcatgacacctctgtctttgatatgctcattgaagctatggaagttgctcgacaaggaaaccgagtaaccgaggagagaaacatacaagtcttgattggtcaaatgcatattgtggaggtaaaactcatccttagtttccttcttgtgtgttttggtccttctgagctatctttaagtatatgcataggaataatggattgtagtatatacttatggccattggtttaaaacctcagggtcaatttgaagaaggtctaaagatatttcaacagatggtgaatgataatcctcgagattttcgaccttacctttgccaggtagagtttaattatgaaaagaatgatctttgattccctatagtcatatgtctcagttatcaagtaaaaggagtttagctttgtctttggctattccgcttgaaagaaattgctagtatttgtttcagggcatagtgtatagcttaatggataaaaaagaggaagcagcacaacagtttgagatctattggagtcttgtacctggagaattcccacaaaagggatttctcgacgatgttgccttggctgctcaagcaaaatcccgagaacggcttcaaaacacattcaaagctaaatttactcaggggagataa

SEQ ID NO: 179660 - DNA, 437 bp, Arabidopsis thaliana landsberg
agggattcccccgtgttccccaccgcaacagatcgctgcacggtgcgccgttatttccggaacgcccagtgcgacatgcacgcaaatctgctgcgggtgggtcttttcctgacaaaaatgcggtcacggcgtgagattgggcagtctccagctcacccgcgattctacgccaaatatgcatgatttgttactaaaacaaactacctacatgcatcaaaatgagatacgtgttcatttgacacgattacaaagagattaatgcaacatttcacccccttaatctgtcaaatgttaaccacccctagctgcctccgcatctctgcaaagcgaatccttgcaagtggttttgtcagtatgtcggcgagctgatcttcagtgcttacatgctgcacctccagcaccccatcagccacacattccctgatgtagtggtcctg

SEQ ID NO: 179661 - DNA, 241 bp, Arabidopsis thaliana landsberg
ctacccgggatacaatgagatcttcaccggatatccagatactgccatcaattccaatgataaaatttataatcccaatgaaaatgtgctggagtttctaaacaggcaaaaggggtttcataacaggattgcagcctttagcacctgggatgttttcccctatatcctcaacgaaccccgaagtggcatatatgtgaatgcagatgttgacacgctcaattttaaagtgccccagctgaag

SEQ ID NO: 179662 - DNA, 361 bp, Arabidopsis thaliana landsberg
atgccgcgagcgacaaatcttgcgatagcatcggattttttaccgccagtttcggtagcagtgtggctggtaaggaatcgaatccagcctggtttgtggcatagttgagcaaataggccagggatgagacgctcaaaagcgaatctttcgggaccgcattcttgttaaaatcctctttttggaactgctgtctcatattctgatccgccagccagttggcctgccaggaaaggtaatcgcgcttgtccgaacccgcagcaagggaatccagcaggcccgaatcagtacttttggcgagaattgcgaggaggttcgtggccggaattaccgggcgggccgcattcgccttggccagatccag

SEQ ID NO: 179663 - DNA, 349 bp, Arabidopsis thaliana landsberg
agcgtcggccagacgattaattccacgctcaatctcagtgatgccttgaacgtcatcacgcgcgaagcctgtcatctaatggatggcaagatgtgttcgctcctgatgctggatgagtcggggcaatggcttgatctccgggccagtttcggcgcgggtgaagactacaccaaaaaaccacgattaaatttggacgaaagtttcatcggcaccgtggtgcggcgtaagaagccgttacaattgcagaatgtgcaaagttcgggccgttaccaaaatgtcgccgtcgcccgcagcgaaggattggtctcgatcctgagtgtgccgctggtcttcggcggacaggccatcg

SEQ ID NO: 179664 - DNA, 225 bp, Arabidopsis thaliana landsberg
atgaatgagaatcagttcagcagacggcaggcgttgctggcgggggcggccggggcggccggggcgatattggggggcgtgcgctcggctgtggcccagagcgagcggcctgatgtgccgggagcccaggggacgcggcggcattccgtggcggccgccaccagccgagcggcgtcgacagaagaggcgtatccccccggcgagccggggaaggattacacgccc

SEQ ID NO: 179665 - DNA, 1874 bp, Arabidopsis thaliana landsberg
  unsure (1)..(1874): unsure at all n locations
atgttagttaccgcaaagtataacagggagttggattcctttgcatctgaaacatcagaccaaatcttaagaaatttagagaagtgtcctgagaacatcaagcaaatggcagagagtggactattggaacctcttctgggccatctagcagaaggtaattcattactgcttttctctccaaagtttatgaagcatagttgctatacaagcattacctggagcgaaatgataaacaatgaattgatgttgattaatatcagtttacttccgaatgatatatggcagggagtgaggagactcaggtggcaatggctgcgtaccttgtggaaattgatattggacatgagaaaaaaacgtacgtagctgagaaggcttgccctgcgctcgttgggnnnnnnnnnnnnnnnnnnactgacgctagaagagccgccttcaaagctcttgctcatatttcattgtatcaccccaacaacaagatactggtagaagtcggcatcatcaagatcatggtcgaagagatgttcacgaagcgagtgtttagtgatctgatgaactccaggaacgaagctgctacaatactcgcaaatatactggaatctgggctggaacatgagacctttgaggtgaatactcatggccacacattaggctcggattactttgtatacaacatcatccacatgctcaagaactcaagcccagatgatcttaacattgatttgatcaggattctcctatccttgtccaaatcacctagagcgatggcaacaatcgtctcagtgatcaaagaaaccgacgcaagctttgccatgatagaactcatcaacaatcctcatgacgaattaggggttggagcattaaaacttctaatagcccttaccccctacatcggtcacacgctatcagagagactatgtaaaactagaggtcagccagagaatcttatccagtgcccagtagaagcaaatcaaataacagaaaagcatgctgtttcagccaagttacttgctaaacttcctcatcagaatctgactcttaatttagcactggtcaacgagagcatagtgtctgaaattctgcatgcaatccatctgattcaaagaagtggagcacgaacaagcaggtatgcaactgatttcttggaaggtctcgttggcatcttagtgagattcacaactacactgtacgagccccaaatgatgtacctagccagaaaccacgatttgacatcagtgtttgttgatttattgatgaaaacatcaagcgacgaagttcaaaggttatcagcaactggactagaaaatctatcatctacaactatgactttatcgaggccaccccaacctaggagcacaaaattcatgggatcactgagtatgcctaggtctttctccctccgttcatccaaaaagaagcagatagagatctgtgcaatccacagaggcgtatgttctgcaaaaaacacattttgcttggttgaagcaaatgcaatcacaaagcttctagcatgtttgcagagtgataaagtggaggtagtggagtcagcattagctgctatatgcacgctattagatgacaaggtcgaagtggagaagagtttaagcatgctgagtgaaatgaatgcagtacaactaattctaaatgcagtcaaggaacacaagaaagagtctctattgcagaaagcattttggatgattgacaagttcattattagaggcggagataagtatgccagcgaaatatcacaagataggatgttgtcaggtatgttggttagtgccttccatcgtggagatggtaacacaaggcagatggcagaaaatatactgaggcgtttggacaagatgccaagtttctctacttatatcacataa

SEQ ID NO: 179666 - DNA, 225 bp, Arabidopsis thaliana landsberg
atggacgtcgtccgccaagtgacagcggcgctgaaggcggatccaaacgtgcgcggtgtcgtcgatgtcgacggcgtgcgcgcgaagttcgacggcggctggggcctcgtgcgcgcgtcgaacacgcagccggcgctcgtgatgcggtgcgaagcggcgacggccgagcggctcgccgagatcaaggccgtgatcgacggctacatcgccaccgccaagcgatga

SEQ ID NO: 179667 - DNA, 401 bp, Arabidopsis thaliana landsberg
ggttcaggaaaaacggtagtgttggggatagataagcatctaacgccagtaagtttgggtagctttgatcttctcagaggcagacatgtttgtggaagcttgtttggtggtcttaaacccaaactagatattccgattctggttgatcattacttaaaaaaggtatatacacaaatctatccagtttgattacagtttttggttattaaaaagtattttacttatatatatctaacttgcatattatgttatcatgtgattcactattttgtttaaaactgcaggagcttaatttggatagttttattacacatgaattgaaatttgaggaaatcaacaaagctttcgatttattagtgcaaggaaagtctctccgctgcattctttggatgaacaagtga

SEQ ID NO: 179668 - DNA, 122 bp, Arabidopsis thaliana landsberg
ttcgcgagacccttgtacgcttctatggcgctctaccaaaatacggcgaaactccctatcttgtgggcatcgctgcaataatgctgatgcttctcctcagcgaggccttgtacaaaatttga

SEQ ID NO: 179669 - DNA, 80 bp, Arabidopsis thaliana landsberg
ataaaccggagattgactttcagggaaaaaaaattcatcgagagcactatgatcaaaccaccagagctgtgttttggtag

SEQ ID NO: 179670 - DNA, 404 bp, Arabidopsis thaliana landsberg
atggggaataaagctctcaagaagcgtctcgaaagtatagctcaggagaagcttatcaaacaatgtaagtttctcgcagtttcttttaggttcttaaggttcaaactatagtctagagtatgagtttgtaagtattagctagttatcaagattcaacagttcttaagattgtatacctcatgagttctgtctattatccagtggaacaagaagtgttggaaaaggagattgggagactacgagcgttgtatcagcaacaacaacaaactcaaaaaccatcagccagtcgcggacgtgctactagcaaagatctcgactctcagttctccagtctttcactgaacaccaaagattccaactgtaggcgtgactctgtatctgtgatgggtcaattccacttttag

SEQ ID NO: 179671 - DNA, 466 bp, Arabidopsis thaliana landsberg
atcggtccaaatgtgtcgatatcagcaaatgttcgtgttggacctggtgtaaggcttattagctgcataatcttagacgatgttgaaatcaaggtaatttggaatcagtgttttagaatgttcttcttgttatgaatccaaaagattcgttgtttaatgttctctactcttgttaaatgcaggagaatgctgttgttataaactcaattatcggatggaaatcttctataggtagatggtcaagagttcaagctagtggagattacaatgacaggcttgggattaccattcttggtaacttgattgttttcttttttgttcaacaaatttttcgttgtttttttctgattaatttgtttctgcaggtgaggctgtaactgtggaagatgaagttgcagtcataggaagcattgttctccagaataagactcttaatgttagtgttcaagatgatatcatcttgtga

SEQ ID NO: 179672 - DNA, 115 bp, Arabidopsis thaliana landsberg
atggaaaaagaacaaagaagaataattaagactcatgctcaagaactagaccttttccattttggatcaaagatattacacccaatggcggctccagagtccagatcggataaag

SEQ ID NO: 179673 - DNA, 258 bp, Arabidopsis thaliana landsberg
atgatcgtgcagccggatggcagctatcagttgaccaagatcatcgaagacgtgcagttcgactacgccagcatcaagcacccgcaggtgctcgacgccggtcacaagcagttcctgcgctatctctcgcgcacggttgcgcaaccgcgtctggcaggtacattcaccccggtgcttgaaaaggcctcgaccggtaaaaaaggccgcgctgcctggctctactcgcccggtctgaagcgcatccgccgtgcaccgtcg

SEQ ID NO: 179674 - DNA, 216 bp, Arabidopsis thaliana landsberg
ctgaattcttagggttaccgcatgtgcctcctttttatggatctaaaaatggaaactttgagaaaggagttaatttcgctgttgcgggagcaacggcactagaaacttccattcttgagaagagaggaatttattatcctcacagcaacatcagtttgggaattcagcttaagaccttcaaggagagcttaccaaatctatgtggttcacctacag

SEQ ID NO: 179675 - DNA, 118 bp, Arabidopsis thaliana landsberg
gcggcggatctttagggaacaagctcgcagccgcgccagttgctccctgtctgtcatgaccacaaccatattcggtcgcccggcgtcagaacgggccacggccggagagatcggagag

SEQ ID NO: 179676 - DNA, 217 bp, Arabidopsis thaliana landsberg
aaaggaaacagcggaagatacagcagcaatacccgtactatcgcccctgatcaatgcgcagcaggaaatactggagtttgaacgggaactgctgatacaactatataaaaatgcggtatacaatgatgctgtgatccgcgaagtagaaagagaactggacattgaagccatgcggcttaaccagctgatgcctgaggatgcagataaaaataaatga

SEQ ID NO: 179677 - DNA, 1038 bp, Arabidopsis thaliana landsberg
gtcattatgttcctcagcttgccaaaaagatccatctctacaacaaagctttctccaatacacccatcattaacctcaaaggattcatggtaaaactacggttctatttatcacatttccgaaaccttaatccctccttaatgcatatatattcttttgcacaggtgggaaatggagatatggacaagcattacgacagattaggagccgccatgtatgcgtggtcacacgcaatgatctctgacaaaacttacaagtctatcctcaaacactgcagcttcactgcggataaaacctcggacaagtgcaattgggcactctacttcgcctacagagagtttggcaaagtcaatgggtacagcatctactcaccctcatgtgtacatcaaaccaaccagaccaagttcctgcatggacggcttttggtagaggaatacgagtacgacccttgtaccgaaagctacgctgaggtatattacaaccgtcctgatgtgcaacgagctatgcacgctaatcttacctccattccttataagtggaccttgtgcaatatggttgtgaataacaactggaaagattccgagttttcaatgttgccgatatacaaggaactcactaccgctggtttgaggatctgggtctttaggtaaaccatgaaactagctgcaagtaaagtacctttcgtgtcctttaaccacattttgttgatgtagtggcgatacagacgcagtggttccagtgactgggactcgacttgccctcagtaaactcaatcttccggtgaaaactccctggtacccttggtactccgaaaagcaggtaattttcatcaaattcgtggttctattcttattatgcagagccagtgatttctcatggtggtggtgtcaggtgggaggatggacagaggtatatgaggggcttacctttgcgacgataagaggggcgggccacgaagtgccggtgttgcaacccgagcgtgctctcactcttttaagatcgttcttggccggcaaagagcttccaagatcttattag

SEQ ID NO: 179678 - DNA, 320 bp, Arabidopsis thaliana landsberg
atgagttcgatagttctgaagacaagagctgttcttcggttcacggtaggtttgcggatatgtggggtttgcgagaatcatattctgatgatggagaaaaacagagctcaaggaaggttagaagtggacggtggtcggagaatgagatgagacgagaactgagatggcttaaggcaaggcacaagattcaacttatgaaaatgagaggtcaaacgatctgcgagacaccgatggagatctctcttacaccgggaacttcagtttcgttacctcttctttacagggctatatcacttcctgtggatgccgtggatatgtga

SEQ ID NO: 179679 - DNA, 94 bp, Arabidopsis thaliana landsberg
tgtagatttcccagaaaaatatcagaattgggcaactattgatccacaagatcttttcgacgctccaattattaaaaaggaatcaaacccaaag

SEQ ID NO: 179680 - DNA, 5519 bp, Arabidopsis thaliana landsberg
  unsure (1)..(5519): unsure at all n locations
aagttgaagatgttgataaagagacaagagaaaagtccacggaagtagctgcagagtttgaagagcataattctaaaagagaccttttaccgagtgaggtttgtttctaatatggcctaactttataataaggcacggttaaaattttccaaatttgtaatagtgtcttgctattattcacttgtatcaggtcaggaatatcttaaaacatctgtggcagaatgagcacgagttttgctccttcattggtgatctttggcagagtgggtctgaaaaaattgactactctatgttttttttggagagtgttcttgtgccccctactaaatttagacctccaacaacaggaggtgatagtgtaagtaattccctacaaattataatgttttgatgcttctatatcctctctaatttttggagttacttttaattttgtaacttttggcattacctctgtgcgtcactttctgtccatgttctctcgatcttccttttccagttttatatctcctatactaacagatggttgttcccattaactcatgtatgatcataattctcttacgattttgtttctttcaggttatggaacatcctcaaaccgtaggactaaataaggtcatagaatccaataatatactcgggaatgcctgtactaacaaattagatcagtcgaaggtaattttcagatggaggaatcttcaagaatcagtcaatgtcttgtttgatagcaaaactgccacaggttagcttcttgccattgtttgatatgtatctattactaaagagcttccttagttttctctagttatgtatagcaaccggctaccccacttttttatctgttgtcttgttgacttgacagcctctttagagcatcttgtattggtgtagaccgactattatcgctaatttcctttgcagttcaaagccagagagacagctctggaatatgtcaattgctggagaagaaagaggggctatttcggcaaaaaatgatgggaaagagagtgaatcatgcgtgcagatctgtgatatctccagatccttatatcgctgttaatgacatcggaattcctccttgttttgctttgaaattgacgtatcccgaggtatgatgtcatatgtcggtaaattgcactcttgacacatcattatctttggctgttaaatcacacgtcccaacactcttagatggagaaaatgttgggttattcttttcagattttgcatcattttcctcttttggtggagatgacttgtagctatccttagatttacaaagatacttgtccaacctatagtggagccttatgtttgtttttccggaagtgaaagttaaatgtattgctgcagagggtgactccttggaatgtggagaagttaagggaagctatcattaatggtcctgacattcatcctggagctacacattactctgacaaatcatctacaatgaagttgccctctaccgaaaaagcacgaagggcaattgcaagaaaattactgtcctcacgaggagccactacagaacttgggaaaacttgtgatatcaactttgaaggtaaaactgtccatcgacatatgcgagatggtgacatcgtccttgtgaatcgtcaggtgtggacacatattgttttatttcatcaatgttgcctatataaaatgtttctcaaattttgcgaagtgggtttcccaggacgttttttcatttctttcttcagtatttaatacggactcaggcattgtttggtgtacacctttttgtctgtgctaaatgttaaatttatgttctcaactattttttttcactggcagccaacattacataaacctagcttaatggcgcacaaggtccgtgttctgaagggggagaaaacacttcgtctccactatgcaaattgcaggtagactcctgtggatatagagaatgccggatctcccagatgtcattatttaccttgtttgcaatctcctttcaaatttacatttgtggacctttaccatgtctcggtttattttccacatgcatttgacttttatctcaaaagtggcttaaaatattgctttggttgcagtacatacaatgcagattttgatggtgatgagatgaatgtgcattttccacaagatgagatttcacgtgctgaggcctacaatattgtcaatgctaacaaccaatatgctaggccttctaatggcgagccacttcgagctttaattcaggtttaacttccatgctatttcttcaaacctttagtttgcttttatcattgtcttgatttcacgaattgggttgtttaccagtgatatttattgactttgtattttcttaataggatcatattgtcagttccgttttgcttactaaaacggacacatttttggacaaagatcattttaatcagcttctcttcagttccggtgtcactgacatggtactcagtactttttctggaagatctggcaagaaagtcatggtatcagcttctgatgcagaactgttgacagtcacgcctgctattttgaagccagtgcctctttggactgggaagcaggtaatctttgtatgctctgttttgttatcttagttcttatataagttggtttttccacatgtggctatgtgcttttggtatacaaactgtatctagggagtcatcaatgggttcactaaatgcttttacttctcatgagctgagttctggttattcgtctctgctaggtcatcannnnnnnnnnnnnnnnnnnnnncaaaggtcacccgcctttcaccgtagagaaagctaccaaacttccagttgatttcttcaaatgtagatctagagaagtaaaacctaacagtggagatttgaccaaaaagaaagagattgacgagtcatggaaacagaatcttaatgaagataaattgcacatcagaaaaaatgaattcgtctgcggtgtgatcgacaaggctcagtttgctgactatgggctggttcatacagtgcatgagctttatggttcaaatgctgcaggaaatctgctctctgtttttagtcgtctctttacagtctttcttcaggtgtgctctcgtgttgttgataatgttattgtcatttgttacagagttttgcatcctgaatccttgtttttacaactttcagacccacggtttcacctgtggcgttgatgttcttattatttttatagatatggatgaagagaggacgaagcaacttcaagaatgtgataatgttggtgaaagagtactccgtaaaacctttggcatagatgttgatgttcagataggtatgtatatcttgctggaaagtatgtattgcattaatgtgttcagacttgccaccatggtcatttgttacattctggagcacggatgtccctctgttatagtatgaggcattgaaattgtagtttatcaaataaacttgatatatatactgtcttgcctgcagatcctcaggacatgagatccagaatagaacgaattctttatgaggacggggaatctgctttggcatctttggacaggagcatcgtaaattatctcaaccagtgttcaagcaagggtgtgatgaacgatttactgtctgatgggttactaaaaacacctggaaggaattgtatatcgctaatgacgatatctggggctaagggcagtaaggtgagtttgtggtgcctccttcaatatgcacggtgttgttgatagtttaagtacgcattttcagtatctagaagtcggtttgtagcttctgtgttcttagaacccatcttgtcatccttctgcagattttttagctcatgccaacttttccaagctataacttttaatatttagggaaggagataaacaagttggtttttgaaaatatagataacttattattatcaatttgatatagatttacttttgttgtttttccaatgaagcctattagctctgaaagtaaattttacaactttctctgcattcaactaggtggagttgctagctctaaacatcatatattatagggatatagttttgtggagagtaaattacaatttttgggaggcgaagctttatcatttcattcttttgttgtctactttgagcaggttaacttccagcaaatctcttcacaccttggccagcaagatttagaaggaaaaagagttccccgaatggtttctgggaagacattaccttgtttccatccatgggactggtcccctagagctgggggatttattagtgacagattcctaagtggtcttcgcccccaagaatattacttccattgcatggctggacgagaagggtaactaatacttatcctacataaattatatgttaattacttttaagatagaaggtgtttcaaacttcttttctgatagtggagctgtcaaattttctactcttcgactttcaaaagatatgctattctttgaaggatgctgtcgcattgcaaattgatgtgtgggcattcactttgatatatctggtttttgtgttaaacttttacttggttgaggttttctgttgtaatccttacgaaaattttgttaagagtcggtcagcatcagctggtttgttatctttatttcgtcgcattgtgaacacttaaaaattctggtctgcaggttagttgatactgcagtgaagacatcgcgtagtgggtatctgcaaagatgcttgatgaaaaatcttgagagtcttaaagtcaactatgattgtactgtccgggatgctgatgggtccatcattcagttccaatatggtgaagatggtgtggatgttcatcggtctagcttcattgaaaagttcaaagaactgacaatagtaagccttcgtttttgacagtttaccttttctttatctgctcttgggaaacttatgtggttattttaacttactttggttcagaatcaagatatggtccttcaaaaatgcagtgaagacatgctatctggagctagtagttacatcagtgatctgcctattagtcttaagaagggagctgagaagtttgtagaggcaatgcctatgaatgaacgtattgcttctaaatttgtgagacaagaagaactactgaagctggtgaagtcaaaattctttgcaagtcttgcgcagccaggggagcctgtaggtgtacttgctgctcaatctgtaggagagccatcaacacagatgacgtgagttttttttttccttttttatgttgtgggcttgctaattctttcaccgtgcaaattaggaactgaatcacattggtactcatatttataaatcttaaatctctgagtaatatgaggatgcttgcagcttttgcctttgcttttgcatctttcctgaaatatttgcatataaaatcctttgttctgtcaattaacaggttgaatactttccatcttgctggacgtggagagatgaatgtgacacttggaattccacgtttacaagagattttgatgacagctgcagcaaacattaagacaccaataatgacatgcccgttgctgaaaggcaaaacaaa

SEQ ID NO: 179681 - DNA, 117 bp, Arabidopsis thaliana landsberg
aataactcaaaagacggcgatgaagaagaaaagtcggcgaggaatttcggaagatactgtgtcatcctgcgcgcacacgacaagtatggctctaacttttatttcaaaattcgctag

SEQ ID NO: 179682 - DNA, 493 bp, Arabidopsis thaliana landsberg
atggacaagtaagtagctaaactagtattgagttttatagcttgtaatgatgtgtgacaatccaagttctgtttattaacgtgtgatttgattttacaggtataaactagacgtcgtaactgctggaaagaatttcacgaagataaggaaagcaatcacggcaggattcttcttccatggagcaagaaaagatccacaggaaggttacaggacgctggtggagaatcaaccggtgtatatacacccgagcagcgcgctgttccagagacaaccagactgggttatatatcatgatcttgtgatgactacgaaagagtacatgagggaagtgactgtgattgacccaaagtggcttgttgagttagctccaaggttcttcaaagtgtctgacccaacaaaaatgagcaagcgtaagcgccaagaacggattgagccgttgtatgaccgttaccacgagcctaactcatggcgtctcagcaaaaggcgtgcttga

SEQ ID NO: 179683 - DNA, 363 bp, Arabidopsis thaliana landsberg
atgaacagtagtcaaaaggggaaccggtcgaacttccgcaacgagaagctaggggcagtccctgtcgatgttacgggccgctggttcgcttccgtgaatagtactgccactcttcattgcgattacgtgagtacgcaaaagccgcgcaagggcacgatccctatgacggatcagcgtctcgaccgtgttattgagatcctcggactgcgcgatatccgtgtcgtgtgggaccgcctgatgcgcgtcaagtttgaatacatacggatgctggaggaggccagcgaagcaggggacgaggacagtcagggagagttggaccgcgccacgtctttcaacagctggaacggcgaaggagaggacacg

SEQ ID NO: 179684 - DNA, 300 bp, Arabidopsis thaliana landsberg
ttttttgcgctgtggccgcggctgtcccaggttcccggggtcacgttcgagcacaagtctgagcggctgttcaccacggacgcgaactcggtcgtcggcagcgtcggcagtgagaactcgtccgtgctgcgccaggagggcgcggcgtacgagccgggcaacaccgtgggcgagtccgggctcgagcaggcctaccaggacgagctcgtgggcacgccgaccacgtcagtggtcatgatcaacgcgaacggcgataccggggccacgctgtggacgtaccccggacacacggggaccccg

SEQ ID NO: 179685 - DNA, 486 bp, Arabidopsis thaliana landsberg
ctcgccgcggtgctgcacgcactgtccggcggctatatcgcggccggtccgtcgggctcaccgctgcgcggcttggtcaacgtgctgccgaccgggcgcaacttctacaccgtcgacccgcgcgccatcccctcgcgcctggcctggcagaccgggcaggcgatggccgactcgctgctggagcgctacctggccgacaccggcagctatccggcgtccgtcgggctctcggtgtggggcacctccgcgatgcgcacctccggcgacgacgtggccgaggtgctcgcgctgctcggcgtacgccccgagtgggatgccgagtcgcgccgggtgcgccagctgatcgtcgtaccccttgaggagttgggtcgtccgcgcatcgacgtcaccgtgcggatctccggtttcttccgcgatgccttccccatgtcgtggcgatgctggacgacgccgtgcggatggtggccgagctcgatagcccgttga

SEQ ID NO: 179686 - DNA, 119 bp, Arabidopsis thaliana landsberg
tattgaccggcgacacactgctctggacgccaacagcaacagatcccggacgacagctgagcgagcagttcacgtacttgctattgctagctattggcaaactggagcacgacagctag

SEQ ID NO: 179687 - DNA, 486 bp, Arabidopsis thaliana landsberg
atgggcgtccataagagaaatggaaccatatatctagatgtgcataaactgcctgaaaggccgcagagtgacttagatcgccgcacgtaatcttcgctttaattgtatttgcggattggtgtgattctactagctttattatgaatggtgctaaagaatgtgtgtgcagaagacaatgctaatgtttagaaaaaaatgggtcataaagagtttataacactgctctgcatattttgctactaataaacttgatgttatgtttccatcagatgttactggggttattgtgttgaaagccttgctacggaagatccaggaagagcttatggagaagaaatacatcatgtggatgcaaatgttgaattttgttctgttgtcaggactaaactaggagctcaccgagttatgatgggtgctgaaatggactgctgtgatgtatctgataagggaaaaaggttttacgtagagttgaaaacaactcgtgag

SEQ ID NO: 179688 - DNA, 582 bp, Arabidopsis thaliana landsberg
atgaagtgtccgtactgttcatcggcgcagggacggtgtgccaccacaagctccggtagatcaataacggagtgctcatcttgcggtcgcgtaatggaagaacggcagacgcaaaaccaccacctgtttcatctccgcgcccaagacactccgctctgtctcgttacttctgatctccaaactgcggcgcaaccgtctcctgaagacgaggaagatccgtttgagcccaccggattcatcaccgccttctctacctggtctctcgagccaagcccgattttcgctcgctcttccctctctttctccggtcatctcgctgaactcgaacgaaccctagaactcgcttcgtcaacatcgaattcgaattcgtcgactgttgtggtggataatcttagggcttatatgcagattatcgatgtggcatcgattttagggttggattgcgatatctctgagcatgctttccagttgtttagggattgttgctcagctacttgcttgcgaaacagaagcgttgaagctttagccactgcttgccttgttcaagctattagggaggctcaagaacctagaactcttcag

SEQ ID NO: 179689 - DNA, 257 bp, Arabidopsis thaliana landsberg
atgtcagagaacaggcgcagaggaggaaggcgtgctcagcaggatgcgagccgctcaacaggaggaggtgccccagcagcagcacctgccgcccccgcccccaatgtcgatcgagcagatgtttctgatgcagactcaggcagttcaagccatcggtcagactttggccgccattcagcagcagcagcagcagcaggccccacctcagcctcagatgcctcagatgcccagagacaagcgtgctgaattcatgagag

SEQ ID NO: 179690 - DNA, 298 bp, Arabidopsis thaliana landsberg
atggtgaagatcaaatcgaacttgaagcagcttaagctctccgttccagctcaagaatccccaatctcttccttcctgtaagtttcgcgatttctcctttctttacttggatctgttttgtttggcgagattgtaaacaagaatcgattagatttgatccattgtttctgggtttgaattgattctgtgaaacttcattgaatttgaaaacaggactgcgagtggaacatttcacgatggagattttcttctgaatcaaaaggggctaaggttgacgccagatcagaagcaatcaagg

SEQ ID NO: 179691 - DNA, 49 bp, Arabidopsis thaliana landsberg
atgccctcaaaacataagtggtcgcgtgcggccagtcagacggtggcgc

SEQ ID NO: 179692 - DNA, 53 bp, Arabidopsis thaliana landsberg
atggcttttgagatggctcctgctgatccaactttggacctcaatatgcaatt

SEQ ID NO: 179693 - DNA, 154 bp, Arabidopsis thaliana landsberg
gtttatgcctaatcgtgtcacaaggaccactaagaaaaagaacctgatcaaccttactggacttgatttgggaaagctagagcgcacaaaccaaaaagcaaagaaattaacaacaatcgttactggagaactaagagctgaaagaggtttttga

SEQ ID NO: 179694 - DNA, 156 bp, Arabidopsis thaliana landsberg
ttcggcaacccgcagaagctggccccgaaccagcggccccgcggctccagcctgtgggactacgcctacgccatcacggcgcacaaggcgcaggggtcggagtacgacgacgtgatcgtgctcccccagggacggatgaccgagcgggaaaagtga

SEQ ID NO: 179695 - DNA, 238 bp, Arabidopsis thaliana landsberg
ataatgatggtgaacatagttatttcactcttacatattgatgatatccgtctcagttctacgcaaagtgcctcctcggcatgtttttctgaaaaaagtaacacacctggtttggatcctggcgatcttggtacagaaggggaaaaggaaattgttatttctttcacaaaacagctactcgatgttttacgccgcaatcttccatcacatccaattgaacaagagtgtcagctggatg

SEQ ID NO: 179696 - DNA, 310 bp, Arabidopsis thaliana landsberg
atggaaaagcatcccacacgtgagactttcgctatcacgtgaccataagaacagcaactgcaccatctccatcttaaaacacacatccttggtacgttgctaaccaaacaaaatttctgtatctcttagtccaacgtcatttcctttggttttacagtttctgtgtgtgattattttctttgtagccttcaggccaagctgcgaagaccttgactcgcaaggagaatcaacaatgtccataagcctccttggctatatattccacgcccatcgtttggatgtgcaagaagagaaccacataaatgaatga

SEQ ID NO: 179697 - DNA, 160 bp, Arabidopsis thaliana landsberg
atgacaggagagttacaggagacgacggcgccctgtgcggctataacagagaaacgaccaaatcgactcggtggttgtgtcggtgttttcttccagctctttgattggaaccgacgctttgctaaaaagaaactcttttctcgcaaatcacttctatctg

SEQ ID NO: 179698 - DNA, 830 bp, Arabidopsis thaliana landsberg
atggtgacaaaatcgtccattgaactgcaggcaattgacgagcaaaacaagacaaaacataggagagaccgaaacaaacaaaaaaacaaacagaggcatgactcaatacatagcttctctaatcaaattcccaactttgaaagccaagtaagcattcgctgctgcaagattgatctgatcctcggtaagactgtcattgtcccaatcttcatagatagggcttgttggtttccaaaacgagacccaatgactgaaatgaagtttgatctcgccacgaatctagctgagagaggcccacgacgaaggtccgatatcaacggcattcttgcaggtcaaaccacactcgctcttgagcattttcaaagccttgtttataccaacacctgtaaaggtgaaatctggaagattgaggaaattggtgagagaaacgggcagcttattaccttgtacataaggaagcgggattattaggcaattctggccatcactgagctcgagaatcacgagcttgctctccggtgggtattcgctatcgcctcctacaaccgatcgttctgtatccagaccgatgattttgttcgcgttttctttattacacagaaatgttctcacttcactggtaatgtctctgtcatttctagccactgtcactctgatgcgaccaccatatccagtttctacagtggatgtcgacatctctcaaaggtaaggagagaatgggatatatgtttaaaacttgggagatgcgtccgccattatataggcgtaaagggaatagcaaaagtcgcacctttggagaagaaaacgaagagacaatacgacccttttaa

SEQ ID NO: 179699 - DNA, 75 bp, Arabidopsis thaliana landsberg
attatggtgacaagacaaagaggtgatcttcttatgaacattccagctcttcgaaaacttgacgccatgctcatc

SEQ ID NO: 179700 - DNA, 187 bp, Arabidopsis thaliana landsberg
aatccaccggggccggtcccccaggaactgtcatcaaaacttacggtattccagctggcaggtacggcactgatgggtaccaggtatttccagttttggttggcctggactatagtttcccaatgatcaatggattgcgcctgtacaggattggtattgggccaggcaaaaacgaagagtgcgacag

SEQ ID NO: 179701 - DNA, 91 bp, Arabidopsis thaliana landsberg
atgtttacgaaataaacaaacaaacaaaaagaaggaaggagattccgaacaaaaatatgtaggggatcggagagagcaaatgagtcgctga

SEQ ID NO: 179702 - DNA, 147 bp, Arabidopsis thaliana landsberg
gttgtgaggaagtcagtcaaattccataagatagcccgacatctagttgaaaactgtggtctgttttcatggtgttcgtcgtttatttcaaattttactacaaagccgattggagacaaagatctgcacttggtagttgtcttggag

SEQ ID NO: 179703 - DNA, 186 bp, Arabidopsis thaliana landsberg
atgaatcgccaaagcattgccgcaagagagaagccccagacggatttgtatacctccaccattggccaccggaggaattacacaacccaagatagatccaccagctgcaccaaccacaccgaaacgaggcacatctcggtggatattcgctttaaacacttcgtccgtttctttgctgttcaaaag

SEQ ID NO: 179704 - DNA, 327 bp, Arabidopsis thaliana landsberg
atgaccgctatcgagaatttcatccggcgggcaaccgtgggtcgaccgcggtgcacgtccatcgaggcgtgcttctacgcagtccgcgacctgccctacgccttggacggcgcgcacgacgccggcgggctcctcgcgcacggccatggcgactgcctggcgaagaccgacctgcttaggctggatgcccatgaactgggcataccggcccggttcgcgcgctggctgtacctgctgacggacgtcgtacccgaggtcaccgagcttcccgcgcggctggacgtacaccgggcggaccagctaggcggtcgggggacaacacggacg

SEQ ID NO: 179705 - DNA, 386 bp, Arabidopsis thaliana landsberg
gcgttctcgaacggtctgggcgaggtgcatcactcgacgaagatcgcgatcgccgtcgggctcgtcatcggcgttggcctcgccatcatcgagaagttcgcgcccaagaacgtcaaggcgttcgtaccgtctgcgaacggaattggtatctccatggtcgttcccggtagcaactccatcgcgatgttcatcggcagcgcgatcgcggaggtcatgcgccgacgtcagctggacggcatggccgtgcccgtcgcgtccggcctgatcgcgggcgagagcctgacgggcgtcttcattgtcgctctgtcgacgatcgtcggctggaacctgcaactctggcatggcaaggcttggctttgccggaccgcgcagcgccgtcgtaggcg

SEQ ID NO: 179706 - DNA, 487 bp, Arabidopsis thaliana landsberg
  unsure (1)..(487): unsure at all n locations
ctccgacaccttcggtgaggtcgccaccggcgagacgccgacgatctactaccaggacacggccgatctgtcctacgacgccgcctcgggaggcaccgtcagctggaagatcacggacccgtcaggtgccgtgtggaagtcgggcacgctcacggannnnnnnnnnnnnnnnnnnnnnnnnnnnnnnnnnnnnnnnnnnnnnnnnnnnngcgaggcgacgctgacgatcacctacacgccggctggaggcggtgagccacagaagaccacggtcgacctctacatcgacccgagcggcacgatcgttgaccagttcgggttcccggtcgagggggcgaagaccaccctgcttcgctctgacacattcggcggcacctacaccgcggtgccgagcaactcggccttcctcgacccgaacacgccgacgaaccccgagacgaccgacaccaccggtcacttcggatgggacgtgcagacggcccgttag

SEQ ID NO: 179707 - DNA, 915 bp, Arabidopsis thaliana landsberg
atgcgtagagagccaacaattatcataccacttattcaaaaaggagctaatgcttcagatttcacgtttgatggacgcagtgcggtaaatatatgtaggagactcactaggccgaaagattatcataccaaaacctcaaggaaagaacctagtaaataccgcttatgcatcgatatcttggaaagggaaattagaaggaatccattggttagtggggatacacccacttgttcccattcgatgcccgaggatctccaaatgaggttgttatacttagaaaagcgaggtattgacctagtcgatatatatatttctcatagcttaaggttgatgtctctttattgaattcttgtatgtgtcattgcagtgggacttgctcagttgttcttcccagcagaagccaatgtggctatggacgttgctaatgttgaagggacaagcgagtgcacaggtcttctaactccacctccatcaaatgatacaactgaaaacttgggtaaagtcgatttaaatgaaacgccttatgtgcaaacgaaaagaatgcttacacgtatggaagccctcatgaaaacaggtaaaagcttaaggaaatgtactttcaagttttattctctgaccacaagattgactgattcgaaaccgttcaacaacgcagttgagacaggtcggagatacttcccatcttgttatgaggttctggataagtacatggatcagtatatggacgaagaaatccctgatatgtcgtatcccgagaaaggcactgtgaaagagagaagacaaaagaggatgagatataacgagctgaagaacgacgttaaaaaagcatatagcaaagacaaagaggcgcggtcttgtctttcttcttcatcaccagcttcttctcttagagaagccttagagaatccaacatga

SEQ ID NO: 179708 - DNA, 56 bp, Arabidopsis thaliana landsberg
atgttggtcttctttgatgtcctctttatagtttattttcggtgttgtgatctcag

SEQ ID NO: 179709 - DNA, 62 bp, Arabidopsis thaliana landsberg
taccggttgagcagactacatctctgagaaaaattggacttctccggcgcttgtcccgttga

SEQ ID NO: 179710 - DNA, 93 bp, Arabidopsis thaliana landsberg
gatttgttcaaaacgatgctcagtgaggccattaaaaatgtagatcatattcttaacaaaccaatccgggctagccgatttgatttttctcag

SEQ ID NO: 179711 - DNA, 2177 bp, Arabidopsis thaliana landsberg
tttttcaacctcttcccgcttacgaggccgggatattctatcaacagtcgtctcttccatcggccgaacaatttccgatttaccgactaggactttcgcctacaacttccgaagagattttctcagtgtaagtttgaaaaaacctagctataggattccggatttcctaatcgtcagatcttgggctcgaaagagaagctagaaatggataaggatctcttagatatctctggagaagacgacgaagataattggcttctgaagaatacgccgaagaaaactaattcgagccgaggaaagagttatttgaaatgctcacctctccaaagccctagatctagtcgtatcgttcctactcggcctcctttttccccaattggtaagcgcttcaatttctcgttctcgatccgagcttcgttctgataatttctctctccctttgttagagtgtttaagcatctgaattagcattgtttaaatcttaatttgataaaatagcaaattagtataaatgttgtgtattctgcggatatatgaaggttaatactttttgcaggaagagtaacaggcaccagcaacaacagggagcagccatgcgcttcagttgatacagatagtgtaggaaaggagaatgctaaagttgaattgcccaaattgagtgtggagcgacaacagatgaagaagaagaaaaagaatgcagggtttaatttgcgcaagagtttagcatgggatagagctttttcaacggaagaaggtgacttttttttaccaatttcctgttagtagtaaaggtcaaagatttggtctatgttactaagaatcttaagatgtgtgatatggtcatgaaccaggtgttttggattcatctgagttatctaaaataactggaactgcttgccatcttggtggagatcggttagctgccattcaggaagagtacagagagtcaatgtcagcttccaaatgtaatgtttcaccaggactacaagcacttgaagaaaacttatttaacgacttgcctgtgaatagtaaaaacagagagaagaagcttgtcagtggcataatgcccaagtacggatcaccatctaaatcccaatcttcctcggtgagtttactggacctaaatattgtggagctaatgagggtcataagtcgtttctttccttgcgtaaatatatatattttgaggcgcagtctatctaaatgtcgaatatctgcattataggcccagaaaaaagttatctcagctcaggatttaaggagtggttccaagcgcagtggctgtccccggcctcctccttcatcttcatatccttttcttactttgagtactgagtgtataggcaatcttgatatcctttgcaggtcttgtttttgttctttttgcttgtttaccttaaccatcttgcaccctgaaaagacctgcaaatgtgcatacaacaacatcacgttgcagggagctgagcatatctaaagttcctactaccaaatctgacccagttacagttggaaacaacatgaaaaggactactcaaagtccaatcaaagcgaaaaacagtcaacctactcaattaagtatgttcacttcagttagcaaataaaaactattcatctcatatcctttttagttctgttacttttcatcctgtttatatattgctacatggttttttgtctgatatgacagagaattctcagaggagcttaggatctgaaagcttctctaaaaacacttcaagcaccaagagtaaaacaaaatccagtctggcgagtaaatcttcaattcctaagccctctcttaagcaagctagaagaaatgtggtaaagctatgctgccctctgcaaaccaatatagcaaatagtttatgcactaaaaatttgcagcaaatgctttgtttccaatattcttcctattaagagtaacctattgcattttcttgaactctagatcagcaaatcttcagaaattccgacagtatcatactcacagcattctgttgttgcaaaatccaacgttggccctatgactgcatcagatgtggctatgcttggtcatgcatcagttattccagactctaatgtaattactctgggcacctcgttagctcaaagttcttgcaataaaactggaagcacgcagtccgcagtttcacgactgggaaagccatcaggcttaa

SEQ ID NO: 179712 - DNA, 136 bp, Arabidopsis thaliana landsberg
tcgagtctctctcgatccgatcttcttcgtcggcgccgttcttcttcgcaacgactgctcttcttcttcgacgactgttcttcttcgccgccgtgtctacatcttctacgcctctactgttccatcaaacttcaag

SEQ ID NO: 179713 - DNA, 113 bp, Arabidopsis thaliana landsberg
atgacaagtgttcttatcaagacatatcaaggtacaatttgtttgtcatcatcttctggaaccaaattctatttgaaccttgattttgatcctgttacagcctttcggaaaag

SEQ ID NO: 179714 - DNA, 207 bp, Arabidopsis thaliana landsberg
gtgaacggtgtggagaccgcgcccatcgcctacaacgcgaacgacgccgccatcaaggcagccatcgtcgcggtggacgacggtatcctggcctcggatgtgacggtcgcctctggcaccatcactggcccgttcgctctggcgcacggttcggatgcctccctgaccggtggcaccagcccgaacaccacggtgactgagggctaa

SEQ ID NO: 179715 - DNA, 36 bp, Arabidopsis thaliana landsberg
atggaagctctaaacgttcccatggcagacactcct

SEQ ID NO: 179716 - DNA, 321 bp, Arabidopsis thaliana landsberg
ctcggttcgtgtgagaagctccagctgctggacctcggcggcaacgcgttctccggtggcatcccgtcggagctcgggatgctaccgtcattggagatctcgcttaacctcagctgcaaccggctttcaggggagataccgtcgcagttcgccggccttgacaagctcggcagcctcgacctgtcgcacaacgagctctccgggagccttgagccgctcgcggcgctgcagaccctcgtcacgttgaacatatcctacaataccttctctggggagctcccaacactcccttcttccagaagcttgccctcagcgacctag

SEQ ID NO: 179717 - DNA, 457 bp, Arabidopsis thaliana landsberg
ctttttgaagacttctatttagatgtatttagacgcctcagtcgtcaccgtcgcacccggaggcttgttcgagtttattccagtttggttggcttgctgggttatgaagttcttggttctggtttcgagagattggctctctttatgataagaggtggcagattttttttcggggtggccgtgggcagccgaagtaagtctcatcgcaagtgcttatgaggaggaggtcttatttgccgcttgtagctattgttttctttggtttttagtcttgttgcctctgtttatgtatttgggttcgttctcttacgtttagggtccaatttttgctgctttgtgttttagtttcttttgtttccctttcatagggctatgcttccggggatatcttcgttttcctccggctttgtctccgagaactttaatttcgttcgtcggctttgtttctcttgtttag

SEQ ID NO: 179718 - DNA, 222 bp, Arabidopsis thaliana landsberg
gaggatacagatacggtcgcggagcccagctctaagtcgcgtgctgccccagtgaggatacacatcaaagcaaattttgccaatgccttcatcctggaatactcgagaaaacattttcaattgggatacgtaaactgtcgagtggctacgaaaggataccaggccagcaagagccatggcaaccattcgcaacatctaatctccgagtgtctctcgcattga

SEQ ID NO: 179719 - DNA, 340 bp, Arabidopsis thaliana landsberg
atggaagaagaggcaaaagaaagagaaggtgtagactactctcaactaaaggtaaatgaagagcttattgctggtggcagctggtgacagaatggcaaaccccagccagtttgagggttcaatgatgttgccactgtgcccaaacatgttccagcagcaactcaacatcattgagtttaatcagcaacaaccactgaacccaaacacgttccataaacaatgcaacatcaatgagttcaatcagcagcaaccattggatctaaagatgttccaacaacaatttaacatcaatcagttcaacaagcaacaccgaaaccaagatttttatggacaactctaa

SEQ ID NO: 179720 - DNA, 128 bp, Arabidopsis thaliana landsberg
gtcaattgaaagggaatatgatgacctcagtttgaaatcccgagaagcagaaaaggaggtcaacatgttgcagatgaagatacaagaagtaaacaatagcctattcaagcataacaaggatacagaat

SEQ ID NO: 179721 - DNA, 914 bp, Arabidopsis thaliana landsberg
gtctaaccgatacatattgaagaaattcaatacggatatcttagctgtttttgagacacatgcgggaggagataaagcaggacgcatatgccaggggttggattttgagaacttattccgggttgatgctgaagggcagagtgggggactatgggtgttatggggtacatgtataggcgatgtggtgattgttgagtccgcttatcagtttattcacgcaagagttgtaaacggagatgcagctgtggacctaatcgttgtttatgctcctccaacgccgagtcggaggagtaagctttgggacacgctaagtgcggtgattcggggagtaaagggactggttattataggaggggattttaatatgattgtcagagttgatgagagatcaggaggaagtgggcgactatctcctgattctattgcctttggagaatggataaatgattcctcactgttgacatgggtttcaagggtaaccaattcagttggaagcgggagcgtgaggagagatttttttgtggctaagagacttgatagggtattgtgttgtttgcatgctcgattaaaatggcaggaggcaacgttaacacatttgccctttctagcgtcagatcatgcacccctgtacttgcaattggcgctgggagttggcaagaataggtttcgaagaccctttaggtttgaggctgcctggttgtcgcatccggggtttaaggaactgcttttagcatcctggaagggtaatatcccaacaccagaagctttaaaaggaatacaaacaaccttgaggagatggaacaaggaggtgtttggtgatattcaggaaaagaaagagaagttgatggttgaaattaagacagtccaagattcactttatagtaaccaaacagatgatctgctacggcgtgaaa

SEQ ID NO: 179722 - DNA, 74 bp, Arabidopsis thaliana landsberg
ttaagtgtttacttttggccggcgatgatgatttaattggtggtgttggtgatgatggcattatcggtttgtga

SEQ ID NO: 179723 - DNA, 1751 bp, Arabidopsis thaliana landsberg
atgagttctgtctctacggcgtcactgaattgtcttccagatgagcttcttgtccacgtcttgtcctccctggaaacgaaacaagctgcttcaacctctgttctctccaagaggtggaggactttgtttgctgtccggcgtaatcttgactttgacgattccatcatttctcacccggaagtgggtgaacagaacatggacgacgttcaagagagtttcagggactctgtcgataaaagattggctttccaaggcagtgtccctatcaacaagttctcacttatatatggagataaacatgacgatgttcgtgttgatcgctggataaataccgcgctggaacacggtgtctctgagcttcatttatgcttaacatctgtgactcgacgtctacatcgtttcccatccaatgtattcaggagcacaacattggttaaacttacattgggaacaaatctcttcatcgtctattttccttctgatacgtgtcttccggttcttaagattctcgtccttgattcgatttggtttgatagaataaagttctctaatgtgcttcttgctggatgccctgcacttgaggacttaaccatagaccaaaagtcttttccagggttgccgaacgttgtttcgagcaaaaccgttaagagtctatccatcgtctataaatattctgctgatttcgattggtttcgcactgttgcacttgacacaccaaaccttgtcaccctcctctactctacctatgctcggcataggtatcgacattgcaatttagagtcccttgtcaatgctacactggatcttcatttcttagaaaattgtgatgaggcttttgaaccgaatgtgacggatctcatgattgcggtacgcaatgtccagatgcttcatttgacttcttctgctactgaggtcagtttcattttgtgtaaagtctcataatctttcggttagaaaacatgataacattctttgtgtgtgtgtgtgtgtgtttcaggtgatttcgcaatgctgcaaaggcgggctccccatgttcaaaaacctccttgttttagtgtttttgggtaacactgaccgagtttggaaagtgtttcttccacttctgctagagcattctccgaacctaacaaaattgtgtctcgaggtaagaagtaaaatcttactttatctatgtatgactgttgcatgggattaaagtagtctctcttcttaatacttcagggtctgtatcatggcacagatgaagatgagtttgatgaaattcacattccccggagtaacaaagttaacatgttgcgtatcatacagtgtcaaggaactgaaaacgagctgaaacacattagccatttcttactgaaaatggagtgtcttcaattggtgcaagtcaatttttcagagacaattgttgactccaaaaaggtgcaactcacagaggatctgatgaagcttccctctgcttcatccaggctcacgatgcaagtcatttgatcatcatcgtcgtcgtcatcatcatcatcgtcatcatcatcatcatcatcatcatcatcatcatcatcatcatcatcatcatcatcatcatcatcatccatgtgttgttttatttcttcaaaactcaattgataaggtctttattgttttaactatttatggtttatgtttaggtcttttggtcttgaaactagggcttcttgaacaattatagtttatgtgtacttcttttattctccagcataacgggaactatttgttga

SEQ ID NO: 179724 - DNA, 345 bp, Arabidopsis thaliana landsberg
aaattatttgacgggttcaacggcaaacacctgctgctgatcggtgatgtaatgctcgatgcttatgtatggggaaaggccgacaggatctcgcccgaggcgcctgttccggtattgaccgtaacgaaaaaagacgaacgcctgggtggcctggccaatgtggccattaacctgcgcaagctgggcgccagtgtaagcgtttgctcggtagtgggcaacgatgaggcaggcagaaggctcattgatctttttcaatctttgggaatcgattcttcacacatcattagcgcttccaaccgcattacaaccgtcaaaacacggattattggtcatacccagcatgtg

SEQ ID NO: 179725 - DNA, 339 bp, Arabidopsis thaliana landsberg
gactatccacgatgcgagacgtgcgtacgacgaaacgatccggttgatgaagagtcgttcatccgcgtcgacacgcatcatgatgcaatgatggatcaaggggatggtgaagatctgcgatcacgaacggatagacatgtaatggacagtaatgctgtccatctattcgatccatgtcaagaattgggtgcccggccggattcgaaccagtcgtcttccgggccaacaccggatgtccttccactgaacgacggggcaacgcatggcttcctcgacgtcatgggtgccccgctggattcgaccagggtcccggattcagagtcgggtgtcctacgctag

SEQ ID NO: 179726 - DNA, 1288 bp, Arabidopsis thaliana landsberg
caacattatgatggttgtctccgagaaaccttgaagttgaaaggtttatccgatgctgacatcaatcttatagaaactcttctttctatacagccccacaaacgtgggactgcgtctactgcccttgtttctcaggtaaccattttatccttcagctgttataacagcatcttgtttgaagatttggaactttgattttcaggaagatgttattttgttgtattgccacatcttttaaaacattccctttgttcttttcagtattttacttcaaagccttttgcttgtgatccctcaagtttgcctgtatactcgcctagcaaggagattgatgcaaagcatcgagaagacacaacaaggtcagaatttcattcattaccatcattgtcactatatcttacaagaaacatacagtgaaaacacagtttacccttgggagttacttggttaatctcagcaccataatttttttggacttaatttctgaagtgtcttgtcctgtaagcacttattcattatcctccaacgttattgtggaattccaggaaaaaaatcagcgggaatgggagacgtggtacagaatcgaggaagccaacacgaaagccccctgcatttgctaaactggcaccagctgaggtacaccaacacgaattccctgcatttactatctgcatctctcagaagggaattccttacgccaaaaaaaacaaaaaaaatagcaaaaaccctctcctttctctacttgcaggatgtacggcaccactcccagaagtttcagaaacgtaatggtcattcagttcataattcgattgatagtgattccactttatttgagaaaatgcaaaagccatcaaatcatgaaaaggatgaagcttctcatgtgaagaacgcatcacaaggagatgtgcctttctcagggcctttgcaagtctctgtatcaagtggttttgcgtgggcaaagcgacgaaaagatgatatgtgtgttagatcacataatagatctctttcaagaggtcatattcctaacctgttgggaccttctcctgctttcagtgagaatactgacgttgactctaaaaacaatgagaaagaaatggaagaaaaacatggggaaagaacggattctcaagaccgtgaggcgtatgagatgttgaaactttcaatgctaaagaagtggaggcaacttgaacgaccagattcttttggtggttctgacgagtatcattcacaggaactgtcattggaactttatcagcgagaagaaaaggcagcaaagctgggtcatttg

SEQ ID NO: 179727 - DNA, 136 bp, Arabidopsis thaliana landsberg
atggagaagaaaaagcagagaggtgaagttcgcggcggaaagggtttaactacaaagggtttacacggttctctaaaacgacgtcgttatgttatttacctattacaaattattttaaaccggtcgatgatatacg

SEQ ID NO: 179728 - DNA, 390 bp, Arabidopsis thaliana landsberg
atgtatggtaaagacgatgccacctctgaggaaattaccaatgctgcaaagctctcggaagccatctcattcatcaacaacctaccggaaggattcgaaactcaggtatgtcgaacatcagatagcttagaacacaagaaattaacaactgtaaaccctagattttgcttgttattcggtttacaggtaggtgagagaggaattcagctatctggcgggcaaaagcagaggatcagtatttctagggcgatagtgaagaatccatcgatcctcttactcgatgaggcaacaagcgcactagatgcagagtcagagaaaatcgtgcaggaagcttttgacagggtgatggttgggagaacaacggtcgtggtggctcatagactctccacg

SEQ ID NO: 179729 - DNA, 216 bp, Arabidopsis thaliana landsberg
atggcgcgcgcgcgcggcgtgagctcttccttgcgctgaatgcctcgtcgcgctgcggcgtgcaggagatgagtacgaatcatttccatacgggctgtctcaaccaaacggaaagaatgacaccagatagtggtgtgaacggttacaagactaaaaactatgaaccaaacagcaccgaagagacacgtcgcaaatctggccatcaacgatattcta

SEQ ID NO: 179730 - DNA, 343 bp, Arabidopsis thaliana landsberg
atggtactcgtctatcacgtgatagaggcaatgtgtcacgtgaggggtgagtttgactgagcatgcacatgggatttttcattttttgcctccgatgtttttagtgaaatcagacaccttaagatcgtgtgattaacgggattaaaaaaaatgtggagcgtgagagacacgcgtgacaggcgagagagggcgaacacgaatgtcccacttgagctggagaattgtgattagtgatcgatcgaatgcggcggcaacgatggtggtgaagtcggataaaaaggtcaccgttaatgctcgttctgagtcaaagagaatcaacggccacgatttgattataagctga

SEQ ID NO: 179731 - DNA, 145 bp, Arabidopsis thaliana landsberg
atgaactatgcaaaacacgcatttacactgcggactgtccgaatgagaagagagcaccgtctgggaccaagcttaaaccgttcggcctcagacgcggaccatccggtcgttgaaaaactagaaaaacccgaaggtgacgggttcg

SEQ ID NO: 179732 - DNA, 1419 bp, Arabidopsis thaliana landsberg
atggaaaatacagcttgggtgaaattgagagaaggaaacgacaagaaagtaggagttgtgttcaggacagaaaatggaagacttgttcatggaggtgaagttagggcaaatcaagaatgttggactttgcttaaaggtggcattgtaccagatttttcaggccctgtagatatattcttcgaggtacaacactgtaaatgtgtactcacatgtttagatacatacgtatattctctgtgttaatgtggttttaatgcgaaaacagagtgaaaacagaggagcaaagatctctgcacacaatgtgttgctaaaacagtttagcaaagaagaatggaaactgaaacaggaccaacttattgaaaaggtagaaatgatctctacatataaaatttacatgtatctcatattctgatgaatgaatccatataaaatgctttggttgccttgagccttattttcttatatctatatgtgtgcagataaggaagagcaaagtgagatttgaagtaacttatgagaacaaaaccgcagtaaaaggcgtagtgatatcactaaaacaaaccaaatcatcttttctcttaggctgtggaatgaatttccggatcctacaaagccaagggtacagaaaatggtttgcgtcgcggttcaaaatcacttcattcactaatgaaatgaaatggtatgcaacggagaaagcacgaggtcaagagaactacacggtagccgattcaatgctgaaatttgcggaagataatgggatattggttagaggtcatacagtgttatgggacaacccaaaaatgcagcctagttgggtgaaaaatataaaagatccgaacgatgtgatgaacgtgacattgaacaggatcaactcggttatgaagagatacaaagggaagttaaccgggtgggatgtggttaacgagaatctgcattgggattactttgagaaaatgcttggtgcaaacgcttcgacaagtttctacaatctggcttttaagattgatcctgatgtgagattgtttgttaacgagtacaatacgatagaaaacactaaagagtttactgcgacgccgataaaggtgaagaagatgatggaggaaattctcgcctatccaggaaacaagaacatgaaaggagcaattggagctcagggtcactttggtccaactcagcctaacttagcttacataagatctgcattggatactttaggctcactaggtttgcctatttggcttacagaggttgatatgcctaaatgccctaatcaggtctgtcatcaactaccttggctaacaagaaagtctttttattcgttatcataaacataaaattggttgactaattcgattgctccataggcgcaatacgtggaagacattctcagggaagcttactcgcatcctgcggtgaaag

SEQ ID NO: 179733 - DNA, 121 bp, Arabidopsis thaliana landsberg
atacgatgtagccataagaaaaattgtggatttaaatgctttacatggatatgatcaattgaaagtggaactagagaaaaattttgatcttaaaagcaagttacgaatccacaatcaatga

SEQ ID NO: 179734 - DNA, 199 bp, Arabidopsis thaliana landsberg
gacaccagcatcgtcacgcccgagaaccaccccatccacatccatggctacgatttcttcatcctcgctgagggctttggcaacttcgaccccaagaaggacgtcgacaagttcaactacgtcgacccgccgcagcggaacaccgtggcggtgcccgtcaacgggtgggcggtcatccagttcgtcgccgacaacccag

SEQ ID NO: 179735 - DNA, 131 bp, Arabidopsis thaliana landsberg
atcgatctacaaccttatatgaagaagatgaagtacagagagatgagagaaaaacgactttgcccttgcgtcaaacggccacaacgaccgcacgtgtatctcacgtgttcttcttgaaagctgtagaatga

SEQ ID NO: 179736 - DNA, 138 bp, Arabidopsis thaliana landsberg
agaggcgaggagtatggttgtggcttgggagttgaagtgctcgatttgggctacttcatcctcatcatagttttcatccccttcggatggtacctgtgcaccaaactcaacaacatcccatatacttttgtggagtga

SEQ ID NO: 179737 - DNA, 227 bp, Arabidopsis thaliana landsberg
accccgatcaccccggcacttcctacgcccgcgaggacggcttcatccaccacgccgaccagttcgaccgcgagttattcggcatctcgccccgtgaggcaaccgccatggacccccagcagcgactcctcctcgagaccgcctggaaagccatcgagcacgccgggatcggaccccacctccctccgcggcacccgcaccggcgtctacgccggcgtcatgtatga

SEQ ID NO: 179738 - DNA, 355 bp, Arabidopsis thaliana landsberg
gttgatctgaaaaggacacttcctagaggggacaaggatactgatatcaaagcggtatcaaagaccaggaaaatctttgttggtggacttccaccacttttggaagaaggtaaaagtttctcctatgttttctgttattgtctgtggttataactgttgctgataatgtgtgttcatatttgtagatgaactgaagaattatttctgtgtatatggtgacataattgagcatcagatcatgtatgaccaccacacgggaaggtcaaggggatttggttttgtaaccttccagaccgaagattctgttgatagacttctctcccaccgaaaagttcacgagctcggtgacaaacag

SEQ ID NO: 179739 - DNA, 133 bp, Arabidopsis thaliana landsberg
gcctgtgatcgccatgatagccacacggcccatgatcccatatatccagagcggagcaaatcccacgacctgtcaaatgccatcaacagcagccctctcctaccgatcatatgccttcctcatgtccgtctag

SEQ ID NO: 179740 - DNA, 18 bp, Arabidopsis thaliana landsberg
atgaatccgaaacgaatg

SEQ ID NO: 179741 - DNA, 94 bp, Arabidopsis thaliana landsberg
atggcccgtgtttgtttgttcctcgtcgtgctcctcctggggggcgttgtggtttcaccgttcgcgggcgccgcacccgtggacgttgtggagg

SEQ ID NO: 179742 - DNA, 367 bp, Arabidopsis thaliana landsberg
agcccaccggcgctatccccgccgtgaactccgccccctcccggtgagcagccccctcccaagcatctagggccaaattgagcctgccgttggaatcgccagcctcggcccgtgccaaaccaccctcccttggtcgaagaaccgggcgcaaccggcaagccgccgtcaagcttccccggcggccggccttttctccctcgctcggccggttcgccccgccgtctggccgcgacgccgtttcctcccccccctctcgctggcaagtgggcccacagcaacgccgtcactcctcgcagccgcgccgtctccccctcgctcttgggccgtcactgggccgcaccggcttcagcgcgctgtcgcgcccggg

SEQ ID NO: 179743 - DNA, 192 bp, Arabidopsis thaliana landsberg
ggttcttatttgctaaagataaagcggaaattgatttatacagccccagactcaaatcaacctataatgataaaaggctctcggtatatactgaatatttgttgcgtattgggaaaagcgaaaatgataatcaatatcattatgcaccttcactgattgacatgattaaaacgcatcctcagcatgaaattg

SEQ ID NO: 179744 - DNA, 1642 bp, Arabidopsis thaliana landsberg
atggtagtgcaggtaattgtagcctgctctgatatccatgaaagctctttttatttggtttagcttcatgataaattccctttcattctgtcttgttgagctagttttgatgaaagcagcatgaatggtagtgatgctactagcttctattgttagtaccataaactaaattataatgaatgattcacttgcaatgatcttcattaattttgatgaaatattatctcactggctatttagatatagagtagtaaaatattgaccacaagcctagatatatttcccatgatgaggcgctttatgctcaaatgactgttagctttctgtgcttctgttaacttattctttatagaagatatacttgtttaactcaaacactgttttgactaggtagaacaaaattaggctttgtagaactatactaaccatcatgtctactggttgttcttattttctcttgcaactgcagacacctaaagctacagcagaaatcaaggagttggagctcgatttatctaaggacagagggtcagggaattttttcatgaagttgtatctattgccgatatttgtacagattggtgaaccacatgttacttccactcattcacctgagatggacagtgacatttgcctcgctaggcagacaccttccaaaaccgcagaggggtcttcttcttcttcttttcattgcgaaaagatctccttgtcctgcgaatttggtcctaataggtaccttttgcttgacatactcatatgatttcttaccccattcacatgtacattttaatcctcatggctgccatattttggtcttcctggagcagaaaatcaagtccaagtataaagaacgtcgaagtagacctagctaatgctgttttaaaccttaacgagaagctgctgttgaaaaacaaatcctcgacaagtgctgcttccaaaggtgaagtgattgattcaagttcaggtaacaccacttcagagaagcctccaaagcaaccaatgaatgttttggttgcaaagcatgcttcaaaattccctgagaaggtgagtgattttttttagcatgagataactgcaagtgtcttttattgattatatatgcacacatatgcatgttgcatcagcatcacttatccaactcatagttgctaaaaacaaatcttacatttcgttaagctacagttagaaaccatgtaagattaatatttgcttctacaatgaaaggagtgtgtgcatatggtgtatagtcaatttttatctgaagtcttactcgtgcctttgactttatgtggtaggttttatttgatttaacgaagcttgaaatcagatttgtgcatcaagaacatgatttttctatcgccaacagcataaaaggctttcaattgagaagtgccaaatctcaatctggtgaagatggcaaggaagacacatgtcttgattttgccatggaactccaggagatgcatgtatgttaaaaatcagttgtcttagtaataatccagtgaaattttcgttttgatgtaccatcctctgttgctgcctttaaatttccctttcatttcagctttttagagaatctgaagtttctgtcttggagatgacaaaatttggagttttcaccaaggtgtattgtccgatacag

SEQ ID NO: 179745 - DNA, 168 bp, Arabidopsis thaliana landsberg
atgccgccgaagaaagcttcagggctaggggctgcactgcagcatctggatgtcaaccaggacacattgcgtgaacccgaagccaaaaaaggaaggctacaagtccgacgcctcaggacgaagagttggaccaagagatcagggatctcgaagccattcgatcaacag

SEQ ID NO: 179746 - DNA, 247 bp, Arabidopsis thaliana landsberg
atattcatttccaaacggtctattgacagatgggctaagaatttcacgggttacaaaaaagtggtccaaatcggaacataatagaaacaagatcagtaaaacgacggttcaccggccggagacgcagccttcaccttctatatccgatgcaaatttaacatatttcgaacgaatctatgagatctatatgagaattttgcttcttgggttttatacggttcgggaaagtggatgtatcaagttgtga

SEQ ID NO: 179747 - DNA, 303 bp, Arabidopsis thaliana landsberg
agagatttccatgacaacaaaccaatgctcgaaatcacaaccatcaagcaaaatcgtatcctttggtggccgattcgaccagttagggctcggatcattcagcgacgggaagtaacctgcgtagacatacacctagctagagatacaccggcacggaccaacgctgagaatccagcaacgagagaacgtgaacgattcaacaacgaagacgcagatcgagaaacagtaggggaattggcgagaggagatgacgaagagaaggaacgagtgaacagtgaggaaaaggatttagctggccggtga

SEQ ID NO: 179748 - DNA, 175 bp, Arabidopsis thaliana landsberg
atgaggcgtccaagtcttcgtgttcaacgagccaacgccagggctcctgctcgtgctggtgatctgtcagccatggtgaccgcggctcgaaacactctagccgtctccagcgcatctgcttcagtgtctcatccctcgtttcttaagatcaataccgagacctctactgcagcag

SEQ ID NO: 179749 - DNA, 253 bp, Arabidopsis thaliana landsberg
atggccacctttttaagctcatcttctctaagtttcttctacacggcttcggaagctcttccaaccattgtaagtaagtcttttttacattctatttcagtttattgaagtagttcttgatttcatttgttttcttttaggattttttgacggtttcccatcaattgcttctaattatggttggcgattacaagaattgaatcagctagctattctgtgggtttatattcaaaacgttggagaattttgttga

SEQ ID NO: 179750 - DNA, 401 bp, Arabidopsis thaliana landsberg
atgccgcgagtaccaaagtcgcccggcgtgcagggccagcgacacaaccctctcgccgaggagtacctcccctccgacccgtacaagaacaaggtcaagcgcaccaagcgcaacaagtcggaagaggacaatgagcagggctatgtcgactccaagtcctcgcgcaagatcctggaaatcggacgggagctggaagaggaggacgagcgcgagaatcagaagggcaacggcgcccccaaggcggcaaacccagccttcgactttgagtcgaggataggcgaagaggatctggacgagcatgtcgagggccagttcgacgatgacgaggaggcctggggcgaggaagaggaggagatcgaggaggtcgagatcgacgccaacgacctggcggcgtggaccaa

SEQ ID NO: 179751 - DNA, 215 bp, Arabidopsis thaliana landsberg
atgattttgtcgaaacgatggcgttttctctggacgatgttgcctaaactcgagtacacagaaagcaacgaaggcggaaagagtatttgggacttgctagaaaagtcattgcaactacacaaggcaccttcagtagaaagcttgcgtatcatgcttggtccacaatgtcctgttgatgtagatgtcggaaagtgggtctcgaatgcagttgaccg

SEQ ID NO: 179752 - DNA, 263 bp, Arabidopsis thaliana landsberg
gacaatatgaaactactggatgatttggctgctctgagacctactgtatttagcagtgtccctcgattatacaatagaatatatgctgggtaatataatggctttggtttgttgatatgcgctctctgctgattttgagaatccactgaattaatgtaaaattcttgttcccagtatcattaatgcagtaaaaacctctggtggtctgaaagagagactcttcaatgctgcctataatgcaaagaagcaggctctcttgaatg

SEQ ID NO: 179753 - DNA, 199 bp, Arabidopsis thaliana landsberg
agctcttcaagaagctggggagggggatattgatgctagattggccgcctcctctgggttagcaaaccgtgagtacacacttatagctatcattcaagttctctttgaggggcgttctaaaataaattttggattatgctaactgttattggttgcaggggtggttgaagatctagaggatgagagtcatacttctcag

SEQ ID NO: 179754 - DNA, 60 bp, Arabidopsis thaliana landsberg
atgtgtcaacaggctctcaactcaacagaaaccaccaatctttatgagtggatcaaagtg

SEQ ID NO: 179755 - DNA, 282 bp, Arabidopsis thaliana landsberg
cctctagctcgtgtagaagcttctaagagtctaaagacacgctccttatcctttaaagaagaaatattctccattgaagacacttaccataaccggacccgagggaatcacaccatgattccggccacaagcattgaagctgcgaatattctcaagacatctaagcctccttttcaactagaagactcaagccacgagattatatctccttctccaagacacatcccacttctttccatatccggcaccaacgcatcaccaccacttattcccaacggctag

SEQ ID NO: 179756 - DNA, 64 bp, Arabidopsis thaliana landsberg
atgggggggggcgggggggcggagtgggcgggggctgggggcgtcggggtctgcggaggggggg

SEQ ID NO: 179757 - DNA, 66 bp, Arabidopsis thaliana landsberg
atgaaaaggaagatagagctgacacttgcgacccagatgtcggaggcactaaatgcaggacaaggg

SEQ ID NO: 179758 - DNA, 528 bp, Arabidopsis thaliana landsberg
  unsure (1)..(528): unsure at all n locations
ttgcaaaaatgataaaggcattcctgattacaacaattatcctgacgatatcggtaagctggtttttacgaaatgtgctactcccggttgccatacggatgccagcaaaggtgccgctgcaggtttgtcattacagggttgggataaattgtttgcaggcggcacaggcagtgcggcagttattcctttccgttatgattacagctacttttttttatataccaatactttttctgatttaggacagtcgcatgttcctacaatgccttataatgggacgccattgtcgcgcgaagaagttgtcatgnnnnnnnnnnnnnnnnnnnnnnnnnnnnnnnnnnnnnnnnnnnnnnnnnnnnnnnnnnnnnnnnntgaacgtaaaaaaatctatgttgcgaaccagggatgtgatgttgttacagtttttgaccaggaaacgttattgccgatgcgttatattgatgttgggaatacttcgggtaatgaatcgccacatatggtgagggttgcgcctgacggccagtactg

SEQ ID NO: 179759 - DNA, 111 bp, Arabidopsis thaliana landsberg
gattcaaaaggaagagagatcgaagaagaagagactaacaaaaagtggagaagatccagcgtaagcaagaacgagattggcaccaccttcgcctctgtaaatccaatctga

SEQ ID NO: 179760 - DNA, 180 bp, Arabidopsis thaliana landsberg
gatcaaaaattgacggtgatcggtttaatggatgccgttgcggtggtgaagaagttgaagaaggttggtaaagtcgatttgatatcggttggaccggcaaaagaagagaagaaagaagagaagaaggaagagaagaaagaggaaaagaaagaggagaagaaggaagagaagaaagcgtag

SEQ ID NO: 179761 - DNA, 153 bp, Arabidopsis thaliana landsberg
gaagtttccatagtcaaaggaaagcgttataggtttggtagattgtttgctggcggatctttctcatcttccacagctccaagccaaaccattgcattacttcaagagcttcaaacaatcaaggagcgtgaacttagaaggaccttcaaataa

SEQ ID NO: 179762 - DNA, 259 bp, Arabidopsis thaliana landsberg
gaatgatcacacatctgcgtatgataagaacgtcgaggaagaattgcaaccgagtcaagtgcctgatgagatgataaagcctgactctgacaaatattggtcgcctcatcctcaaaccggtgtctttggaccttcctcctcttcctcgactgacacaagggacgaatttcgcggcggtcaggaggactcagtgatggaggagaaagcttggttccgtccaacaagtctcgaggatttggacaagactcaccattcgtag

SEQ ID NO: 179763 - DNA, 424 bp, Arabidopsis thaliana landsberg
  unsure (1)..(424): unsure at all n locations
cctccagtggacgtagcccgccaaggtggtcaaatagtcgatcttgtccacgtgcggctctgcatgctgcaccgcgtggagcaaatgggccgcactccatcttgccgagatgacctggccatgcaactgcgtcaggcgatcggcggcttcagccgtataaacattgcgccaagtacggaaaggcaccagcaannnnnnnnnnnnnnnnnnnnnnnnnnnnnnnnnnnnnnnnnnnnnnnnnnnnnnnnnnnnnnnnnnnnnnnnnnnnnnnnnnnnnnnnnnnnnngtggcatccctgacaaggtccgcatagcagctctgaataccggtccacacctgctccagtccatacgtccagttgtgatccaagtactcactcgcccaccggaaggtgccggatgccagaacccggccgctgtcgtcg

SEQ ID NO: 179764 - DNA, 826 bp, Arabidopsis thaliana landsberg
atgcaggtggtgtcgtagtgaagctcttgatgacttgtgcttcagtaaagctgaagccttgcgacttccaagccaagtcttcctttgtgaattatgatttaacaggttggatcttatatagcttgttgtagttcttgcagagtttcggtggagatagagagaaaattgttaactttccagaattttgacttgtattgattcgcttgttctgttttgtaatgtctgtttgttgttgttgttgttgttgttgtaattgtttttgagtgttacaagttttgaattgtactggatctttttgctcatatctattgaaaggtgcttcattttgtgtttctttcttgttatgttttgattttgagctattcacttttgctaccatgctctcaaatgaatcgatcatactgtatgattcttgacttgtaacattgttagagaaatggaaataagtgttgttgatatcgagaattttcaattgagctgaatatatcaagtactttacttctctaatttttgtgtgaatagaagactaaagtaatgttggtgttttcatatagatgtaaacacagtgtttttagattgtaaacgacaacagaaccgcaaagaaaccatcaagccttcagtggagtcaatagtatttgtgtttaaaatgcagctttttagtatcaagtggttcactgattggtaccttggtatgtgttcgtgttagaaaggttatggcttgtttgttttagtggatttatatcgcgttttagaattgttctacgcgtcactgccgattttggaagttagtagctgctacggccagaatgagcaaagatctacttaa

SEQ ID NO: 179765 - DNA, 372 bp, Arabidopsis thaliana landsberg
atgatcatgcaggtgcacattgcccagagaggtgccattacaccactgattaagatgcttgaatcatcagatgagcaggtcgtggaaatgtcagcttttgctcttggtcgtttggctcaggtatatatgtttttgaattagcatgtgaatgttttgttgcttttaatatctgactctttgtagatgattgttaaatcagaccttttgtgataaaacaaaaattgtatgttttgaatgttgcaggacgcacacaatcaagctggcattgcacatagaggaggcatcatctcactactaaatcttcttgatgtgaaaacggggtctgtgcaacacaatgctgcctttgctttgtatggccttgcagataacgag

SEQ ID NO: 179766 - DNA, 120 bp, Arabidopsis thaliana landsberg
aacaagatgacagataaaccggaaaggcaaactactaagaaagacaaaaagtccacttttttcatcgttgttagacaaaagaggaaacaaaagaaagaaacgttacttgaaaataagtaa

SEQ ID NO: 179767 - DNA, 136 bp, Arabidopsis thaliana landsberg
agaaaaatactatggtaaggaactaaggatccatgtggtaatcgaagagtcgtcgatcacgtgcaatcctccacacgtgttaagtcagctcgtagttgattcttcccccttgacggtcatctcatcggacggttga

SEQ ID NO: 179768 - DNA, 123 bp, Arabidopsis thaliana landsberg
gaaatattaggagtgttcatgaatacatgcatgctacactatgctacgtacagaaacatcttcccactatgggcactcgcggaatatcggaaagctgccttcgcaactcatcaagatctttag

SEQ ID NO: 179769 - DNA, 46 bp, Arabidopsis thaliana landsberg
atgacgtctagatccgatgcagccaacgcggaagaacaaacgggag

SEQ ID NO: 179770 - DNA, 118 bp, Arabidopsis thaliana landsberg
atgcttgatcaagatgttagtcttcgtctagttggaagtactcccttagcaaatgtgactgctgcctttcaagttcaagcttctcctgttattgattctcaagttaatatggctcaag

SEQ ID NO: 179771 - DNA, 543 bp, Arabidopsis thaliana landsberg
atgaggatgctccagaatggttttgtaatgggaagaataacagattcccgtgataactaccacgaattgaggctcgatgttgatagcatgtcatacgaggtatgtttctcaaaatctcatgagaaaaacacttgcaatctcatcttctcaactttatcgagtgtgtttgctttggtctacgcagcaacttcttgagcttggtgatagaattggttatgtgaatactggactaaaagaaagcgagatacatcgttgtcttgggaaaatcaaaccatccgtatcacatactcttgttgatagaaaatgtagcatctgtcaggtaaactccagattgagtcaatggcttctcgaaacttcagacagatcatgagtttcataatgctattccttattgtttgatggtgacaggatgagtatgagagagaggatgaggttggggaattgaactgtggacacagctttcatgtccattgcgtgaaacaatggctttcgaggaagaatgcttgtccggtctgtaagaaggcagcatatggcaagccttaa

SEQ ID NO: 179772 - DNA, 112 bp, Arabidopsis thaliana landsberg
attagctccacaacgggtcttgcgagtttactccccagaaaacattaatcttttactctacctgcaaaaccgagctcatggctgccgaattataaaatcgacggcgaattag

SEQ ID NO: 179773 - DNA, 114 bp, Arabidopsis thaliana landsberg
gttttcgctgagcaacaacatcccattagaacggtgaagctcatcatcatgagcatgaaggagaagattcttgttgttgtggtcgccattatcgatcaaaagatcacaaattaa

SEQ ID NO: 179774 - DNA, 2429 bp, Arabidopsis thaliana landsberg
atgatcctttctgaagttgcacatccatccaaaaaagctggaggagttggagtactatataatgttatgaggggtacctatggaagactccattcaaaagccgggagagttttgagcttcttgctgaaagattcaacattatcttttttggacaattttcctcaaggcaagttctatctttctaaagagatgttttagtatttcatttagaagtgtactttatttagaacgctagtgtggttgatttatcctcatcttgattttaattcttagtgtagaggagaatgagtagtatcatagagttttcttatctttgcatatcatttatattaaggtcttccgtgatgaatttaaggctagtgtggttggtttaatgatgctaatatattggtgggaggtgagaatccttattaaactgctttcattttcttgctggaggggattaatgcttctacttcgtagaggatgttaatcatttatatcaaataacttgataagataccctgaacctggttttcacaatttgaatctcctttccttcttatcatggttgaatcttctattgcattacaggcccttgtacagtcgtggaagttgtgagtttggttttgcagagaatatgcgaggatttggaagcagaaaaattaagtgttatgtgggaatacttgtataagaaaataaacaaatcaatctcaaacaagaaatcagttcatctaagccggctgttgagtgtgcttatggcggttgttaagattaaggaaggtcgcaaggttcacggtgagtgattcaattgccgctttgctcctctccctcaccctctcgttctaccccagtctctttgggctacacataccaacatacataattcaacattattatgtcttgccaacttaagtctactgccactgtgcaacagatatcccaccactgattggaatcgcgagccgcattgtgtcaacttttttcacttcctctgagaccgctgtagaaggggataacttatctgctgtccttgatgaagttttggaattgatattatgcacaatcaacacggtcaatgaaatggaaactgttgcttcgctatgggctcccatttttgccttgaagagttcaaggtattctctactatctatctgtttatacttctaaaccttctttttttctgtctttttcttgacattgatcatgtttattttcagtttgctgacttttttgcgggagttcctaaagaaagatcaatcagtagtgaaagcctttacaaagaatatattatggtaagactcatgtcatagtctttttcatcaactcctctttgattctcctacctctctgtcttagtaaactaaattctgttttgcagtgcaattaacaacatgatttgggagtcttctgaggaagttattcctctgttactaacattgtgtgaagagcataagacacaacaaacaagtcacgacgtcgtgaacagcataagtcaaacatttgagagtagatacgagagaattcatgagttcttggaagcaaagattaaaaaggttcaacagaatattgagaatgctggattagctcaaattaatgaggccgagttggctgcaatttggggagttgtcaagtgttatccttattttaaagtggattcatcattattgatttgctttaagaaaactctcagacagcatttggcagtgtcagatggtaagtatcaattcatgattcactcttttttgcatgttagtttattttcattttatgctgtttttcctcttaagacgccactcaaattatgtgctcgatcagtaaattcaaacagatgaagattcatggtctgggccttcagctatacacaatccaaatagttctcatatacaagcgaatttcttttcagcttaccctatctttgccgtgtaacatcttatacaagcgaatttcttttcagtagacacttgcagtggcccagaattaatgtggcagagcttacttggtactactttgaggtcatgttacaaaatgacgggaatcaaccacagtgatctagaggaagctttgtcttttgctaaagattacaagtcatgtgagcaagtgttgtccccggtggccgatgttttggaatttatgcacaggtgagtttgtctgttttggtggctattcagttatttctccatgtttggtgattctgtgactgtaggctgattcatttccctatattgaatcgtaggcctgcattagctcatggtaggtataagccttatccagaacttcaagcaaataaggctggagatgcttttgaaatattttctgaaaatttgcgtcatccgaacaaaaatatccgtcttatgactctgagggttttgtgccattttgaaactttgtcgtctgacccttcttttgaagagcatcctcctaaaaagaaaatgaaaactgagaagaat

SEQ ID NO: 179775 - DNA, 1566 bp, Arabidopsis thaliana landsberg
gatgtccatcatggcaacggaacccaagagatattcgaacaaaacaaatctgtaagctgcccaaatctatgcatgtctgcacatcaattttggagtgttggatgcagtaaattatttttgtgagttaaccttgtttgaacttattactgggagtcattgcataggtattgtacatatccttgcacagacatgagggaggaaacttctatcccggtactggagctgctgatgaggtacctatgcttttctgttttacattgtctcatccagcattcatgagtagatttagttgttggtatatatatgcatataccttatttgtgtgtttggtttgcattatgatttatgtcttaaattttgcgattattttctaatttctgccttgtttccgaaatttgaattttctctaggcggcagaacaattagttgactatgctaattatgggtgcaggttggttctattgttggggaaggttattgcgtaaatgttccatggagttgcggtggagttggggataaagactatatctttgcgtttcaacatgtggttctccccataggtacagagtcgttctacttttccccatttgagtttgttcagttctgtctggatgtgttgataaacgttttggcttaattgatgactaatatgctcaggaagtggaccaaatacatttagctcacttttgaatgtgcactcagtctaattttaactggaaccttctcttgcagcttctgcattttctccagattttgtcatcatatctgcgggatttgatgcggctagaggagacccactaggatgctgtgatgtaagcttcatattcgagctgtaatttaccacttctggaatcagtgtattgttttgtggatatcaacagaggatagatgttctgttctactccttttttcaggtgactccggctggctattctcgaatgacacagatgttgggtgatctgtgtggtgggaaaatgctagttattctcgagggcgggtatgtgttttgcagttttttggagtagcctcttggtttgtaaggagcagcttttgaataatctcctgttttcatttgcagctacaatcttcgctccatatctgcttctgcaacagcagtgatcaaggttagtctctgtgtcaaacttgatatcctttaaatctgcatatagttatggagattcatgatcccgcgtaatctataaaggtgcttctgggtgaaaatccggagaacgagttgcccatcgctaccacgccttcaggagccggcctgcaaactgtccttgatgtactgaatattcaactggagttctggccatcacttgctatcagctactccaaattactctcagagttggaagcacgtctgattgaaaacaaaagtgagtgattcttcccaaaagaaactatttcattcttcatccttctttctgctaataaaatctcactggttttacagaaaatcagatgaaaaagaagcttgttcgggttccgacatggtggaaatggggacgaaagaagcttttgtacaactttctctcagctcgtatgatttcaagatcaaagtga

SEQ ID NO: 179776 - DNA, 641 bp, Arabidopsis thaliana landsberg
atgtcttctttgacaagcgaaaatgctggtaagctctcgttctctctctatcatgtcatttgtaatggatctattcaaattgtattctctcgatgctgatttgtaatgcatcttccgttttcgaaaaaccttgctgacagagactaaggtaggcgtcttctgggacgtggaggaatgcccagtccctgatggtgtggagccatctgtggtttgtgagaatatcaaacttgctcttgagaataagggttatcgtccttgtaatgtctcaatcagagtttatggtgagaggactaataagttcaaggatgactttctcctcgctgatatcatgttcttacccgcaggtaaagaaacacagtacttgtctttttcttttactttatgtccgtatcttagagatctctgttgatggtttcaggagatgaaggagcgagatttatgaggatgtgtaatgatttcttttgctggggaaatgacaatcgtaaatcaactttgatggtaatgtcacgagacagcactgagttcgcctcttctttcgtaatgtacaaaaacttgaattttacattctcgtagcacagccagaaaaacgtatacggaaaatgtcctgtctgcagaaagcctttggaaatgatcatcactga

SEQ ID NO: 179777 - DNA, 803 bp, Arabidopsis thaliana landsberg
ggccacccaaagctctggatgaagatgagaccgagtttcttgataaactggaaatggtgagctatcttcttttattgccaatggactgcatatcagtgtagatattactgagttagtgcttataagctctgaaggatcatgactttatggcgtgatctttgggcttatatcttctctgtcatcttaacaccctcatttgcacttgttgtttatagtcaaagagggaatatgaacgtcaattggcaaatgaagaagatgaacagcttcgtaatttccaggtaactttcttttgaatcttgaataacagttaacaaaagcttacaaaattgttagattaagattgtatcatggttctattttcaggcagcggttgcagcacgatctgcaatccttcacgaaccaaaggaagcagcactgccaccaccagcgccagtcaccaaggtgagtatctcatgattcaatttggaatgttagataaaatttgcagatcttcatctgagcatttgaatcacaaggggttatatatatcttgaactcttttacaggaacaaaaaccaatcgggaagagaaatcctgcgactcgtccatttaaagcgatcataaaagtcaagccacaacccaagaaggctaaagcaacagagaaagaagagaaagagatcccagggaatggaaaaccggccagccatatcgaccaggcttctttagattctgtaaaaggcaatgtcacaggtaaaactactgaaggtctgcaaactggtttagccttagtctcatatagtgatgaaagtgaagacgatgattaa

SEQ ID NO: 179778 - DNA, 161 bp, Arabidopsis thaliana landsberg
gtcatgcaaaaggtgtttgcactgctattgactgatttgcggagattaggtgctataataatatatgcagacttctcaaaggtcattatcgacacagtgaaatttgatctatctgcagctaaggcttattgtgaaagcttgctatcaacggtgcggaatag

SEQ ID NO: 179779 - DNA, 1172 bp, Arabidopsis thaliana landsberg
atggaaaaacatgatctaactttgatttccaaaaaacggaggatagattttgcgacaatcggagatatcccaaaccttaaaggcgagggtgtttctatggtcgctgaatctgcctctgcgtcaaatatttttgcggacagtctagtctatagattgttctttaagggtttggtgagtgatgaaacaactaccgacatggaagagattgtgaaggctggatttgggatagcaatttgcgtcgaggcaaatactttgttgtataatatgaagaaatcactgaacggcgatgatgtgattaatcccgaagaagtagagattaaagcactgatctgtgtgttaaatgtctcaattcaaatggagcttagaaatgtcatgatttgctgtggtgactatcaaatattccaaatcgtaagtgttattttttttctttgttattttttttttttgtcagcaactgatttactttctttgtatttgagtagtacaagttgacatagtaatataacgaggttgtgcaaaataaaaataacgataacttttacttagataacttaaatgatatttttatcctcgtatttacaatctcattggatggttaaattcatttcttatcttattaaaaaatttacaaaaaaatccttaattcttataaagtagcgttactttttcttagatcatacaatagtatactttttattttattgaaatatatatatatatatatatatatatatatatattttatattatttgcagtgtcacatcgttaccattatttttactttttgtaattgcattttggaaaattggaagttttggtcccaaacaattgattgtaaatgacactagaatatatatgccctctcgctttagatgggttattaactaatttgttggcttgcatctgattttttcattccagcttactggtagagggaagcctcagcagaacattgtccatctggtggaacaagtccagcaccttagagggaagctatcttctactgaagttgttttggttccgcgagctgatgttattatacttgcaatagaggcaataggaggagaaacttgttgcatttgtcgtgaaaacaccgatgctgatcgcatgttctttacggacaattgctttcaccgtcaatgcttttcttgcgtgaataggcatgtgcaac

SEQ ID NO: 179780 - DNA, 462 bp, Arabidopsis thaliana landsberg
atgaaacctggcgagaagctggtacgtctcatccatatccagaggcagatgttttatttctttgagtgacattttttcatgccgagaagttatcgtcaagtctttctccacacatttgaatggttttcttatatagatggtattgtagcttttttctgtcagattgcatgcactcttaactctaaattcttgcttgtttctagattgagataaaagagttagatgactttgctcaagctgctcttcatggttacaagtctttaaaccgtattcagagtcgcatatttcagacagtttaccacaccaatgagaatatattggtgagtcatatgatttttttttgtccatactgctacaatgccaattacgtagtcaagcataacatgattctgaactttgcaggtctgtgctccaacaggagctggtaaaacaaatatagctatgatttctgttctacatgag

SEQ ID NO: 179781 - DNA, 648 bp, Arabidopsis thaliana landsberg
caatgcaaaatcgccaagttgcttctatccaattccacaagctgcagagtgcatcgctcggatagtggaaagatccaatggcgcagtcatctatctttcaacagatgctgcagaaagtgagacaagtctgcttcagtcacttgttgtggtagatggaaaaattgtgcctcttgtcaaacgtccaccgcgtaattcagctgaaaagtgggatgcattgttatatcgacatggtatagaggatgactctcaggtaagaatcttgagcctttataaatctcatgaaaacctgtttgattttcctgggtttgcatttggttgctcttcaacagaaaaaaaaaaagcttccggatttatgaattttgtagcagaatagaaatcctaaatactaattgcattttcaattattattaatggcatggcctgatgtatcaaacatggcatgggctaaattctgtattattgaatgtgtaggtggatgcaatgcttgataaaacgatatgcgccatgtccagcgtattcattggagcctcgggatcaactttcacagaagatatattgaggctaaggaaagattggggaacatcctctacgtgcgatgagtacctctgccgaggggaagagccaaactttatagcagaagatgaataa

SEQ ID NO: 179782 - DNA, 653 bp, Arabidopsis thaliana landsberg
caatgctgtgagatcagagcacttgtgaatttgaaagttgaagagtactttggagctaaaggagttgataaatggacatctcagcgctgggatgaggaagttagcaagcacgatgtaagtttgtgtttctttctgtgtatattttggctagttatggctagttatacgccaacaagtgacttgctagtaattttggtgatttatatcaaaatttctttgtgtggttagtgaaactttggcagaatgttgtaatccacttgaccagctcattgttgtattttgagtcatggatgttcactgagttagttaaaagcccattccaatttgttacttttggggttggttcttcttccattgctgattctttcttaattattttgtttgaacttgtttgcttgagcccttgacgtagatttgtgactgcattgatctcactaacagaatcacatacttctcttttgttgcggaatccacgtgagtctattatctgcaatgaaattatgttttgtatggttcaggttttagttatgactcctcaaatattattggatgcccttagaagtgcattcctgaaactagagatggtatgtcttctgatagttgacgaatgccaccacacaacgggcaatcatccctatgcgaagttaatgaag

SEQ ID NO: 179783 - DNA, 168 bp, Arabidopsis thaliana landsberg
atcattctaccgagcttttcttcacacaagtctatagtcaaatcagacaaattctgcaaaaagcttaacctatgtcaagaagtgacggcccttacttcagaattccacctaggaaactgcgaggcttggcgcgagactgtcaccaagctcaaggatcctgagacaaag

SEQ ID NO: 179784 - DNA, 327 bp, Arabidopsis thaliana landsberg
atgaacattcttggtttcacggtgaacttcttgatccgatgcaaagtcttacccagaagaagcaatacgagttctctctcccgaaacatctccgtactcgccagttatgatcaggaggaagtatcaccgggacgatatagcaatgagttttcgaatcgtaacttggttcacgaaattttacagctttgtgctagaaacggagctgttatggaagcaaaagcttgccatgggaagattattcgtattgagttgcagggagatgttactctgtcgagtgctcttagtaatgcttattccaagtgtggttttgtggagcttgctcgccag

SEQ ID NO: 179785 - DNA, 454 bp, Arabidopsis thaliana landsberg
atggcgagtactctcttcatcgctctccaatgttacgagtgttcaactatgcaggtattaaactctctcgctccctcctcttctatctctgtcaatttatatattggttagtttttagggattttgttttggggttcgaattcgcaggtgaagcagaagaagaaaagtagtaacaagtgggtttgtgtgatatgcaatcagaagcaatcagtgaaaaaggtgtttgctcaaggttataaggctaaggagcttcgtttctttgtccaatcgtttaatatgtctcgcaaagttgccgatgaagaggcacatgctgttggagattcgtttccagaggtttatgttgaaggagaggttaatgaggaggttaatggaacgaagaagcgatctgattggagtcaatacctcgaaatcgattcagtaaatgatcgccggagattagctggagaagaagacg

SEQ ID NO: 179786 - DNA, 708 bp, Arabidopsis thaliana landsberg
atgacgatagttgcactttcatggatcccaaaagaggcatcaaaggctatgcctgttgctgctgaatctccttgtatggaagaaaagatggacgatgaaattcagaatgctcaagttactcatgccaagtctgtagcaaaatcttttgggaaaagcaaggttgcttcttcttcttcaacagatgctgatgaagttgtcaagttcttgaaagaactcgacatggataactatgatgaagaggatgatggtatataactttcttctgtttttcctacatatttgcatattttcattgcatatatgctaatgtacagtttccttcattcttgcgtttggactcagagattgaactgtttagctctgggcagggagacctttattatccaagcaatgacatggatccatacctaaaggatactgacgtaagaaacaccattaatttttctcttactaattgtggagactcaatagtaaatactgatcttgatatcccctagggtgactatgactcagaggatcacgatgacttgacaattaggccaaccgattcactgatcatctgtgctgctattaaacatgaagtcaactatctcgaggtttatgtatacgaggaatccgggaacatttatcttcgcaatgacatgattatatccgagcttccattgtgcacagcatggcttgattgtcctctcaaaggagggggaaaag

SEQ ID NO: 179787 - DNA, 706 bp, Arabidopsis thaliana landsberg
ttttattagaaggtagccctggtgttggaaaaactagtctgatattggcgttgggaaaatattctggccacaaggttgtgcgcataaatctatcggagcaggttcgatttcgtcaccaggccttcaatactgtgtatgctacttaatctgttgggtactataactatggttttgttgatgcagactgacatgatggatttgctgggatcagatttaccagttgaaagtgatgaggacatgaagtttgcttggtctgatggaattctcttgcaggttaaagattgttttatctaaaagtatgtatcaatttaaaaattgcagatcctcaattatgcaatttctacaggctctaaaagaaggctcgtgggttttgttagatgaactgaaccttgccccacaatctgttctagaggtgagccgacaaaccactaattttatttcagtagaaattttcttgcgctagaatatgttgaattctgttgcctttccacatatattattctggtgagatttattaaaatatatttatatatctttccagggtttgaatgcgattttggatcatcgtgctcaagtcttcatcccagaactgggctgtacctttgaatgccctccaacatttagagtttttgcatgtcagaatccttccactcacggtggtggcaggaaaggtcttcccaagtctttccttaaccgattcacgaac

SEQ ID NO: 179788 - DNA, 269 bp, Arabidopsis thaliana landsberg
gtccttgcttccgaggcatcagatcttctggacgtccataaggatcttcaaagtcttgaatcagcttcaaaggtttgcatttgtgctttttttcgtcctctgcttcttagtttctattggctcatcatttgattgtcctgtgtctatttcagaaacaattgaagtctctggctgaggaaatgcaagatataatcacagatttggaaaaactgaaccaggagctcactgcagccgaaactgatggtcctgattctcaagcatttcgtaat

SEQ ID NO: 179789 - DNA, 278 bp, Arabidopsis thaliana landsberg
gtgttgatcccaaagcgaaactaatgggttacacaagaactgatcctttccataaggaatgtatagaaacagcaacaagaattgtttggtttcagattctgaggtcagctaagttaaatgagcttgctagtgtcttgccagcaagactcgagattcaatggtacaaagaccgttgtgatgcatcagaagagcatgcagctaggttactacgatttcttcaaacgatattcgttgaagagagacttcaaagtgaacataagtcgcataagactagctaa

SEQ ID NO: 179790 - DNA, 378 bp, Arabidopsis thaliana landsberg
gatggatttttaagtttacctcctactgtggttgtctcttattatattgatgcagctttgactgcaaactcggaagaatgcggcatggggtggatcttccaaactcagaacaatcgggttttccaccaagggaccgcaactcgcacccacgcgccctcggctctagcttctgaagccttggcactgaaatcagcattgtctgcagcgtctcgaacggaattgacttccatcaaagttttctccgactctcaagtccttatatctctgttaaatacagagacttcaacgaacgagctgcaagggattctccatgatattgcctttcttagtcgttatttccttttatctcaaattctcgtttgtaccacgcaaggctaa

SEQ ID NO: 179791 - DNA, 273 bp, Arabidopsis thaliana landsberg
gttatggaacaattttttggcctcgtcaatacctttctacacattaaccgggacacttggaagagaagattagctgtgcgcacatacaaggtacgtctctgtatcagtctactagaggctttctgttttagagaaaatttgattccattcagtaagctctttataatccatatacttatatacatattcttaggatattccttttactccaagcgctggtgttattgagtggtttgatggcccaattccaattggcgaatttcttataggaag

SEQ ID NO: 179792 - DNA, 1024 bp, Arabidopsis thaliana landsberg
aatgttctcagactctgtggtcaacgaaaagtactgtttgataacaagactaaggatacagtcaagaaggcagagcaacttaagcagctcttggcccatgtcgcagatgttgaaaggcaaactgacgggataccgtataccgacaatatgcaccgtaagataaaggtaatgaaagtgatgaataattacataacttctctgccatttatgccagttaattgacataacggtttacgctccattgactaagaatatgatttaaaatgtatgaaaaatacgctacactaagaccgaaagattatttaatttgggttactttacatttcggtttgcctgaaatgtgatttaaagtatatgaattacattgcttgtttaattcgatcttgtggttttgacctgcatttcattttaaattggttgttttttcaggaggaaaacgataaggttagggaacaagagagagagattgaatctaagaaacttgcagaagcagaatcaaaagtaatgcatgagaaattacaaatggagcatgaaaaaaacatgaagataatgacagatgcggtaagtttgaatacatttttgtaatagctcgaagtatatatgcttgatttgattccatgcggttaatttaatattttctatctttcaggtggagaatgcgctaaaaatgagtgaagcagcacacgaaaaagaaatgcgtatggtggaggatgcgttaaaacagaatgcatcagcacatgaaaaagagatgcgccaagtggaagatacgttaaagcagaatgcgattgcacatgaaaaagaaatgcgtcagatgagagatgattttcagcagagccaacaacgccaacaggtggaggatctgctaaaacaaaattccgagaaacatgaaaaagagatacgtctgatgagagaggaatttagtcgcacacaggcccaacagctccaactgttccagcaacaccaaccggctcagcaacaacatcatcccccacgagtacatccagctgagtgcaatatcatgtga

SEQ ID NO: 179793 - DNA, 494 bp, Arabidopsis thaliana landsberg
  unsure (1)..(494): unsure at all n locations
atgcggctcgccgccgagcaggcacgagcgaaggcaaagctcgcccagaccgcgcagccgctgacgcagcaggtgctcacnnnnnnnnnnnnnnnnnnnnnnnnnnnnnnnnnnnnnnncgcgccgctgcccgccgttgccgctacgccgcgcaagcccggcgtcggcgacaccgtgcgcggcattgtcagcggcacgcgcgatgccgccatgtcggcgtggaacaaggtcaccgacggcgtgatcgagcgcgttcgcctgcccgatctccccgacatgcctgacctcatgccgcgccgggatttccaggcgcggatgtaagtccgctcaggagcccctattgacccttgcgccgcttctgttcggcctcgtcccaggcggtcagcgcctgatagtccggcacgaagccgagccccttctgcgcgtcggacgacagcacggtctgcgaggtcccaacgtcgaccagcgccggcgccttcttcagcgaccgctaa

SEQ ID NO: 179794 - DNA, 510 bp, Arabidopsis thaliana landsberg
atgaagaattttggactcgtcgtttcccaaaacgacgccgtatccaaaaatcttgaaacggaggtccgattctggcactgatgtgatcatcgtcggagctggtgtcgccggttccgctcttgctcatactctcggcaaggcaagtctataatctcaatttttgatttttgcatttctccaaatttattcatgaaaatttatttttctaaattcatttcaataaattttaacatttattttgtaatataatttgtttttgattatattttttgtaataagatcacaaaaatgatgtgatattagttcccggaacattggagatatatacttgtctgatttttatgtgttggagacgtaagttcttgtctgaaattttggcctttgtgtggttattgaaggaaggaagaagagtgcacgttatagaaagagatttgtctgagcaagacagaatcgttggtgaattgcttcaacctggtggttatttgaagttaatagaacttggacttgaag

SEQ ID NO: 179795 - DNA, 83 bp, Arabidopsis thaliana landsberg
atggaaaccaacatagatgcttctgctggcaacacccgagaaggcgttgatcagtcagggatggatacggcccggcaccgggc

SEQ ID NO: 179796 - DNA, 5145 bp, Arabidopsis thaliana landsberg
  unsure (1)..(5145): unsure at all n locations
atgaagcaagaagatattccagtagtaagtattaacttaccaaatgatcaatattattttgaaatgcaggttttagaataatactctctgccgttcttgtttatttccagattgtggaagatatgctgaaaagcgttatggtagaatatgaacgtagattagcaacacagaacgaattggtaagtaactttagttattcacccttagatctaatgatctcatgtatcttggattacaaggaattataccttttttacactttttatcttgaatatgcaattatttagctactgatgagcgcgggaaacagagataagcttggcagtggcgatcttgggagaactatttcaggaaatgaggagacgctaagtgatgcttcggtaatattatcacccttgaagttggtgatcttgttatccatataagcatactacgatcttcatggatttgtatatctatcatcataatgtgttatatgccaaactggtttaatgattacatatttatgcagtacggagaagaaaacgtgacagagattgtaaacaacaacatggaagcttcacaagatagtaatgttgaagaattggaaaaccaagattatgagctctatgcaatttcaaaagagaagaccgagaagcaacaactgataatcgaaagacaacaaactcatactgaggtatatataattcagttgaacataaatagttatatatggcatcttgtttcttttaagactttgtatttggtgattatcaagacatgagtgtatatgtgttggcaggaactgaaacatgatctaaaggctgtaaaagcaggtctcagtctcttgcagatgaaataccagcaagagtttacaagcttaggtgatattatttcctacaacaaatttgagatgtttaattgtnnnnnnnnnnnnnnnnnnnnnnnnnttctagtgatccattgtacttttacaattgctatcaaagaaattaatcttatgatcattcctcatggttttaggcaagcatttgcatggtcttacttatgcagctacaggataccaaagggttcttgaagaaaaccggaaactttataatcaggttcaagacctcaaaggtaaaatatcaagctgcatagtgctaccactaccaagcttggagttgcaagttgtatttagtggattcagttactaagatctgcaatatcaagtctaacgaatgtataacaggaagcataatagtttactgtcgagtgaggccattcttacctggacagaaaagtgtcttaactactgtggatcacttggaggattcaactctatcaattgcaaccccttcaaagtatggaaaagaaggtcaaaaaacattcaccttcaacaaagtgtttggcccttcagcatctcaaggtgattcaatttctgaaatttatttatcattctttcatttttacatatgatcaagatgcatataaattttgtatagacatcatgatcaatatgtatctatatatgatcttccttgaaaactattggtttttagttattttatgtcgcctcttacagaaacgtttaactttctatatgtagaggcggtgtttgcagacactcaacctctgatccggtctgttcttgatggctataatgtatgcatatttgcatacggccaaacaggatccggaaaaactttcaccatggtacttttctcaaagactttaccttattgtggaatattgaattttctgaaagacttcaccttatctacatttgtaattttactatggtaatcagatgggacctaatgagctcacggacgagaccttaggagtaaactacagagcattgagtgatctctttcatttgtcaagtgtgagaaaagaaaccttttcatataacatttcagttcaaatgcttgaaatttacaacgagcaagttcgagatcttcttgccactaatggccaaaccagcagatatcctttttcaagacttgtgtctctttagttttagtaagtcccaatgcttcttgcatatgatcactgtaacctactttccttgacttgtgaacacattagagattcgaaacagtgcacaagatggaatcaacgtaccacaggcgacactggttccagtctccacaacttcagacgtcattcatttgatgaatattggtcaaaagaaccgcgcggtcagcgccacactcatgaatgaccgcagcagtcgctctcacaggttttcatttttaatgtttctataaaattgaaagttattatctcattgtctttaaacatacactactagtgtcatcgtgtgaaatagaaaagaacttggacttgaaggaatttggcctatactgtaaatgtaaagactaatgtagaacatagagcataagagtgaagatgacatgttttattgtttataagaacgagcgcgcactcttcctcagttcgtgatataatagtcacataacatgttttattgtttatacttgcagctgtctcacagtccacgtccaagctaacgttctctagccagtagatactttaagaggttcaatgcatttggtgttcttgcggagagtgaataggatattcaggtgtgaggtcatgtggtgataggttaaaagaggcacaacgcatcaacaagtctctctctgctctaggagacgtgattgcatctctctctcagaaaaacaaccacattccttatcgcaatagtaaactcacccaactgctccaagacgctttaggtaaccagcaatactcaagtgttactgaatctagtcacgtataacaataatgcaactccaacttccaattgctaaagcggtttccatttgaagtataacatatggttctacaatgtatgcatgtatgtgtgtgtgcaggaggacaagcgaaaacgctcatgtttattcacattagccctgaactagaagatttgggagaaacactcagcaccctgaaatttgcagagagggtggccactgttgacctcggtgctgctcgtgtcaataaggacacttctgaggttaaagaactcaaagaacaggtccaccatatatacttctcttcacattattatactattcattctctcaaaatacattgtccaaatcatcagttacctttgttatttgctttcagattgctagtttgaaacttgcgctagcgagaaaggagagcggggcagatcaaacacagctccaaagaccccttactcctgataaactcctcagaaaaaagtcacttggcgtttcgtcttcattttcaaaatcagcaaacagtacaagacaggtccaaaccaaacataagccatcacagattgatgatgtcaacagcattgaggtaaaggggacaagaaaactcattcaccaaacaaaacaaatcaaacttgtcaatacgttttgcagtgattacttcatgatatgtagtgaaattacttgcagggtcaaagtgactctgcatctagccttgacttacaaggactagtaggttcaccgtcatggaaaaccccgccgagagatgggaaagaggaggacatggaatttattataccaggaagtgaatgggttgataaacacgaggacgaaatcacgcgtagtagcaaacctgaaaacagagcacatacacagcttgagaagcgaacgtctagcttgaaacgtgaagcaactcgaggtgtagataagaataagtgtaatagtagtgtagataaaggattagaggtaaggaagattccatacgaagaagaagcaaatgagtcagatgaaaccgcaacaagtgattgctcggagactaacttgatgtggcagttgaatgttcaagtgaatatgcctagaccagcttctaatggttcttcaactaaactaaagaagaatcaatcaaaaataagtagagttgctgctgagaccaggtgagttatttattatataaatgattggattttcttataaaaatagaatgttttagctaatgtaataatgttgatgatcaggagtatgataccttcgctaattccgacgcctacgaggacattatcgcttggggcggctattagctcgccaggacaaacgtcctcaaggcataacaacagtacagtagttgtgaagaagagacaaaatcccaagtaatgaagaaaacattttgtgagcattttaagaatacaattattattggcggacccatatttcatattataaggtcatatatatacagacgccgtatacgaagagtagaatacgtatgagagtgatagattgtagttgtactatactataggttgaatatgttttgtttgatttgtgtggcgtttactagaatgaatattccattctttttatggccgatgttgtattctactacagtattacttctcgaagctaatgtattttattcatcacaagagttatacattttctgttttaaactttccataatctcgatttatatgtactttttaacaatatgatttgtcaatgtagcaattttatagtttgatattttgttaagctagactagttagttcataagaaccaaatcagtttttgatggcagtttgactagatggatggtgatgtaaaactgctacaagcaaattagccaaatagtcaaacacatatcgaaaactgtgtccattatgatatttttttaataaaaaaaacgcaacagaaatattactatacggatttttttcacaatcagatttagttaaatcaaaatttgaccaagaaaaaagaagttaataaaaaaaaaattctcctaccctaaaaatgtgtccgttatgaaagtatttaaggaaatttgttatttttattacaaaaatgctttaaacaaatattgcacgaatcatttgcagaaaatactaattctataatcaaacttaagaatatacgatttctataattaaacttaaaactatactaatacaattccttacctaaagcgggacttttgaggggcaattacgtaatttcgagaagttcatcatatttcttaataaaattagctgtctttaacccccgcgtcgctgtttcttcccaatctgagaaaactctcactctgcaacttcgtttctcttctcctttcttaaacctctcacgcggtttcagacttccgttcgcttaccgaagacggctcggaaattctctcctgaagaatcagcgacgaccttag

SEQ ID NO: 179797 - DNA, 231 bp, Arabidopsis thaliana landsberg
atgcagaagaagaaagaaaaggacgaagaaccaaaacagcacatggtgcctgcagatgaagatcagaagaattgcgcattatgcgtagagccgtttgaagagttctttagccatgaagctgatgattggatgtataaagatgcagtctacttaaccaagaatggtcgtatagttcatgttaagtgtatgcctgagccccgacctgctaaggatttgagagagccgtcgagg

SEQ ID NO: 179798 - DNA, 2467 bp, Arabidopsis thaliana landsberg
atgaagaagaaacagaagaaagcagccgttgactgttgtttgaaagtgaaagaagacaaggaggtatatcagatgctctcatgcttgtcacgcgcgtgaagctatatattagtactattttgcatatatcccttcattacatttacaacgtaccatatatttctatattatatactccgtaatattacaaactatttgaccaaaactgctagacatctctatacgttcttataatttatagttatataccaataaaaaatggaacaaaaaaaaaaagtattagtatttgcagcattagtatacattagtagtatttgcagcattaacaaaactacaaaacctcgaccttgtaaaactatgacataataatgagtaaatatatttagggaaaaaaaaaaaaaagggagtgcgtagacagtcaacgggaggataacgtcagcagcgagatgaggcaatcaaaggagcaaagcctgaaaaagtaaagccgtcttgtcggttactcctttaacggccccttctccttcttcttcttcttcttcttttatttttatttattacagtacatctttaagatacatagagagagttaatattgcttctcttcttttcttaaagctgctcttctcttatttaccattttgccctctttctttaactatatagtacgtactacattattaattagtaaattaaaaaaggtaaacacacaaaaagtacgcgtggaacgtgttaaaaaaaatttaaaggaacaccaattcagttcttaaaataacgaataaaagaagagaggagtgttttgtgtacgaataaaaaaagagaggagtgttttgtgtattaataaacaatagtcgaggatcattcggagtgctaaggtaaaagtctattaatatactcctcttgtatggaagataatactcaaagaataatgtgttcacgtaaatacgactagtactacataaaagcctttcagttatcagtggggactgcaaattccgtatcaatatgatccctaataaataagctaagggatgattaattgggtttaggtctgtttaagcgagaaagagaaaaaaaggttcagggtatagggggaggcgaggcggctcgcgtggggcacaaaactctgtttcatctcttcttctctctctcttttttttcttttcttttattgttgttgtcttcttaattctacttctatttaccactttgttgccaatgtccctctcttcctcccgatggtcaatcaccctctctcttattttgaatttctttttttctaatttaaatccgtatgattcatttgtgtctatcccattccttaatcactgatttatttactctatttccatttctttttttggtcctcttatattttacaacgatatatacaattaatattttatttacacgataaattacttcgaaatatactaaacacaattgtgaatattcagtttgaccattgtttagtactaattatactaaacaatatttcagttttataaaagaaagctttctgaatgaggaggcttggattgatatatagttataactttggtgtcgatcggcattattatatttatactatattttttttgttaaatattatatttaaaactatttactacgacttttgttactcggttatatatttttgttccaaaattaactacgataaaagcttagaacattaatttcctagattaactatgcacacatatgtagcggtaaacaactgtatataataaatgaattgggatatacaaatgttgtgaagcctaagttaattattaggtggcaatgagggataaacgcagttcgtgaatgtgtgtatcagactattagtgcgataaacaaacaattaaaagaaaaaaacaattataagtgaaatcttatgttgtaaacagacaaaaacttgtggtcgacaaaaaataatagagggccatgcacctgcatgcagaacaacatatcgacgtatatctcgatgaaatacttttatcttttggcgaaataataagatagttagtggtagtgataaagatgagtgggattgcagtttgcatgggcttagggttatatactaattataaatgaggatttttaggggaattcgtgagcactcccacaataccctgaccgccttttcgccgcgacaccgacatgcgatatcttcctttttcttttgccttcttttttgtttttacgttttccatttatttttttactaactaaagctttttggaaattcaatatacattataacatatatacatgttccatagcatatacagctacaccacgcgcatacataggcacagatatgtaccttcctctgtatcagtgtattacagatatatatgagccagatgtttgtatatatataatatatacattgttttataacccgtagggacatatcttggtcaggtgttggaatcagactcggaccattatacttcgacgatag

SEQ ID NO: 179799 - DNA, 311 bp, Arabidopsis thaliana landsberg
atggttgaggaccacaaacgtgtgcagccaaatgtgaagacttatgcgtaagagaatcattatttctgtattgtactcatttctaccaactttgcatttctacctgttctattgtaaaaatcctaatatgatctgtatgatgatccatttcaggctcttagttgagtgcttcaccaaatattgtgtcgtgaaggaagcgattagacattttcgtgctcttaaaaactttgaaggaggaacagtaattttacacaatgcagggaattttgaggatcctctctctttgtatctcagggctttgtgtcgagaag

SEQ ID NO: 179800 - DNA, 582 bp, Arabidopsis thaliana landsberg
atggagtttttgttgatgaatcatcctttggattgccctatttgtgaccaaggaggagagtgtgatcttcaggatcagtctatggcttttggatctgatagaggacgttttactgagatgaaaagatctgttgttgataagaatcttggtcctcttgtgaagactgttatgactcggtgtatccagtgtacaaggttactaatatagtttgcttacagtgtgatgttttagttaatgtgatagatatgctatcctgttgattaggttttgtatgtataatgtttttgtaggtgtgtacgatttgcttctgaagttgctggggttcaggatcttggtatactaggtcgtggtagtggagaagaaattggaacttatgttgaaaagcttatgaccagtgaactctctggaaatgttattgatatctgtcctgttggagccttgacttcaaagccctttgcctttaaagccagaaactgggagttgaaagcaacagaaactattgatgttagtgatgccgtggggtccaacattcgtgttgatagtagaggaccagaagtgatagagaatcattccacgccttaa

SEQ ID NO: 179801 - DNA, 75 bp, Arabidopsis thaliana landsberg
ttctgcaagtagtttcggcgcaagtacgggtagatatagcaatgcatggtaatagcaagaggagcatgtttgaag

SEQ ID NO: 179802 - DNA, 595 bp, Arabidopsis thaliana landsberg
gaagtccaaccgatctgcatctgctgctggacagaccgaagaaaatttccttgagacttcagatctgcaagatggtgatgttaccgagattgttccgcctccctttctatcccggtatcaagagaaccatcggtttctctctgctcgtgaccgtaagtaccctgagctgaaatttccgtcagagactccttacagtaactgctttcttactggagaaggacttgggcgctacaaggtcatcgggggtcgatgattcaacgacatgcgttttcttcctcttgatggaaacaacattgcgagtactctacaactcctctccactgttggtctgctccctactgttacagagatcaactcttatgtgcaagaggttgtcatggagttctatgcaaacctccccggtggtgaagaaggtgatcaacttgcttactccgtgttcgttagaggcaacatgtatgagttctccctggctattaccaatcaaatgtttcattttcctaatctatcatatctagtgaacatgtctgagattcaagttcctgagtccatggatgaaattgttgttactctgtcaaactgcaaagccaactcttag

SEQ ID NO: 179803 - DNA, 1465 bp, Arabidopsis thaliana landsberg
atgatgcgtcttggcctcagctcgcacattgagacatcgagaggcaataataacaatgagtatgcaacacaggttgtttttttatttactcgaaccattcacaactcaaagtatctcaaagctgctcaagagcttcttgatgaaactgttaatgttaagaaagctctaaagcagtttcagccagagggagataagattaatgaagtgaaagagaagaatcttcagacgaatactgctgaaatccctcaagcagagaggcaagaattgcagagcaagttgtcgaaacttttatcgatattagacgaggtaatccgccttacaacatatcttctacacttgttaatgattctcgtggtaacataaatgttgtttgtttctttgttgtttgaaggtggatagaaattacaagcagtattaccatcagatgcagatagttgtgtcgtctttcgatgtaatagccggatgtggagcagccaaaccatacacagcccttgcgcttcagaccatctcgaggcatttccgttgcttaagggatgcgatatccggacaaatcttggtgataaggaaaagtttaggaggggaacaggatggatcagatgggagaggagtggggataagcaggttaaggaatgttgatcaacaggtaaggcaacaaagagcgttgcagcggttaggtgtgatgcaacctcacacttggcggcctcaacgcggtttaccagattcttctgttttggttctccgtgcttggctatttgagcatttcctccacccgtaagtctctctactactcttgtgaattttttgattgaccacaagagactctgaccatttgtttcaaaaccttgagcttagttatccaaaggattcagacaagatcatgctcgctagacaaacggggttgagccgaggccaggtattgcactgttagcttttgtgccgtttctctcatttaatacttttctttctggtgtgttcatttttcattgtttcgtttgatgattgttgaaaggtatcgaactggttcataaatgcgcgtgtgcgtctctggaaaccgatggtggaggagatgtacaaggaggaattcacagatgcattgcaggagaatgatcccaaccagtcttctgaaaacacaccagaaatcaccgagattcaagagctgcaaactgagtctagttccaacaatgggcatgtacctggtgtggcaagcagtagcatgagacaaaacacagtggcccatggtggtgaccggttcatgatggtgactgacatgacaagaaatggtaatggtgggatgtctttaacgttggggattcagaattccgatgctcgtggcgatgttcctatgtccggtgggatagataactacaagaataccatctcgggaaccgatctacagtacttaaactctcgcaaccaccagcaccagattggctcttcacaattgttgcatgattttgtagcttga

SEQ ID NO: 179804 - DNA, 241 bp, Arabidopsis thaliana landsberg
gctatttcgagaacgacaccgttaatggcggcattttccgcgctcggacggctgatgccccgatcatcgcgctcgaaagcgtcaactacaccctcgatgtaagtgaccggccgcttcatatccttaagaacatttcgctttatcgggctccagctcaaaaggtggccatcgagggaccctccaacatcggcattacgtcaatgctgatgctgcttgcctggcatagaacgtccgacatatg

SEQ ID NO: 179805 - DNA, 116 bp, Arabidopsis thaliana landsberg
atgcctaagagaaaactgagctcggaatgccgatccgaccacgatgacgatcaatgtcgtattgacatatgtcgtgtcaaaatggcgcacaattgtactgcttggccgaaagcatg

SEQ ID NO: 179806 - DNA, 645 bp, Arabidopsis thaliana landsberg
atgaagcaacataagcagcggttcaacacatggctaatggtgaaggacattccacgtggagaaacaatagaagaacaaatcatcaaggggttggcatctggaccatcacgccaggtcacaacatggcaaacctatgacattagtagattcacattttgtaccaagtccaaggacaaaaagagcatgtcacaaaatagtggtgttcgatgcgaggccatagatgatgaaactagtgagattattacatattttggctttattgaggacatatgggaactagactatggtacatttcagatctcggttttccgatgtcaatgggttgaagacaaacatgtcacggtagacaactatggggtcagagttcttgatctaagtaaggtaggttacaaagatgacccatggatccttgctaatcatgctgcacaggtcttctatgctgaacagatcatttctaacaatgagaagaaaagcaccgacaaaccgaagcatgtagtttttcctggaaaacaacaagctataggagttgatggtgtatcttatttagagaattttaaccagttcaacgacatgtctcttttcatagaccatccaaccaagataaggaacgttgagcgaagcatcccacgcaattcgttgccctgg

SEQ ID NO: 179807 - DNA, 130 bp, Arabidopsis thaliana landsberg
atgaatgagaacgtacaaaagtccctgtcgattgtcggttatgtcgtcatcttcttcttcagtttcctgcttttcgttttcttgagcttcccttatggcattctcaaagaaacgattgtcagtaaagttg

SEQ ID NO: 179808 - DNA, 453 bp, Arabidopsis thaliana landsberg
atgattgatggatattttttggtggcacatatgttgctgctggtgtcgcattgggtcggtgtgtggaaggggcttacccaagccaatgatttcatttataggtccgcttacaagtaagaaaattattaaacgaaaaccaattagatactaagattgcagattagactttgacaagacataagtatgtgaaggttcccattaatatcctcataagtgattttacaacttgtggccaaaagagcaaaaattacacaaagcgggagaaagatagtttaagtctagaacaaatcgatcataactcttgaatcttgcggatcttcgtgaagaggtgagatcttgaaactgtcgggtcttggagatttctgttgatgcgtgtaatggaaagatggagaagaagaagatggtgtaagaattatggaggaagaagaagggaattcagagattgtagggtga

SEQ ID NO: 179809 - DNA, 458 bp, Arabidopsis thaliana landsberg
cctcaccgatttcgaagaagagattatgtgtttgatgattacagagaagatatgaagtgtagaatgttggatgatatagtgaagaattccggtcaccgtgtagaaatatcaaggccggaatattataaacctgagattgaaaaacaggttttgtttttttggttattttgtgattaagatcagtttttttttttggtttaataatatttgatcttgtgtgtgtttaggtatatgaaaaggaagagaagaaagtaatggatccggatatctatattagatcttatgaagagtcaccaaacgaggtgtataaatttagcctcactgatttggaagaagagataatggaaaatgactccatagaaggtgtgaagtgtagaatgttggatgaaataatgaagaagtccggtcaccatttaaaaatatcaaggccggaatataaacctgagattgaaaaacag

SEQ ID NO: 179810 - DNA, 587 bp, Arabidopsis thaliana landsberg
gctgcagagttaaagaagttacagacgcctctgtacgaagaattctacaacggtatgatcacatgctcccccatctgcatggagagtaacatcaatatcaataaacgagaggaggcacctcgtggtttcttgaaactgcctccaaaaagtcggtctccgagtcagggccatattggtcgatcaccttctagagcaacagatgcagcctgttgttccaagagtccagaaagtggtaatagctctggtgccccgaagaatagcaatgcaagtgctggtgctgaacaagaatcaaacagtcaaaggtaagtccaataacagttattgttcttcttcaaaattgaggtttaacattaattatctagattcattcgttgacgttaagtaggaactaaaactgtagtagtgtgattgcttgtcttaagatatgattgccctccattgctagcaattggttcaatggtgacatttatctccttttcttaaacatctggaattgagttgtttttggctttgcagtgtcgcgctgtcggagatagagaggaagtggaaggaagagcttgatcaagaacttgaaagaaagcgaagag

SEQ ID NO: 179811 - DNA, 677 bp, Arabidopsis thaliana landsberg
gtggggaatccattgcgaatcatcaacgagtttttgaaaatctatgaagatgtcatgaaatacagtaagatagcttcagaaaacagtttcagcttgtcatctgatcaacaaaacccaatctctctttgggttgaagctgcattagctactaacctcgaggtggtgtcactagtgaaaagccatgaatcaccatcgtctctgaagaaatcaatgcctactcgtctctctcctagaccttctagcaagacaggtttgttcttgaaattgaaacatatttccattacaaactaacatacataacaaaaatgcagaaaagtaagtttctatctttgtggttgttttcagacaatattgttgggatgtggacagacttagatggcttgaaggaaacggctaagtttgcggtgaatctacaatctgaaatgcaagtgtggttcattgagttcgtggaagaatcgttagacaacaaaaacgcagcaaaacgatctttagacggtagttccatagctgcagttttgtctcagctgaaacaagttaacgagtggctggaccgggtctcgtcgaaccaagaaaacaagatcacaacaatggacaagatcgagcggctgaaacgcaagatctatggattcgttatccatcacgtcggatctacatatgacaactctgcttcttcttga

SEQ ID NO: 179812 - DNA, 632 bp, Arabidopsis thaliana landsberg
aaacacatatggtgtattctcgagctaaacccccatgtcgtgtgtctgatccggctcagccccacaatctttgcagacgacgacggccttctccactttcgatctgcttttcatgcaaaggtaagtatttaacgtgcagaaagtactattactactgtgctacttgcaatttagaattccacagaggttgtcacctctttccgccgaatctaagacacccttttcattcctctcatcctctcaccctcatctcttcaaacacacgcaacggttggtgggatggctcctccggttcagaaggatcaacagatgatgatgatagtgatgatgatgatcgtgatggtgatggtgatggtgatggtgatggtgatggtgatggtgatggtgatggtgatggtgatactgatggtgatggtgatggcgatggtgatggtgatggtgatggcgatggtgatggtgattgctcgcatacagggtcttcaatggtcgcatgggtgctgcttctgctttcaatagctcctaccattgaactctcaactaactcttttacacacgatactgtgtccaatgtgtctgttttcttctcgtctttaacttctgatctaagacatgaagatgacgaccgagcttga

SEQ ID NO: 179813 - DNA, 1340 bp, Arabidopsis thaliana landsberg
atgaacatccagctcagttcgcagagcccggtgcagcgtatgttacgaatctccaggtaatcaatgcgtgttattaacttggaatctttccgttaacgaagcaatataaaagggtttctagataactggcctagtgatgggcttttccgctgggtcgggcctttctcaaagccctacacactccaaatgtctcaccaaattgcgggtttggttagcaccagatccgacatccacaatccctttaaaattcattagttctagaacgtgaatcaagcaatgcatcatcaatgaactcatttggctaaggtgaaggtcaagagacaaagatggtcccttaaagaataggttttagtaaaatgagatctctcaagaatgattcagctttagtataatgctaaaggtaagtccctcattatgcatacagagataagatcccatctacccagaatataacaaataaagctctaatggtaatctcatctccaatcccaatataagaacttaactcttccctttgcattctttaatcttttaaaccctttttctatcattcttttcttttctcttaactctaggagaagctttctcaacactttgatacatctagcggatttggatttctttaacaactaaggttcctgatatatcccagttttcactgattttatctatgttttaggtataggatcttgagtctttatattatttctcgagtctttttagtgtcttttcaagtattctatgcagtgagacaacaatagagataaggagacattttggagcaagagctaaggaaaaggaagctaaggacgaatttggatccaggaatcagggaggagtgttgattgacacactcctggtgtcgatcgacaccagtttcggcccagcaaagtccatgacgcttccaagtttacagaagaggaaatttgcccctgaagactttctcatttgcattattagtccgtggacgttttataggggtattatattatttttagacctaaattttcttttatcaagttctttgcaaaacccttttttttagagacataagctattcatcccttgttcttcagagattcattcagttttaaagacagtgaagagatctcttctttctcttatcttatttgctgtgtttatgctttctatatcaaatatgttgtttcactacaagaaaacaggtaaacgacgactacaatcagcaacaacaaacgttttcgtaacgttatatgactttttggcgacggatttacgactcgcatgcgacaacacgaacaattgtagttacatagtcgttgttttacgactatcttatgcaatcggcaaagagtcggcaa

SEQ ID NO: 179814 - DNA, 82 bp, Arabidopsis thaliana landsberg
aatttaccgcacgttttccttacgcgtaacgataaaagagaaaaagaataaagatttcagaaccgacggcaaacgttattaa

SEQ ID NO: 179815 - DNA, 646 bp, Arabidopsis thaliana landsberg
atggaagaaaaagaagaagcaggagtgatggatgagagaatatatgttgcactagggagagaaatagccaataacaagtcaaatctggcatgggtattagataactgtcaagggaacaagatctgtatcgttcttgttcaccgacctcctcaaatgattcctgtctgtaagttcccccaacaactcctatatcgtcatctttcgaacggctttatacacgaaacagagctcttaaagagtttgactttcaatgatctttctcttactttcacagtgggtaccaagttcgatgctgcaacggtagatgaagaattagtgagagcatacagagagaaacaaaaggcgaaaacagacaagattcttgatgagtaccttagaatttgcttgcggaaaggggtatgtatatttttatacatatacataagggatatgaagtttaggccattcctaaggagattggtattgtaggtccaagcagagaagctgtgcgttgagatgaactcgatcgagaaaggaattgtgcagatgatttctgagaacaaagtcaggaagttcatcatgggagcagcttcagacaaacatttttcaacgtattgtgtttttaggcttcacgcttgtgtttctgcttcacatgcttctttaacag

SEQ ID NO: 179816 - DNA, 506 bp, Arabidopsis thaliana landsberg
atgcttacagatggaagtggagggaatgcaaatggttccggaaaccctggggatagtcttcttgaagaattaatgagggatgaagaaagtcaagagaatgtcggttttgacgatgattttcacaccgatgataagcaagcctggatcaatgcttcccggtatccttcctgttgtatattttcttgattatcatcttgcttcacattggatttgtctgacaccttttaatgtgctttctcctcagttgggaaccggaccctgtcgaggctgatcctttaaaaggtagcctcagtcagaggaaggtagacatacttggaatgcttgttgatataattggatctaaagagcaactagtaaacgaatatcgtgttatgcttgcggaaaagcttctcaacaagactgattatgacatcgacactgagatacgcactgttgaacttctcaaggcaagctccattttgtccctcttaagtttgacttgccaaactattggattgtttctatag

SEQ ID NO: 179817 - DNA, 304 bp, Arabidopsis thaliana landsberg
ggttgagccagggacatggacaccagagaagaggaagaactacaaccttctagatgcagtgagccgacacacagtccaggtctaccccaagtgttgggctgcaatcttgctcacattcgacaactgtggaatgtggaacattaggtcggagaacgcagaaagacgctacttgggacagcaactgtacgcaagcgtcttgtcaccagaaaaatctctccgggacgaatacaacatgccggagacaagccttcaatgtggtcttgtcaagggcaagcctaaggttaacccttatgccggagcttaa

SEQ ID NO: 179818 - DNA, 72 bp, Arabidopsis thaliana landsberg
atgttgagactggatcggaagtctaaaaagacactcgacggtaaccccttggtgaagatgtcggcgaactaa

SEQ ID NO: 179819 - DNA, 2628 bp, Arabidopsis thaliana landsberg
aaatttcactctccgaagaagaagacgaaatcgagcaaatccatggcgaaagttcggattttgatcttcacccttgtcgtattcttctccctcaatgtccatatccatggattttaccttcccggcgtcgctccacaagatttccaaatggtcagccacaaaatcacctctgtatctgtatttcacaaatgcagcttctttttagagctttgattcacgctgggtttagatttgtttctgatttagatccaacgcaatcgatcaagtaatcttgttaaaattggatcgatggctctgttttatgagatttgggtaattttgatcttcagttaccactgagtgttgtgtttaaagagaatgtttcattagtctatatgtattagccattgtttagacttgtttctgtgtgaatctagcttttggagtagaagaatgtataatggtcattatctataaaggttcaaactttggagttatggttttgtttttcagggagatgcattgatggtgaaagttaataaattgacatctacaaagactcagcttccatattcctattattctcttccttattgtcgtccagaacatattgttgatagtgctgagaatctcggtgaagttcttcgtggtgatcgaattgagaactctccttttgtggtatgttcttgtttcttcttggttctttctctatctgtcttggttaagtggtagttgttgagttgtttttaatgtctgtttgtttctttgttgcagtttaaaatgagggaatcgcagatgtgtgctgcggtttgtcgtgtgaagcttgataagaaaaccgcaaaggcgtttaaggagaagattgctgatgaatatcgagttaacatgtgaggagattgattttgtcgccttcgactgaatgtgttttgtttttcttctgtttttatgaggaagattgatttcttatgcaggattttggacaaccttccactagttgttccggtgcaaaggccagatcaggacaatgttgtagtgtatcagcatggttttcatgttggtctcaagggaatctttgctggcgtaagagctcatcatcaccttttctgaatatgtttcaatggaaagagttcttatttatttgattttcttgtagaaaaaggaggagaagtattttatccacaaccacttgaccttcactgttaggtatcacagagatatacagaccgattcttcaagaatcgttggctttgaagtcaagccgttcaggtagctttttgtgatttaaggactttgactctgtattgtgtaagcgactaacatctactgattttatctcgatgcagtgtcaaacatgaatatgaaggtcaatggaatgaaaaggctcggttaacgacttgtgatccgcatacaaagcgtgcagtcactaactctgagtctcctcaggaggttgaagaagggaacgagattatcttcacatatgatgttgacttccaggaaagtgagatgaaatgggcgtctaggtgggacacttaccttctaatggctgatgatcagattgattggttctcaatcggtgattctgtgatgtttgttctttacctatctggtatggtcgctgtgatcatgctaagaacactctaccgagatattggcaactactatcagttagagagtcatgaagaggccctcgaagagacgggttggagattggtacacggagatgttttcagaccgccaacaaacccggagttgctttgtgtttatgcaggcactggagttcaatgctttggaatgattcttgtcaccatgatctttgcttgtcttggctttttatctccttcaaaccgtggtggtcttatgacggctatgcttttgctttgggttttcatgggactattggcaggatacgcgtcttcacgcctctacaagacgttaagaggaaccgaatggaaaagaaacgctctgaaaaccgcattcatgtttcccgctaccgtctttgtcgccttctttgtccttaatgcgataatctggggacaaaaatcatccggtgcagtcccatttggtacaatgtttgctttggttgtcctctggtttggtatctctgttccacttgttttcatcggtggctacattggtttcagaaaacctgcaccggaagatccagtgaaaaccaacaagatcccgcggcagatcccaacacaggcctggtacatgaacccaatcttctccattttgattggaggcattctcccatttggcgcagtcttcatcgagctcttcttcatactcacctcaatatggctacatcagttctactacatattcggcttcctcttcatcgtcttcatcattttgatcatcacttgcgcagagatcacggtcgtcctctgttattttcagctgtgtagtgaagactatcaatggtggtggagatcttacttaacatcaggctcttccgcggtttacctctttctttacgcagtcttttacttctacaccaaacttgagatcacaaagctcgtctctgcagtgctctactttgggtacatgctcatagtttcatacgtattcttcgtctttactggtgcaattggtttctacgcatgcttttggttcaccaggcttatctactcttcggttaaaatcgattga

SEQ ID NO: 179820 - DNA, 368 bp, Arabidopsis thaliana landsberg
atggatatattagatggcatcaaaacagttgaagcttggtgttttgaagaagagtatgataggtaggagaagtgaaaagttattgagctggattacttctgtgtctcttgtgttcacaaatgttgtttggtttcctcagaattcggagaggaggttcaatggttatgataaataaatgtctaatgtttgaagttctggtgagatatatttgccgacatcatgcttttgtgttcctgcaaacgatttcttgtgattgattctcttaaatgttgatatataggaacttcaccaatatgcatccttttacgagctgttgaaagccgagagttcagagaaagtgtttcctggcactaaaacagtggaagaag

SEQ ID NO: 179821 - DNA, 190 bp, Arabidopsis thaliana landsberg
atgaatagaatgcaagaaaaagttgacgcggacacgttaacctttttaaccaaaggtcttgtaataaagcaccggaaatacgcggatgtcgggggcaaagacgtcacgtaatctcttgaaatgtagaaattacgatgatacctctagtcccgtggcgacctcgtggcggctgcgtcgacgagccaagtag

SEQ ID NO: 179822 - DNA, 1164 bp, Arabidopsis thaliana landsberg
atgggagggaaagagagagacaatggcgtccacaggaatggcgaaattgaaggggagtttctgcgtcactctctgcagaaatcgatcacacgccttgagaaaggaaattcatttctcacttttgcgtttgaacccagaagaagaagaagcgatcacgtccatgaaattcgagcttcgacggttttggtgttatacgaatatcgaaaatcaccgtcttctcgaaaggtctaatagctccgtcgatcggaattgctgaagttttacagccacaggtgtttgtcttttcgcctaattcgattcttttgtcattaggagaaatctggttcataggtattttgctttgtcaatgcgagaatggttttagatccagcgattttataaccctttctagtcttggattccataatttgattatatgttggtatctttgagaatggttagctctgtacccttactatctgctaaaagcttgtggtgtttgctgaaatgctaggaagatttacaaaaatggctgaaaacataatggtggattctcatgtttgggtggaagacccagaaagagcatggattgatggggttgtacttaatataaagggagaggaagcagagattaaaaccaatgatggcagagatgtaaaactttttttttgtcttctagttatatgatgcttttgtgtctaatgccatttcaagcttttactggtgctgttttgctttccatactcctgattcacctttccttttactggtcaggttattgctaacttatcaagactctatccaaaagacactgaagctccttcagagggagtagaggacaggacaagattatcttatctgcatgagcctgcagttcttgacaccttggcaaccagatacgagctcaatgaaatttatgtaagaatattttatttctggttgtaaaaccaattattttcatcttgttccttggttaaaaccattagttaatgcagagataggcgagtctgttataatattttgacatcatgacagacttatacaggaaatattcttattgccgtcaatccctttcaaggactcccccatctctatgatgctgaggttatggagaagtacaaggaagcctatttcaaagagctgaatcctcatgtttttgcaattggtggcatcgcatataggtga

SEQ ID NO: 179823 - DNA, 574 bp, Arabidopsis thaliana landsberg
atgggattgaacccgccttttgcttacaaagccagtcttgctaacactttcattaagaaggccctcgaatttaaaccgaagatcttaatcctcatcgtaccaagtgaaacaaaaaggtaactagcaaatagacagtctcaatgacaaaacttttcataactatgggtttgtctacattcagggtcgatgcgattgatgattacgagttgatttgggaggacagaaatttacttgctggaatggtaagtacatgtacaaatgactccaactctcgtttaatttacgaataagcttttgatcaaactctttactttttgctctgcagtcgttctacttgcctgggtcagtagatgtgaatgataaaacgatagagcagtggaacaatataccgccacctctatacctttggagccgaagggatttgagtagaagccacaagaccacagcagttcaacagggtcacataacacagatgcatcacttcacctacaatggtgatagtcaccacacagagatccctcaaggtgatgatgatactgatatcgtacaagacatggagatatcccctacctga

SEQ ID NO: 179824 - DNA, 542 bp, Arabidopsis thaliana landsberg
aagaacttgaaggtttcatcgacaacaaatttcaagaagagcaaacatgagcggaagttcaaaggaaagtgtcatcattgtagcaagattggacacaaagctgatgtttgcaagagcaaagccaaggatatcaagagccagacaaacctaactgaagaagatatggttgcagtggtcactgaaaatataacatagtggaagacaaccaagtggagtggtactaggacaccggtgcaaccgcacacatctactctgataggaccatgttctccacctatgtgaagaacaagtaaactcttcatgggtaacacggcgatgtttaagattgaaggtaagggcaacgtggttctgaagctgacttcaggacgtgagcttactctgtaaaacgtgaagcatgtacctggcatgcagaagaatctcatctctggaacagtgctaagcaacaacggctttaccgttaactttgagtctgataaggtagtgattaagaaacatggggtgtatctgagaaagggttttgttaaggctggactggtcaaaat

SEQ ID NO: 179825 - DNA, 315 bp, Arabidopsis thaliana landsberg
atggtttggatcgaattccagttggtaagaaagaaataagtagtaaacataactagtcctgaagggattcaatcaattctaaaacttaaccattctatagactacggattccacaactactctatcccatccttaagaattctaagtcactactcagacaacatgcctcaaagacataaatgcaggtaaatgataatattgcataagtaaagagataaaaagtagatgaaaggtgaaatcaaatgcggactctgaataacttggaaaaatctcgaactacaggttgtagaagaaaaagcggcgcagctagagtaa

SEQ ID NO: 179826 - DNA, 456 bp, Arabidopsis thaliana landsberg
atgaagatgtctcgccaacggctgccgccgacgccgcaaacggacatggagccactacggcagcaggaccgaaaacagctcccgctgcaggggccgcggatcggcatagccgggtgcgacggcaagcctcccgcaggagttcaagtcaatcgcatacgaaactcatccgccgcaagcgcggccgatcctccccgcgacgctcacgctggcggcgtccgcacacggtacctgtcgcgcctcaacctcagaaggctcccagcgttgcatttccgtctcccggttagcgtcgccggcattgcatcgacacatcgggctcgtctaggagattcaccaatgttgctcgtgcgagcaaaatcgggccggacggacaaacgccggtcagagcccgagccgggggccgcaccatgaccgataccgaaaaaacgaaggaaaacggcaaggacgacgcgccgatgg

SEQ ID NO: 179827 - DNA, 712 bp, Arabidopsis thaliana landsberg
gaagttcatatgtgcatttcgacaattgttctcaaggaggaatctccaatgaatcaagatttgataaccatcaaaggtattatatatgaatttgccttctctcgacataatggatttgtaaagcatgagtttgacataatgttaatgaacacacgtagacaaagcgggaatgtaccttttgctgaggcaatgagacatcaggtcgatgcgcaacaacggtttcaagaacaactcgaggtaacaaatctcttctttcttctctcacaacaatgaataaaagttttaaaccgaagtttttgcggtgttataggtgcagaaaaaactgcagatgagaatggaggcacaaggaaaatatttgttgacattactagagaaagcacagaagagcttaccttgtggtaatgcaggggaaacagacaagggtcaattctcggatttcaatctcgcactttcgggacttgtaggaagtgatcgtaagaacgaaaaggcgggtttggttactgatatctcacactttaatggtggtgattcctctcaagagtttcggttatgtggagaacaagagaaaatagaaaccggagatgcatgtgttaaaccagaatccgggtttgtgcattttgatttgaactccaaaagtgggtatgatctcttgaattgtgggaaatatgggattgaagtgaagccaaatgtgattggagatagacttcaatag

SEQ ID NO: 179828 - DNA, 563 bp, Arabidopsis thaliana landsberg
tttgatggctttattgatctcgaagggtatgattccatagccctgaggctcaaaggagatggaaggtgctatatttctactgtgagtctcatgctcaacattcatgtctttttgctccagatgaaacacaaggttcaaggagcataacttttttactaaaaactaaactgcagttccaattcagatatatactgagaactgggtgaactcgccaggacaagcagaagacaactcatggcaggcttttgtttttgctccaaagggaaactggtatacagctaaggcaagtctcgtacttctacaaagcaactagtgttaaaaggggttttgctgtaacttgttaactcaagtgtgacatctttcttcttcaggttcctcttactcgctacttaccaacatggaaaggaaacgtgatagatgcagaaatggagatgaatccaggtcatgttgttggtatgtctctatccgttaacgcacaaggaggtggtttcattggagctaaatcaggcgcaggcgatttccaagtcgaaattgactggatcaaagcagtgaggatgccatga

SEQ ID NO: 179829 - DNA, 120 bp, Arabidopsis thaliana landsberg
caagagctttcgttttttattcttaaacataagcatacgtatgcttacggctcctcatgcttagaagaggacagcacggctctggaccctgaccttcactgcatggctgcgaagcgataa

SEQ ID NO: 179830 - DNA, 264 bp, Arabidopsis thaliana landsberg
aggtacaaatctcagtttctgaaggttgtgaatgttgtgagagagcatttcttgcagaaattgcgggcgaagaaggacacgtcggatctacttgtgatcatagccgaaatcacagcgtacttagatgaccggatgtatctcaaggaacctgaaggaagagctatgaagacgactagtaccttgtcctctgaacttactgctgaattaaatcagccgaactacaatcagaattaccagaggaatgattacagaaactactattga

SEQ ID NO: 179831 - DNA, 378 bp, Arabidopsis thaliana landsberg
agtcaaacgccgttcttcattgaagtttgagaaccgaacagttgttctagacacaagagagtctgaccatcatcaggtactgaaagccatatacttataaatattaactctctattaaacagtgttcatagactgtaaaaccctgagatttttcgtgtttattaggaacttaagagactgaagaaatcgcatcatcacgaaggaagatatagtagtagcagtagtgttagtaggcaagaagaagaagaagatgagttagtaatttcaaacaggaaagaaactcagcaacaaagtgacgtgaagatgcagaagaagaggatcgagaatcattttggtggctttaaacgtctgaaagtgaaagggctaataaagccgtaa

SEQ ID NO: 179832 - DNA, 354 bp, Arabidopsis thaliana landsberg
cgcttcggggcgcaaaagtcgagcccgctgtcgaaagtccgcctgctgccgcgtcatgtcagcagggccggatcagtgtgcctgaacaccagcaaaagggagttgccgatgatccatgccagagatttgacccgcactttcaagaccaagaccggcccggtgcaagccgtgcgcggcctcagcctcgacgtggccgagggcgagctggtggcttttctgggccccaatggcgccggcaagtccacctcggtgcgcatgctgactacgctcctgccgggcagttcgggcagcgccaatgaccccgcccgcgatatcgtggccgatccggccgaaatgcatcgcaagatcggctat

SEQ ID NO: 179833 - DNA, 213 bp, Arabidopsis thaliana landsberg
caatgtggagtcggtagaattttagagttggtcaacggtagcaaacatggtacaataacatccattggattgcatgtcacatctccggtcggaccttcaaccattgtggctctgatcaaagttggagacaattggattactgtcaccagcacgagcagtgtcaatgttgtaaacttcatgtcttacaaattggttttttatttttggttttaa

SEQ ID NO: 179834 - DNA, 589 bp, Arabidopsis thaliana landsberg
atgctgatacattcagttaatgataacgttaccgtcacagtaaagctaaacaacttcgattcgattaaaaaaaaactcgccgcttataaacggcgtctgcccaaaaaagtaggaaactcagaagtaaaaaaaacccaaaatcgcacctccatgaccaccgtctcctccgctttcgccaccgtagcggaaggcgcgaaggttgtcacaccgaggtggaagaagaatgaaagaaatggaaagttacgggtgatgtgtaggtatggcggtagtatagtttcacctccgcagacgaaatcgccgcgttatgtaggcggagatactcgaatcgtcgccattccttcttccgcggaaacgagcttcgcttctcttgttagccaccttacggttacgctcaaaatctcttatcctttcaaggttaaatatcagcttcctgatcaggaactagattcgcttatctccgtcgaggcggatgaggatgttcagatcatgatggaagaacacggttatctctcctccgagtcctcgattccccaatcgcgtatccgattgtttcttttcccattgaaatcacaacaatcgaatgaagctg

SEQ ID NO: 179835 - DNA, 879 bp, Arabidopsis thaliana landsberg
atgagtgagattgttacgatgaacaacaaacctaaagatggaggaggaacatcatctattcaatgtccgatgttgaacaacacaaactatacagtatggtgtatgaggatggaagttgcacttcgagtgcataatgtttggggaacaatcgaccgtgaatcagaggacgaagagaaaaacgatttcgcacgagcccttctcttccaatctattccggagtcgcttactcttcaagttgggaaactaaagacttcaaaagaagtctgggataagattcaatctaggaatcttggagcagaacgagttaaagaagcaaaactgcaaactcttatggcagagtttgacagactcaagatgaaggataatgaaactattgatgaatttgctggaagactttcagaaatttcaaccaaatcagcatccttgggagaagatatcgaagaaacaaaggttgttaagaagtttttgaaaagtctaccaaggaagaagtatattcatattgttgcagcacttgagcaagttctagacctcaagaacacaacattcgaagacatagtgggaaggataaagacgtatgaggatagagtatgggatgatgatgattcagtagaagaccaaggaaaattgatgtatgcagactcgcaatctcagtatgtttctcacgatagtggtagaggacgaggacagactcgtggtcgtggtagaggcagaggacgaagtgattacaagcagagagaccattctaaagtgacatgttatcgatgtgatagactaggtcattacgcctctaactgtccagatagattacttaagctaatcaaactccaagaaaaacaacaagagaaagaagatgataatgatgaagtggagtcactgatg

SEQ ID NO: 179836 - DNA, 337 bp, Arabidopsis thaliana landsberg
atgatcgtttacatcgccttatcgattcttacgttactgttcttagtagtcttggtcttacagcacctgactcagaagacaattctgacggagaagaacaaggagatcgagttcctgaggaaccagaatcaggacttattaaatagggttcaaagcaggaccttccgtgattatgcggctttaagcactcagattgaagcttatccgcaacaaaaccctcacactgacgcgcacgaacttgagagtttaggcgctgcgcccggactaggttacgagttatatgacgatgcagaaaacggagaagacgcagaactttccgacacgcttactgaacttg

SEQ ID NO: 179837 - DNA, 43 bp, Arabidopsis thaliana landsberg
gtcttgtgagatttacttctccggtgataacaaagatgattga

SEQ ID NO: 179838 - DNA, 1495 bp, Arabidopsis thaliana landsberg
atgaaaaacagcatagaacatcgaggtcaaaatgcatctaacccgctttatccgccaagtggaaaatctgttattgtcgttgagtcaatgacaaaagcaaagattattcagggttatcttggtgacatgtatgaggttttgccaagttatggtcatatcagggacctggccacaaggtctggttcagtgaggccagatgacgattttagcatggtttgggaggttccatcttccgcctggactcatattaagagcattaaggttgcattaaatgggtacggtttcttgcctaatcactactttaaaaatctattgttgctattatctatattccttaattctagaatactttccgggtgtcaaagtgctgtacagctattgagatatgtggcttgttcaaacttgtatgatatgaactacttctttcctatggtttttcttattgtgcttatctatctcattatgtttaccttattcctcagagctgaaaatctgattcttgcatcggacccagatcgtgaaggagaggcaattgcctggcacattatagagatgttgcagcagcagggtgccttacatgaaagtatgacagtagcaagggttgtattccatgagataactgaatcagcaataaaaagtgcacttcaatctccacgagaaatcgacggggacttggtgcatgcttatcttgcacggcgtgctcttgattatctcatcggattcaatatttcaccactactttggaggaaacttccgggttgcccgtcagctgggcgggtccagtctgctgctttggctcttgtatgtgatagagaaagtgaaattgatggatttaagcctcaggagtactggactgtaggaatcaaagtgaaagggaaagataattcagccaccttttctgctcacttgaccagtttaaattcaaaaagattaaatcagctttctatcagctctgaagcaaatgcacaggacattgagcaaaggatcaaatcagaaggttttctagtgaagggcactaaaacaagtactacacggaagaatccgccaactccgtacataacatcaacccttcagcaggatgctgctaacaaattacatttttcaacagcacataccatgaaggttgagagctaaaacctttttcattttcattcactttttccttgaattcatatttctaataataagtactttgcagctcgctcaaaaattatatgagggtgtccaactgtccgatggtaaatcagctggtcttataacatacatgcggacagatggtttacatgtgggtttatctctttaattgtgtattttctgctatgggcattcattttgttttgattttcaaaaatatgactttctgactgattcatcttatctgttacaacttcactttgattttccttgattcatttgtttcgtttttcatttgtttctgttcccatcagatagctgatgaagctatcaaagatatacagtccttggtggcagaaag

SEQ ID NO: 179839 - DNA, 2137 bp, Arabidopsis thaliana landsberg
  unsure (1)..(2137): unsure at all n locations
atgaagcagaaacatctcctgcttctagggttcttattagcttattgcttcagctctgtttttgtgataaacgcagaggacccgtatcttttcttcacttggactgttacttatggaaccagatctcctttaggtgttcctcaacaggttatacattgttctgtctatttttcctatgcattttcttaatttttagtattttttttctttataaaccgtggcagttccgggtgttttttccaattttcaaaagcagactttaggtatttcgatttttaaaaataacattttgtaccaaagagagactagacccgatatataacggaaaccaacactcttataccacttctacattaccatctctttaatcttatttagttctgtttcaatcactattaattaatataatcaaaattttgatcttatattgtttttcaggttattcttattaatggccagttccctggtcctccaattgaaggtgtaacaaacaataatatcgttgttaatgtcattaacaagcttgacgaacctttcctcatcacctggtacgtaaaatgttttagcatatgcaactagatcactcgttcaaattttatcccacaaaaaaactagatcattcgaataagctaccgatatttttcatatttttattttaatatacatataaattagttagtatttagacaaaaaaaaactatggaatcacaaaaccatttaccaatcagagaactagaacttgacactttcgaaaatgcgtaggaacggaattaaacagaggaagatgtcgtggcaagacggtgttttgggaacaaactgtccgatccaaccaaaatcgagttggacttaccattttcaacttaaggaccaaatcggtacttatgcatactttgcttcaacgtcgatgcatagagcaagtggtgcttttggtgcacttaacgttaaccagaggtcagtcatcttcgttccttaccctaaaccagacgctgacttcactctcctcgtcagtgattggtacaagatgggacataaggtacaaagaatccttaatacacgagttaacttatttcccaagtaaccaaattactttagggttgaactaagcgatctgaatatttctgcctcttgttattgtttttgacaggaactgcaaaggaggctcgactcaagtcgtgctcttcctcctccggatggtcttctcatcaacggtgcttctaaaggtttagtctttaccggtcaacatggtatatcctcatcaccaagatccactttcctccttaattcaactctcagactctcagctatttgatatcttaactgatgatatgtttttggtgtttgtaaaggcaagatatataggtttcggatatcgaatgttgggatatcgacatcgattaactttaggatacaaggacacatgatgactctcgtcgaagtagaaggttctcacactctgcaagaggtctatgaatcgcttgacatacacgttggccagtctgtgaccgtgttggtcacattgaaggctccagtgaaggactacttcatcgtggcttcaactcggtttaccaaacctatactaaccaccacaggaatcctcagctaccaaggttccaaaatcagaccatcacatccccttcccattggtcctacttaccatatccattggtccatgaaacaagcaagaaccatcaggtaatttatcctatctgatcgcacaatattaaaccgaacaatttcgtgcaacacctcattgaaaggtgatatttaggctaaatttgacggcgaatgcagcaaggcaaatcacaaggatcctttcactacggtactataccgataaatcgaacttttgttttagccaacggaagatccatgatcaatgtgaaactgtgtntacacagtgaaccgtgtgtcctacgttaacccagcaactccattgaaattagccgactggttcaacattcccggggtgttcaatttcaaaaccattatgaacattcccacaccaggaccctccattctcggcacttcggtctttgatgtggctctccatgagtacgtcgaattcgtgttccagaacaacgagggatctatacaatcttggcaccttgacggcactagtgcatatgttgttgggtaa

SEQ ID NO: 179840 - DNA, 148 bp, Arabidopsis thaliana landsberg
attgcacaatcgaactcgaaaatctagtggagactatgtgactatgtttatatatatgaaacctaaatcaaattatcccaataattgggagacacaaaagaaaaattacgaaagaaaacaggaaatcaaatcaaaagataaagagaag

SEQ ID NO: 179841 - DNA, 433 bp, Arabidopsis thaliana landsberg
cgcctgccgtcaaccacccgccgtccgagcagacaccgggcgccagaaactacgtggaggaatcgctatgccatactgtggtcgtggggttcctcaaccacgctcttcgtcgccgcgacgcgtaggccaccgcccgccattgttgccccgttcctgcaccgacgttcggtggtcgggattgggtcttgggcgctctacggcgtgtgtggattgtgtgtgtggagtgcccaatgtggggagcgacccgagcccctggaattcctcgtcgtacctcaccgccgctgcaactccgctccgcgcgtgtggactgggtaccttcgcggccaaatccctggggagccatcccctatcgcactcgcgctacgtgtaatttcattttttgcacatcaccgtaggtaagcttcactggatcgacggattaggtggctctccg

SEQ ID NO: 179842 - DNA, 439 bp, Arabidopsis thaliana landsberg
atggttaatagtaagaagaaagttgccactaaaaaaacctctccttctctcgcaattgccaaaaagaagtcccgtggcaacaaagatgttgtttctgttgaagcaccgattatatcttcatataacgatcggataaggccgttgcttgacactgtggacagactaaggaacctcaatgtcatgagagaagggatccatcttcccaccattgtcgtggttggagaccagtcctcagggaagtcaagtgttcttgaatccttggcaggaatcagtttacctcgaggccaaggaatctgcactagggttcctcttgtcatgaggcttcagcgaagctctagccctgaacctgagatttggcttgagtatagcgacaaagtggttcctacggacgaggaacacatcgctgaagctattcgtgctgcaacagatgtgattgctg

SEQ ID NO: 179843 - DNA, 2257 bp, Arabidopsis thaliana landsberg
acgaactcatgctcagatcactcaagtcattcgtgagtatcgaaaaaccggttacagagttcccatgactgtattggtatgtcaaaacttgatcggaggatcttgttttatttatgtattagttgcagctactcattaacattgtttctttttggtacatctttcattgtgttagggttcaaggaaacgttactgcaccaatagtcatgtacaggggaaagagaatgtagacgaaaaatggtaaatttgcatccatattcataccatctcactatcattttcaactatagcataacctatctatactaacatctatttatttttctagtcggttgctcctaaaagataagaaaaacataaaatgtgccgagttcaagtaacttttccctaatagtctaagttctttatgtttcctcatttttttgttacctcctgcgaaccatttaattgttttctttaacttccagtggcgtcggccggatcgtagcttacccatcacttcagcaaaccggtcacaatggggttcatgatattgaagaccttgtaaaaattggaaaaactgttacaggttaggatttggtttatctcacttttaagtgattgtattatttcagtttctttatctcaaattattttctttttaggctgtccatattttgcttcctggaaaatgttggaggttgcacaattggttttttgcccttattcctatataattgatcctgtcatccgaggaggagtaaataaacaaggagcgattataatctttgatgaagctcagtaagcttcagaactttcttagtatgctttgatgatgttgatggttaaggccgtctactaaaatcttatcactgtccacagtaatatggaagacattgctcgtgaagcaggaagcattaacttggaagaagacattattttcagtatgtaatactcaaacacaagttttgttcactgaaatatactttactaatgtgacttatgtgttatgcagaattgaagaatgaactagaacagatgagtgaggttgagccagagatatatgattccttgtatgaagtagtagaggtgagtcatttatctgcaagataaaatattaagaggtagcttttgctgtctactttttaatattgaagtattgttctatgtatttagggattgataagctggattggaagaaagaaggattcactagcaaaacgtgatgttaaccactatttctctaagtaagttgaaactttcaaccaactctatgtatatgcaatatacttcatagttttttttttttctctgctgtttatcaatgtgacagctggactggagatagagctttgaaagagctaaaggaattcaatatcactcgagaaaacttcccaaacttaaaggcatgttttaaccaagtaagtcatttcttctgtgttatctggctaggcctgcatacctttttactatgcttgaatgtaacgctttgcttactggtcaaggcgatcacaaaatcagaagcagcagaaattgacccggataagccttatttgagtgggatatctgtctccacactagaaggtttttttttgcgtctcactaacttttttaagcattgatcctttgttatgtaattttgaagaggagagcttattgcaaaattttcatgtagagttgtttgctacacttacatacttcttttcaagaaatggaagtcacgtcctagattatgaaatgggtttacaacgttctgctaagagaggtacaaccgtacaagtgaatgctttatagatagttatccgaaaatgtgttcattgttactttaatggaatgccggagataatgggtggacgaatactttcagtttatggtgcatgaatccgtctgttgttttcaaagacttagctgatctgtctttatccatcattttaacatctgggtaagcagtagtatcttgttgcttactattgcttctgcaaagagtgatttgctaaatgtttcttgagccatctccttcttggttaggactttgtcaccgatgaattctttctcatctgaacttgggatgcagtttggtacttgtttagaggctccacatgtgattgatcctaatatgcaggttccgactaaaggctctccacttagcaacactttcaagaactgaatgtatgatttaacaatattgttccaggtgtgggctggcgcaatctccactgttcctggtaactatcctctaaacgcaagttatagaacagctgaggcatatgcattccag

SEQ ID NO: 179844 - DNA, 350 bp, Arabidopsis thaliana landsberg
ccaaggcaaacaccccacccacttagttactctgctctgctggctacacgcatagtgtcgtttcgcctccagtccaccctcctggtaagcacctccgctccaccaccagtaatatcacaacaccacatgacacagattctactcaagactctacccatccatatatcgctattctgaccactatactaaatatttgttggtatacttgctagtttgtatgtttgcttgttcatgttgcatagttatcggagcgttcgtgtcgtctcgtggaggccagatctgcaagtctacgccagacggtggagccagaagccagttctgcgagctccccttcccccttcgccgaataa

SEQ ID NO: 179845 - DNA, 62 bp, Arabidopsis thaliana landsberg
ctgattttgccgagaaagatccttctggccgttacatcagggaaacgaactgtcttcgttga

SEQ ID NO: 179846 - DNA, 706 bp, Arabidopsis thaliana landsberg
atgaccgacacagaaatgataacctttactctgcgccgcctaaagcactcatcggtttttttagctgcttttcctagcctcctaaggaaatatattaaggtgtgttggagcaagatagtattctgttcatgtttcttctttatggtcctttctttgctcacttcattgttgctcttctgccatctaggttgcacttcatttctggggaactggtagtggtgcgctccctgttgtttccttgttgttcctgagagatttgtgcatacgccttggatctgactgtgttgatgactgtttcaagggaatgtacaaagcgtatgtgttgaattgccagtttgtgaatgctgataaattgaagcatatttcgtttcttggtaactgcttcattgagcttctcggcacagatatctctgcagcatatcagcatgcatttgtcttcataagacaattggcaatgattctgcgtgaagcgcttaacacaaaaacaaaagtactttctcaataatcttcataaattgagttcttctgacaacaattatgtgttgagaaaagttgctgttaactcttatttacatttggttgttttcacaggaagcatttcgaaaagtgtatcaatggaaattcatccattgccttgagctttggactggagctgtttgtgcctacagctctcagtctgaactcagaccagttgcttatccgctag

SEQ ID NO: 179847 - DNA, 484 bp, Arabidopsis thaliana landsberg
atggagcaatgttatggagggggtatcatcctcgatgaatcatggctcggcaaaagcacccactccctaccgctggctatccagaaacatcagccattggccaaaactttgatcattacgccattgctcgctatgtctcgctggcaagaagacatcgcccaactgtttagtgcaaaagtggttgtgtttggtgagggatgcacagctgaagacttgactgcttctgagtttgtcataactagtcacgcaacagtcaagagtggctacaaagcagttttttgcccacactgccgcaagcttcttagctcagccaaaccgcagcacttctgcgacagatacaaagatgtaaagaaaaaggggaaaaccatcgggccactccactcaactgaatgggaaagggtttttttggacgaaggccacctcttggaaggaggagaccaagcgatgtttgccctgaaagcaaagtttcgatggattcttacca

SEQ ID NO: 179848 - DNA, 489 bp, Arabidopsis thaliana landsberg
  unsure (1)..(489): unsure at all n locations
atgaattcagtgaacttctccgcgatacacgcgcagcacaaagcccgattgagcttaccagcgatcaaatccttccctttgagcgtgattacgattcagcggaattcgatcgccttgatcaggtaattgaagaacgtgtgcagcgtaaggccggttcgcgccagggccaattcaccgatatgggccgcccgacactggcaaaggttataccgcttcgacgcgcataactgataagagtttaaccacgaagaacattactatcccctcaccgtcctctcattcctctcattgtgcactaaacgatgtgagtgcactaaacggtgggagcagcgggtacggtgaggggaaaataccccgaacagcttatggcttcggggtgctcaggccgagcacctgcgatacgtgttcgcgctcgtgatcatcgacccagaggcagcaggcgaatttaccttcgacggccatggcgtctactgcgcgcagattgatctn

SEQ ID NO: 179849 - DNA, 204 bp, Arabidopsis thaliana landsberg
atactcttggggtttgtttcgacacagaacgaagcttctatgtcgcaaatgtaataattatatcggcaatgcttctcaggagaaggctcctgagtatgcacttgttacacaaaactcggatccgacatcgcctaggattggtagtgttacgaagtacgatatcagaatccgctcgcttcaaccttcttctgcggtcgctttgct

SEQ ID NO: 179850 - DNA, 408 bp, Arabidopsis thaliana landsberg
  unsure (1)..(408): unsure at all n locations
atggaaaccaagatcttcggccggctcaccgcctggcagaactggatcttccagcgccccaacgccatcggcgagcagggcgcgctgaaactgtacgacagcggcgtcaagccgacgttcaataaggaacgggtttgatgctgtcgcgcgccacacactcattgtcatgcgcgggcttgacccgcgcatccatgatgagctggccagaaaatggtgacgacgacattctttnnnnnnnnnnnnnnnnnnnnnnngggccaagcccggcaatgacagtggataggccgtgccactccagcgaaagagtatgacgccatgaacatcgtcaacgtcgattacgacggcctgatcccgaacaatgtcggcctcaactcccatacgagcccccagcgcgcgctggagaagtaa

SEQ ID NO: 179851 - DNA, 519 bp, Arabidopsis thaliana landsberg
aaagaagaacatcttcaaattggcgcagggggagtacatagctccagagaaaattgaaaacgtctatgccaaatgcaaatttgtgggccagtgcttcatatatggtatagtaaacaatttagcattttgctttttcctttccccatctcacctgttaccaattttcaggtgatagctttaattcatcattggtagctgttgtatcggttgatccagatgtgctgaaaagctgggctgcttcagaaggcattaaggtgatataacttacttcaccaaattctctaaatgtaacattagaaaactaactttataccactttgctgaatgtagggaggagatctgagagaattgtgtaataatccgagagtgaaagcagcagtactatctgacatggacactgttggaagagaagctcaggcaatacatctcagaaaacaaatttctttatatcatcagttagttactattctcaaaaacatgatgattgatttggatgataaaaatgtttggtgcagttga

SEQ ID NO: 179852 - DNA, 197 bp, Arabidopsis thaliana landsberg
atggcgtcaatgttacggttgggagctacagtttccgtcagcaacagtcagatactggcaacatcaagtgttgtatcaaccatcaagaccgaagaattaatgaatgatcacattaattccctatgtaaaagtaatttctaccgggaagcattggaagcgtttgattttgcgcagaagaactcaagcttcaagataag

SEQ ID NO: 179853 - DNA, 557 bp, Arabidopsis thaliana landsberg
cgtggtagcggcggcgatccagccaaccgctttctcgatcacggcaactatctcgcctacgggctgggtgccaccgccacctgggttctgggactgccgcacggactggccatcctgcacggcaagacccgccgtggcggcctggtgttcgatgtcgccgacctggtcaaggacgccagcattcttccgcaggctttcatttcggccatgcgtggcgacgacgaacaggcattccgccgaggctgcatcgaagcgctgacccgcagtgagtcactggatttcatgatcgacacgttgaaagccgtggcagtcgaaacggcggcgctggctacatgaacatccttctgatcagccagtgcgacaagcgcgcactcaccgaaacccgccgcattctcgaccagttcgccgaacgccgcggcgaccgcacctggcaaaccccgatcacccaggccgggctggatactttgcgcaagctgctgcgcaagacggcacgcaagaacaccgccgtggcaaaccactggattcgcggactggaccacagcgagctgatgtggatc

SEQ ID NO: 179854 - DNA, 535 bp, Arabidopsis thaliana landsberg
atggctcaggccgtggtcggggtggaggaggtggtggtggcggtggtggaggaggaggcggtggaggaggaggaggaggcggcggaggaggaggaggaggaggaggaagtgatgggaaaggcggaggatggggatttggatttggatggggaggtgatggacccggcggaaactttggtcgttgttggtatcccggttgtactaaaaagtcaacggaaagtcataattaaaacatagcaatgatatgtcttaaagccatgctttttcaccacaacataaacacacaataattcctttgtttttttcctttttcaatggccttattaagacaacaacgatttctttctgttttgtaatgtcttgggggattgtgcttccaatgaaaaactaaatggtaatgtttccgaatttgtttgttcttttctcactgatctttccacattttgctacttagttataaatgattttcccaattctttcacagtttcacttccggaccaaaatttttgataaggatccaaaagttgtgttttaa

SEQ ID NO: 179855 - DNA, 360 bp, Arabidopsis thaliana landsberg
gctggcgctggtcaactggccgctctcgggagctcgacggcggcgtatggctaaaaatcatcggactgtccgatggtgcaccggactgtccggtgagccaacggtcggtctcgcgatccgcgcgtgacaagtggccgagccaacggtcggaagggggcaccgggctgttcggtgtgcaccggacagtgtccgtcggccaacggctccaaagcaccaacggtcggcttcgcaaagaaggaaagaaatctgcaccggacagtgtcgatggtgcaccggactgtccagtgcgccacccgacagaaggcaagatttgccttcctagattacttccaacggctcctaggccctttgtggctataa

SEQ ID NO: 179856 - DNA, 238 bp, Arabidopsis thaliana landsberg
atggatgatttctcatcctttcgcatcgaacccctcctcgaaggaataggagagagtaagccctgagagctaagtctatgttttggtagtgcttgttcatctgcttgttcttctaacaaaggttttgtaacagtaggtaatgattccggagtatgtcttcttatcaaaccagaagacaagaaagagcttccgaatctcgtcatcgaattattcccaagaaaacagataacgggagacg

SEQ ID NO: 179857 - DNA, 134 bp, Arabidopsis thaliana landsberg
gccaagtctaatttcaccaatgcagatagactcaacagcgccctgaaatgcagtgcaaacgcggatgggtcatatgtcaggattggcattgccattggcatggaccgtggaggaatgagaggccacgaaagcag

SEQ ID NO: 179858 - DNA, 170 bp, Arabidopsis thaliana landsberg
ggctggatgcacaagtggcgtcgctagactggacaatgatgctactgtgtacaatactaaacctgacaacaccccccgggtactgatgaatatacactcacgcctcaaactcatcgtctttcatgtgtaccaacctttactggacatgatgaccaacccaactgacaatg

SEQ ID NO: 179859 - DNA, 708 bp, Arabidopsis thaliana landsberg
atgaataatcattcagtgactcgagactggaaactcatatgcgaaacatcgtgtttggagatggacaaaaggattcttaaagttaaaaagattcatgattgctctgcttctggaactactgctgttctcgccgttaaacatgtaagttattcatatctttaatgttttataccgctttatatattaggggatctattatttttcattgcaaaaatattgttcattttacgaaattgtgtattattaacaacaatattaatttgaacagggaaatcaagtgatggtggcaaatcttggggattcaagggctgtcatgattggaacaagtgaggatggagaaaccaaggtggctcagttgaccaatgacctgaagccaagtgtcccaagtaagtttttgaagttaattggataaagtgatgttgtaaacaatgatacgtacaggtttcattatggttaagcatttttgggttaattaattttgtagacgaagcggagagaataaggaaaagaaacggaagggtgttagctttggagtcggaacctcacattctgagagtttggcttccaaccgaaaaccgaccaggcctagccatgtcgcgggcttttggtgatttcctccttaaaagctacggtgtcattgcgactccgcaagtctctacgcatcaaatcacttccagcgaccaatttctactccttgcttcagacggg

SEQ ID NO: 179860 - DNA, 125 bp, Arabidopsis thaliana landsberg
gcagaactgagcatgccgacacgataaaatcaatctctgttagacaattacattatttagatcattcgaccgacgacggaacaaccggctatcaggatttgattcttcacatttttctcggttaa

SEQ ID NO: 179861 - DNA, 238 bp, Arabidopsis thaliana landsberg
atgccgacaaaaatagggatatatcatcaatcatccaagctgtgtgtggagatacatcaccgggtagtacatgtgaaagacggtagcggtcaatgtcagaagaaaggagcaggtgagtttgtacatccacagtgtaagcctggtcatctgaatcttatagtatctcatcatctccttaggtaaactcaactacaggtggttcctctatggacctgcgacgtttaggaacttcgtctga

SEQ ID NO: 179862 - DNA, 1678 bp, Arabidopsis thaliana landsberg
ctatcactgttcgccaaaatgcttcacggatgcgtggcagcatcacaggactttgcacgagcgagcagctgcggaaaacaacgcaaacgaggatgatgacttgaacaggaataacagtgcgggttctgggtctctcgctggttccttatctgggtctatgtcaaatcttagtattgccaacaatggtccagctccgttttatccttctaatattactcagaaaaatggaggagagactttagttgaggttgggggttgcaaaacgtacactccaacagctgatgatattagccacgttttgaagttcgagtgtgttgtggctaatgctgagactaaacagattgtcggacatcctagtaccattttgacttcacgggttattcctgctccttctccaagcccccgtaagctaatccctgttaacggagctgatgggatgggtcacttagatcaagatgctcggattcagtctgcaggatcattcactgttctttcatataacattttgtctgatacttctgcaagtagcgacctctacagttactgtcctccttgggctctttcatggccataccgaagacagaatttgttaagggagattgttggatatagagccgatgtagtttgcctgcaagaagtatgttattcgtatggacttggtaatgatttaaagcattttaattctgaaaaatctacttctaatgtgttcttttttttgttatctggcaggtacaaagtgatcatttccatgaaatttttgctcctgagttggataagcatgggtatcaagctctttacaagaggaagactaatgaggtttggtcaatgattccacacactccttccttcagtgatttatgttttaaaatctattaaccacaaatttcttgttgctaggttctcagcggaagtacaagtgccattgacggctgtgcaacatttttccggcgggataggttttcgcatgtcaagaaatatgatgtttgtattcagttctatatgtttacttgctagatccagtaagatctctatactaattcatggactgtaaatccaggttgaattcaacaaggctgctcagtctttgactgacgctctaatccctcaggctcagaagagaactgctttaaaccgactggttaaggtatttttgacatggtatacaatatttttctgggccacagctgattatcagagagttattgtttacaaaactgaaaccaatgattcttatgttgtaggataacattgcgttgatagttgttcttgaagccaaatttggtaatcaacctactgatccttctgggaagcgccagcttatttgtgtggtactggttctttttttttttccattctcatgagaactgttagtttctgtatatgctcttttagtgaaagccaatgaattttcttattttgttgtggcaacttgtttaggcaaacacacatgtaaatgttcaacaagatctgaaggatgtgaagctctggcaggttggtgtatctctatatccgaaataaatcaaatttcattgaactcgaaagaattagtattcacctcatgttttcttttattcttttgcgtttaggttcataccttattaaagggactagaaaaaataacagcttgtgccgatatttctatgcttgggtgtggagacttcaatacacttcctgggag

SEQ ID NO: 179863 - DNA, 180 bp, Arabidopsis thaliana landsberg
atagatcatgctggcagcttcacttgttcccttgtggacttgtcttcaaaatacctgagcaacaagttgtgcaaatctcacatatttgacggatcaataattgtaaaaaacggaagctcaagaagtggagaaattgcaacagacgtgaaggcaatgaaagagaatacagaaaggagatga

SEQ ID NO: 179864 - DNA, 151 bp, Arabidopsis thaliana landsberg
atgcttccaaaaagaaaggcgaaacatgtttgtttggtacaccgtcaatcttataaaacctggcccaagatagcacagcccgtccagatgagaatatcacagtattccagctgtttgggtgctgccttactcttgtccgacaacagagaag

SEQ ID NO: 179865 - DNA, 74 bp, Arabidopsis thaliana landsberg
ctgtatacagaaacaaacttagctcagaaaaaccacaaaaacgatacggaataaaacccgaagaagcgaattga

SEQ ID NO: 179866 - DNA, 353 bp, Arabidopsis thaliana landsberg
atggttctaaattttatggaggataacaacggcggcgagaaacagcggtgtggacgtagccgatgtaactgttttagcgggagtggtacagagagctctgatgatgaaactgaatgttcttctggtgaagcttgtgagatcctcaaggtatgattcttcaattttgttctggattctaggttttgttagaaaagcagaacttgatatatggagattcgattttgtagagtttggttctctgtaagagcatccgtgtgaggaatttgctgactgatgtgaccaagattgcggaaacaagtaagaattgcaagcttaaagatggatcgtgcttgaaaagtgtggctaatgggtta

SEQ ID NO: 179867 - DNA, 113 bp, Arabidopsis thaliana landsberg
tccggctgctgcaaaccaccgaccgcatgtggctacaactttgtgaacccaacactgtggctaaatccgacgaatatggctgcagacgcagactgttacttatggagcaatga

SEQ ID NO: 179868 - DNA, 1239 bp, Arabidopsis thaliana landsberg
gctgctgcaacaccagtactatgtgttgccaggaacgttgcctgtggtgtcagaggtggatttttcaggtaagatgtcagatttgataatagtagtttgttttcttgacatctctactgatcaagggtgcttccttagtacatacttacggtgaaatggtatttgaacttggttacagggattttgatgatagtctgctaccaaggattgctgaaatttcttatgagaatgatgctgaggatattccttctccgcctgatgtcagccattatttggtgtcggaggttagtcgtgatacttgttagtgattgggagtagataattttttggttctcttccaggcagtctgggagcttattttactcacctttgaaactatttcccagtagctcattcttttttcaatataggatgatacatcgggtttaaatgggaacaaagatccactttcctttgacgggatggctgatactgaagtggagagaagactgaaggtgatttacattttgaggctctattgttactgagttattgtggtgatccattaaagatgccaactccagtaaacatggcttctggtttaaattttctgcccaatgttgaaattcaaatacatttttccgttttattcaggaggcaatttctgcatcttcagctgtccttccggcggcaaatatagatccgaggatagctgctcccgttcagttccccatggcttctgcttcttctgtttcagttccagtaccagtacaagtcgtgcaacaagcaatacaaccttcagctatggcctttccaagtattccatttcaacaacctcaacaaccgacatcaatagctaaacacttggttccttcagaaccaagcttgcagagttctcctgctagagaggaaggtgaggtacctgaatcagaattagatccagatactaggaggagactcctcatattgcagcatggacaagatactagggatcctgctccaagtgaaccttcatttcctcagagacctccagttcaagctccaccctcacatgtgcaatcaagaaatggctggtttcctgttgaggaggagatggatcctgctcaaattcgtcgagcagtctcaaaagaatatccgttggattctgaaatgattcatatggaaaagcacaggcctcgtcatccatcatttttttctaagattgataactcaactcagtctgacaggatgcttcatgagaatcgcaggccgccaaaggag

SEQ ID NO: 179869 - DNA, 898 bp, Arabidopsis thaliana landsberg
atggctagtcagctgagattgcagggtgcctgtttcccagaaagagctctgtctctaacacattggaatcaagtgctgcttcagcagcgggtatctaatttggagatggcgaatgctggttagtgccctctgtttcttctttggctacttgactggtctgctttttggctaaacacccttgtttgaccgtttcttgatagatatggcccggcggtactctgatcttgaagagaaatattctcaaggtcaggcggacttggtccgggtttctgcttctctaaatgatgccaacatgctgaactccactctcaatgcttagcttgactctgaaaaggtgaccaatgaattaagctttacttggctttctctgctgtgttcttaatgcttgcttgatgttggagaactgattcttgtctacaggaggaaaaatgtgcccttgccacttctcgtgataaccttgataagttatatcgcgacgccagcaactcattgactatcttggagaggagccattgtttcaccatggaggacttggataatcatcattataagctgcaagagtccctggatgatatgattcgccttaggaaaattggtgtcgagcaaggattctatcatcaaggatctgcatgcttccaagagatcagtcgtccaggagctagaggctgctcaactggctgtcaaggctgctgaagacacttccgctactttgagggcccagcgcgacagagctatggacaaagtcgttcgcgctggacggatcctgatgaggaggcccggtgtcgcggtgcctgacgatattgttgctaatgttaaggccgcgctcgatgctgcaagccatccttcttccgttgcacctatgaaagacattgccagcaaagatgtttcgatgcagtga

SEQ ID NO: 179870 - DNA, 97 bp, Arabidopsis thaliana landsberg
atggttgctggtaatggcgaggatagtgaagatggggaagctgaagatcccgtgcccccagaggatgaagaagcagagcaaaatgcaaaaacatctg

SEQ ID NO: 179871 - DNA, 446 bp, Arabidopsis thaliana landsberg
gtgaaaggtgtggttgcaaaactgataaaagtgaatgataggtcctcaatgacagctttggaagtaagtaagttattatattgttgttatattattatactttgtcagattgtttgagttctctaaggtgactattttttcaggttactgctggtgggaagttatttaatgttattgtagacacagaagatactggaaaacagctccttcaaaagggtgatcttcggagaagagttacaattattcctcttaacaaaattcagtctcacctagttccacctagagtgcagcaagccactgttagattagtatgtggatcttttttgttctactgtcaaattcaactctttctttgttccttgctgattttctgctaatttctccaggttggaaagggtaatgcggaattggcactttctttagttggttatagtgaagaattaaag

SEQ ID NO: 179872 - DNA, 287 bp, Arabidopsis thaliana landsberg
gacgtgtcgatgttctacctcgacttgttggcgttgttcgtgcggcaaaacatgcaccgagtcgccctcatttggtgagctctcgtgcgagttctgttttcttccctgtcggcattcgctgtgttagctggacgcacgatgttctgttttgcgtaggcacagatgcctgcgacgtgcggaacgatcgatctccaacagcagtaacacgcggtgtctgcaggccacgtgtgtacgagcacagtctgcagcatcgaacgaaaaaaacattctttggctttcagtacatt

SEQ ID NO: 179873 - DNA, 142 bp, Arabidopsis thaliana landsberg
caaacgatcaaggaaacagaattacaccatcttgggttgcatttactgataccgaacgtctcatcggggaagctgctaagaatcaagcagccaagaacccggagcgaaccatcttcgacccgaaacgtctgattggaagaaa

SEQ ID NO: 179874 - DNA, 577 bp, Arabidopsis thaliana landsberg
atggtgattgatgacatagatgatgttgtcaaactttcccgaaaattcgctcagaagattcatcgccaacacgtagtcaactacggtagaatcgacatttactagaaaatcacataatataaatttttttcttgtaattttgcatttagtaatctgccgttattaatatcttcgaaaatcaaatctcaaaaggttattatctagaacttttttaataagaaaattaaaagtattgttctttttagttattagttgaatatttgccatttttgatatagcatttggtattcaggttatgtcgaatcatttgactagtactagttttggaagtgaacatgtctcttcgtaagaagtagcccacatgcaatgttttcattcatacggtataattgaatctaccattgtagcgtgttgcatttttgtcccgagtattgatacaactatattatcacagcccatattattatttgattgatgtaatccacttttaatagatctaattatggttaatcgtttcttttagtttgagaatagcatgaaatttttccggtcttatatggttcggattcaagtttaa

SEQ ID NO: 179875 - DNA, 78 bp, Arabidopsis thaliana landsberg
ggtggctggacggtgctgcgtcgctggatcagcgacgcgccgcagttcggcgtcttcctgctctcggcggacgcctga

SEQ ID NO: 179876 - DNA, 378 bp, Arabidopsis thaliana landsberg
gtaccctcatcacttcggacaagaacacctattccggtgtgacgacgatcggctccaccggcaccgcgaccgcaaactccacgctgcagatttatcacgtggccaatggcggttccgccagcggcctcggttcctcctcgaatgccggcgccaaccttgtgttcaccagcacgacggctggtaccaacggtggcgttctcacctgggctggctacaccaaccagagcaccgatcggttgttcaccttcggcaccggcgccaacgccgcgcgcatcaatgcttccgggggtttgatcggcaccaccgccccggcgctcgtcttcagcaataccggcgcgcttgcgatgagcggctccagcacgcgcacccttacgctcg

SEQ ID NO: 179877 - DNA, 190 bp, Arabidopsis thaliana landsberg
aagccaatacatacttcaaaagacaccacccccggagctgaaagaagagcgtgctacgcttttggaggattggcttaacatggagacaggctttggtgagctcggggatgttagtgtcgttcaatcaaagctcccgaagaagctcaagaagagaaagatgaccagtagagaagacggctctacagagtag

SEQ ID NO: 179878 - DNA, 2468 bp, Arabidopsis thaliana landsberg
agattctaggctgagaatcattcacagagacctgaaagctagtaacatcttgttagatgagaatctgattccgaaaatatctgatttcgggttggccagaatttttccagggaatgaagatgaagcaaataccagaagggtcgttggaacatagtaagtaactccattcaaccatatgttacatctttttttccattaagatagtcctaaaacagagaaaatgtatcgtgcagtggctatatggcacctgaatatgcaatgggaggactgttttcagagaaatctgacgttttcagcttaggagtgatactcttagagattatcagtggaagaagaaactcaaattcgactcttttagcttatgtgagtctaccttaactctactaagtttcttaactctcttgaatttttctcaagccctaagagctcctctgttttataggtatggtcaatctggaacgaaggggagattaatagtctggtagatcctgagatctttgacctactctttgagaaagaaatacacaaatgcattcacattgggcttttgtgtgtgcaagaagctgctaacgataggccaagtgtttctacagtgtgttcgatgctcagcagcgagattgcagatattccagaaccaaaacagcctgcttttatatcaaggaacaatgttccagaagctgagtcctctgagaacagtgaccttaaagactctatcaacaatgtcaccatcaccgatgttacaggacgttagaacctgcagaaaccaaaatgtatgtgtaattcgcaaaactctttaagcattacaagagattatatcatctatctatatagatagtaatgtctcatacatctagtaatgtaaaagaaattatgtttatataacaaatcaagaaactcttatatgcttttgctaatccttgtagatgcaagaaccagcttcttttctgaacattaccacttgacttgacttttcactatatcaatatttgacttttcttttgagaatttaattctcaccacaccatcagctaccaatgtttaatgctacattcaattctgagatcttgctacttagttcttgttgagtttggtctttttaggaaaggatattacaaagcaaaagctatatctaaaattgagtagtttttcgtcttgagaggctgggactaaaagatatgagacttcatgagagcttgagtcctattgttcatgttctttcactgtcttgcttctttttaagcgtctctctagctcatgaaagagctttattttctggcacgctcaatgattccgagacgatagtctccagcttccgaacgttcaggttcggtttcttcagccctgttaattccaccaatcgatatgctggtatatggtataacagcattcctgtacaaactgtgatatgggttgctaacaaagatacgccgatcaatgactcctctggagtgatttcaatatctgaagatggaaatctggtagttactgatggtcagaggcgtgttttgtggtcaactaacgtttctactcgagccagtgccaattctactgtcgctgagcttttggagtccgggaacctcgtgctaaaagatgccaataccgatgcatatctttgggagagcttcaagtatcctactgattcttggttgccaaatatgttggttgggacaaacgcaagaaccggaggaggaaacatcacaataacttcttggacaaacccttcggatccttcgccggggagctacactgctgcactcgttcttgctccatatccagagctttttattttcaacaataatgacaacaatgctacggtgtggcgcagtggcccttggaacggactgatgtttaacggtttaccagatgtatatccggggctctttctttatagatttaaagttaatgatgacaccaatggttcagccaccatgtcatatgctaatgattcaactttgagacacctctacttggattatagaggatttgctatccggagagattggagtgaggctaggagaaactggacgttagggtcacaagttccggcaaccgagtgtgacatttacagccgatgtggtcaatacactacctgcaatcctcggaaaaacccgcattgttcttgcattaaagggtttaggccaaggaaccttatagagtggaacaatggaaactggagtggtggatgcataagaaagctccctttgcagtgtgaaagacagaacaataaggggagtgctgataggtttttgaagctgcagcgaatgaaaatgcctgactttgcaagaagatccgaagccagcgaaccagaatgctttatgacttgtttgcagtcatgttcttgtatagcttttgctcatggattaggatatggctgcatgatttggaatagaagcttagttgattcacaggtgttgtctgctagtggaatggatctttctatccgtcttgcacattcagaattcagttaa

SEQ ID NO: 179879 - DNA, 59 bp, Arabidopsis thaliana landsberg
gtgaagagcaggtggtccaagaggagccgccctataatgaggagtatgagttgatctag

SEQ ID NO: 179880 - DNA, 688 bp, Arabidopsis thaliana landsberg
atggttactgatggacaaagacccttcgatgtcgtcgctgatgaggtaacactagcaaagtttccttgacacatgcttcttgaatgtattttcatctcttaagaatttttttctgtgtttcccctcacacattggacactgttttcattgcagcttggttccgcagagcggttcatgaaagagtcgcagttcttgatctatgggaacggtaaagacaagcctcctacggggttcatgtttgagaagccacatatgaaaggcttgtatttcaatcaatcaccacataaggtaaactcttagaataatcaagctcagtgatcagtaacagccccaatctagagtggttcaagttctgtttttatggataggcctaatgcaacaagtgatcaatttttctttcttaaaattgtttcaggacattgcattgtcaatgatctcgatgcggcctgtaccattaggtcccatgatggagaagttgtcacttagtgcagaaagatatgggaaaggtcggagattctatattcagacgctcgatgacttggctctttcaccggacgttcaagagaaactggttcgagagaatagtcccgaagcagtttttaagatcaaaggaagtgatcattgccctttcttttctaaacctcagtctcttcacaagatccttcttgaaatagcacagattccttaa

SEQ ID NO: 179881 - DNA, 753 bp, Arabidopsis thaliana landsberg
ccaatgggaagacacgtcatttgacggtcgaggtcaccatagacaggttaatcaagtcttaggtaacctctgtcgtctacataacccaggaattgtcaccgacccgaaaggtgtggtggttccttgcactagctggtcgcacttcgcactagctccacatgcgacatatggaacagctcaaggcgccgtcaagcgtgacttttgggtaattttttcgaactaacatttattagctgtttcaaactaacatttattagttgttttcaaactaattttattttcgatgttggacagagacgctatcgtgtggaacctgaggctcaagagcatgcagaccgagtattagagaaaaatgcgaagaaggtgtgcagggatgcatttttcaatgctcgtctacaggttgtgaacacgtacatgaagcaccgaggtcattctatcaacaactttcgacaatattcggatgtctacttgactgtagaccagtacatggaggtaaaaatctaatttagcagctcattcagatgtgaatgtaattttgagctaacgctttatatgcaggtaactcttccatggatggaacactggcctcaagcttacaaggctttgtatgagatatgggcttcaccagagtgtattgagaagtctaacaggaatcgacataggcaacaccatcagcaggacgaggacgatgatgaggtcatagtcaaccatacctatggggctgatggacacattcggttggcgaacgaactg

SEQ ID NO: 179882 - DNA, 289 bp, Arabidopsis thaliana landsberg
acgatttttgatatacaggcaatggatcctcctgtgtcggatcttgagagtattgaagatcagaaagaaggaggaccttcctttcactgtgatctttacgatacacaagtagttcacaagattgctcaggtttttctccctggtttagccactgcttgtgtcgataacactaccggagatatcttcaggagtcctggttctgttgctgctgacattcgaaaagaaatgatagagtacttgactcgtagaagcgaaacctttgtggctgaacacattgttcttcaaggag

SEQ ID NO: 179883 - DNA, 530 bp, Arabidopsis thaliana landsberg
catcatttttccattccctgctggggtcagcgctttgtttagccacggaccaaggcgctctgctagtcgcacacgcgtttatgcattgtggaatgtcacatccttggtcaatgtcgtaagtatttctctctttatgcaaaagctacatctgaaaattcgacttctatagtttctgcaacttcctcttacttgattaaagatcctttgtgcatggtgggtttttgcaggttgtggcatttgtgtgtggatatgttcactatcatggctcatcatctgggaaaaagatcccgtatctccagccatggaacattagcatgtgagagaagaaaacaaacttcactctgagctcaaaccaaactacagattccttcttgcatcatcaaaacttatttatatttcttttgcagggacgagaacgaatggtggatattcccagtcgctttgtttctatgcaaagtcttgcaatcccaactcgtaaactggcacgttgcaaacctcgagatacaagattactccttgtacagcgatga

SEQ ID NO: 179884 - DNA, 256 bp, Arabidopsis thaliana landsberg
atgggcctgggcttcatcgccagggacaagtcgtatcattcatctgatcatcggtaaggtttcttctaaaattgttggtggtgtccgtgatttgctcaggtaattgattaaacgataaaaagacaaagttattattgaattaaacgttgattaataattttttcagaatgtctcatgtaatttgagttgtctatgcaaacatttcagggaatgataattcgtatataatttatattgtttggtttacagagattaa

SEQ ID NO: 179885 - DNA, 214 bp, Arabidopsis thaliana landsberg
atgattaatcagatattaccctcggtgtcagagcctgttacaaacatagttctagtaggatgtactggcaatggaaaaagtgcaaccgggaataccatccttggtgaaaaactgttcatatctaaaaaatgggcgggaggtgttaccatggaatgtaagatgtttaaagctacaacacaagatggcacaataatcattgtgattgatactcccg

SEQ ID NO: 179886 - DNA, 489 bp, Arabidopsis thaliana landsberg
atgttgatcggaggatttgaggataaggacgcagctgatattataattccggcatctgagaaactactggagaaatgcggtgtatgtaattccttctttcaatcttccaaaattattagaattgtgatttgttagcagagtctttgattaattttttgcatctgctcctaattaggttttcgatctaaagggttatacgcttggactacaagctagaacctgtaataaatggtctccttgtcctgtcttagtcttcctttatggtactcggggccttaatcgtcacaatttgcttcaggtcagaacatatatatgattcatgttccattgacaataatgaatctcacatattttgacattcagttttcgtttcttcagggcacgcagtttcagctcaatcgcgtaaagaagtacgttttctcaacgggtagcgctgcctcttactacataactttgtatgcaatggaaccacctgctgactcctcctag

SEQ ID NO: 179887 - DNA, 985 bp, Arabidopsis thaliana landsberg
tgtttacgaagggagaaagttgttcgtgtttttaaactcaacactggacaagatgatcatgccatcatctttttggatgactatcttaaccaggttggtatttgctccatttcaagagtctttcgtcttgttcatgtgttagctttagtattttggaacgttctcatgaatagacttggtttcttattattggtattctaaaggtggtctttccaatttttagctaatcaatatatgtggacaatatcttattataatccgtatgttaggtagatcgaatagtgaagaggatggaacagaagaaacagagtgatcttgaaattttcaagttgttcaaaatgcatgtccttgattcaaaacttgaacctagtatcgggcatcatgagctagtaagttttttttaatcattatgctctttacttatcactttctatcaacatgagtttctaactaacacaagctgtcgatactgaactgcagctttcgctgttgtcattgggaggaaaggtgaaagatgcacacatcactctcttaataaacgcaggccttctcgtaagtaaagagttatacttctacttatctgttactccatgtaaatcgttccctcttataactagaaatagttttatctcagacacgccaacttatcgatccagacatgtactggtttgcaattccgagtatcggtaaattgtggaagggtctatcgcaggtacctctatttaattttttatcaatttcttcccaagtgattgcctcaagcaccttttcttactcttaatctaaaaattagggaaggaacgaactcctctcattgataaagcgcaagcgacataaagagatgttcttggctgagcttgaaaagaaacggctccggttctctcctctggatgtgagatttcacgtacgtgatctcattggctccggtcacctgaaaactgttcagacaacttctggactgatcgttcggattttaaaggactaa

SEQ ID NO: 179888 - DNA, 153 bp, Arabidopsis thaliana landsberg
atgggggtggtggatattccggcaccatgggtatatccttataattatgtccctccaaactacatgatgtattacaatcactttccggcagcaccggcaccaggagaaactagcggctacgccaaccaatttgtaccctttaccacttatcag

SEQ ID NO: 179889 - DNA, 1215 bp, Arabidopsis thaliana landsberg
ctttctcagcgtacactttcgggatccctgttgaaatacctttccaaactacaggtttgtatcccttacagcaatggctggacctttttctttcccatagttaatgtttctagtaaaatgttaccggcttccctacctctatttatggtaatcctttggttcatttttagctggagttaagaggtcatatatgtggctgctctatttgtcataatctagttgtatctgatataaaatgttacctctattgttaccggcttccctacctctatttatggtaatcctttggttcatttttagctggagttaagaggtcatatatgtggctgctgcacttctttcacagtattgtggtttaaaatttatattattctctcaggtggatgaagagcctgcaatcagaaccaatactactatactactcgggaatatcgccacctacctaaatgaaggggttagtctctagcagctttgtttttttcttttcttttgattccttgttacctttgtggatatattcttttgtttgtccctaatcaataatcatgattatatgatgcagacaaggaaaagagttttgattaatgcttttacagtgcgtgcattgcgtgatacatttccacctgctcgaggtgcaggtatgtgaatataacaggatcatagatattacatattgtgtgggatgtttaggttctatgaacatcatttcgatattcctgttgttatcctctttccaggtgtcatcttatatctcactggattttactcttcgcagggattgttgcattatgtgccaccagtactacttatgatgacactgaaatagctactaggattcttccaaatatcgttgtgctaaccattgatcaagacaggttccttatttaagtgcatttcgatccctttttcgtccagtattttcgcttccgacaaaatctaaagcattttctcttatttttcttatagtgatgttcggtcaaaggcatttcaggccgtagaacagtttcttcagatattgaaacaaaactatgagaaggtaggagtgatgactctgccgaactctagtatttccttgagctacttttatcctttaagtcttatgtcaaagggtatggaagataactaaattattttggggtgttaatagacaaatgctggagaaataggagccagcggaggagcctcagctatacctgaaactgctggtctgatcgg

SEQ ID NO: 179890 - DNA, 273 bp, Arabidopsis thaliana landsberg
atgaaccgtgatcagcgcctgcgtaaggtccgggacctacgccattaatctaactttcgacatgtagaaccaaaagtggatcaggactctcccgagaatgaaccgtatcgtagatctaaacccttaactcgcaagcctcagcatcacattctcttcacaacttcatccagatgtcgtgggaaacgcgtcatgtcatgccccgaggagcacccaatgaagtccggcagtatccatgtcacactgttgtccttgagtcagcaagcacatagctaa

SEQ ID NO: 179891 - DNA, 77 bp, Arabidopsis thaliana landsberg
cctcacatgataaagacatgaaaccaaccgtcagagtcggcggctatgacaaaaacaaagctaaactatgcaagtag

SEQ ID NO: 179892 - DNA, 136 bp, Arabidopsis thaliana landsberg
cctttttgggtggagtcgtcgaagaagtgtctgccccgtttgttatactagctcctcaactatcatcgttggacgagccgtggactgcagcgactcgggaatggacgatggtgatagtgttgtcgagtgcgcctga

SEQ ID NO: 179893 - DNA, 75 bp, Arabidopsis thaliana landsberg
atgaccactatgatattcataaagccgataccgaccaccataagtgaaatggtcgatatccaaaacaacagcatg

SEQ ID NO: 179894 - DNA, 340 bp, Arabidopsis thaliana landsberg
atgtctctaagttgtgggagtcctgaggtggctacacgggaaacgcgcaaggcccctgatatccgatatcccacgcgattatatcttcgaccggtcaatgagcatcggtagagcgttccattgtgtgcactgctgtcatgtttcgaaactctgcgcactttgacacttcggcggatgagcctcagagtgctctgcgtaggacctctagcgataatgatcgtatatgtgcgactatcggacactaggtgttgctactttataatcctcgtcccatctaggagccggattcctccgaagctctcgtcgggattctcggagctcgcccgcgaatgtgtagagg

SEQ ID NO: 179895 - DNA, 247 bp, Arabidopsis thaliana landsberg
atggaccatagtggtttggagagcttggtaatggaaacatctgagaagcttcaaaaacagacatcagttgcgaaaggttgatcttaatttttctctcctctcttcatatttgaaaataaacctaatgcaatcctgtctctctgttcattatcaggtgttgaaaatttgagtgaagcaagagaagtggaagtgttgtctatgaatggaactcaaactgttgtgagcaaattgaattcgacagtgtctg

SEQ ID NO: 179896 - DNA, 545 bp, Arabidopsis thaliana landsberg
atgaaggttagtagcactaaacttgccaccctccatgagagaacctgaagaagatggtttggtttactcgagaacatcattgtgtatgttccttaccattttcagtgtgttcttttaatggtaggatgatataaaagactatttgacatcaagcggggttgaatgggaagaaagttcagatttaatggaagtagcatccaagtgtgatgtagtttatcaaacacgaatccaaagagagaggtttggagaaaggctggacctttacgaagcagctcgtgggaagtttatcgtagacaaagatctgttaggagtgatgcagaaaaaagctattatcatgcatcctttaccgagattggatgaagtaagttaagaaaacctctatttttcatatatgtaccgtgacacaatcctcactctttgtatttcttattgtgtagatcaccgcagatgttgatgctgatccaagagctgcctacttcagacaagcaaagaacggtttgttcattagaatggctcttctaaagctactgcttgtcggttggtga

SEQ ID NO: 179897 - DNA, 63 bp, Arabidopsis thaliana landsberg
gaagagagaggctcgaagaagaagaagaagaagaagaagaagaagaagaagaagcacaattga

SEQ ID NO: 179898 - DNA, 45 bp, Arabidopsis thaliana landsberg
aaaataattgtgttgattggtgtgacacctcgtacacaagtatga

SEQ ID NO: 179899 - DNA, 434 bp, Arabidopsis thaliana landsberg
gcggctcggaccatacgccctggctcgaagccaaactgccgggattgctgatgtggcacttcaccgatgttttctaccacacggatagcgacaggctggagaatgtatcgccatgggaaatgaagaatgtgggcgtatcaggccttgtagccgccatgacgctcacatccatgaacgaggcaaccgcattataccttgtgaacgaactgagagaaaccgctttcaaacggctggatacggaagcggcgctgagccgcgccgaaatagcaaaaggcggtaaccccgaaacagaatcccatatccttgaagtatggggcaattactaccgcgatgcactcggcaaaatggacaacctgcaaaccggcggtaacactcaaaaagtgaccgcggcgattgcggcagcacaaacagcggtagatgaaaggaccggccag

SEQ ID NO: 179900 - DNA, 261 bp, Arabidopsis thaliana landsberg
ctgcccgttgagctgttcaaacgcgccctgcacgcgctgcgcagcaccgaacgacgccgcggtatagctggtgcccgatacctgggtcacattcacctgctgcacgtcgagccacgcgctgttcgcgtcgtaattgagggtggcggtgagcaacacgttgctcggcgtgttcaacacgctgaaggtgccggtgaggccgccattcgcgtcgagcacgtcagtgtgcgaattgacggtgtaatcgctggtggtgtcgtacac

SEQ ID NO: 179901 - DNA, 162 bp, Arabidopsis thaliana landsberg
atgacaggacagactgcacctgaaaaggttgaagctcctgctcccgaagcttcgaacaaaaacactgactacattattcgtcatgcttcgggaaaagaactatccccagaagaaatgctagaagcacgacactacgcccagaaattgaaatattcgaagggg

SEQ ID NO: 179902 - DNA, 126 bp, Arabidopsis thaliana landsberg
ttaattgcttctattcctaaacgatattcagaaagaaaaataatttcaaccgatgaaccttccaaaatctgtaccgagaagataaaattaaattcaactaaagccgtaaaaatactaagattgtag

SEQ ID NO: 179903 - DNA, 838 bp, Arabidopsis thaliana landsberg
atgatcgagtttgattcctctgagagctgtgaatatgtactccaatgtatcttagatgaggtactaatctttcatttccttttcaatgtggtttcttgatcttacttagattgcttgattcttcgttttctagataccgttatcggaactgaaaccgggtgcaccgggtttaacgaagtggaatcttcaaccttttatcaaacacaagcttctttctctaccaaaatgtgctttggaactggtattatataatttttgctttgaagttccttttagtttgagagcactataaggcttatgtttgttttgttttgatcagatgattgaaccatcatcatgtgagaatgatactcaagtgtctccttgtagtgaggaagagactctgagaagtgatggcaaagagaatgaccgagttactcctccaatggatgagccagatcttacgggaagaacagaagagggagagtcattttctcgtggggctgatgagttgctcgatagaagaaatgccggatttcgatatgaaagcgaaaatgatggtagtcatttgtcaagtcctgtagagaaaatatacagatgtgttaactgcaaagaaagtgggaagctgttgttttgctctagtgatggctgtgaagtcatggttcatcagaagtgtttggattcaccaccttcttaccatgatgctggagacttttactgctctctctgcgctttaacctgtccttcagctgaatatgttcaatttcaagatgaagtggctaaagcaaagaggaaattagtttcgtttcttagactaatgtcagaggttaacaagaagaaatctattgaaggaacctga

SEQ ID NO: 179904 - DNA, 767 bp, Arabidopsis thaliana landsberg
atggtggcaaggtatacacaactgttttcagtttcgaatcatgcaaagttttgatctttcttacaaaactatggaccattcttgtcacagtgatgtatatgaaggaaacagggaggcgaaagtggaagatcttgctggaattagacaaataatcaaacccctggaagaatctggggctttagttcgtagaactgatgaggaggttcgccttttagccatatccctagcttagattctacttctttttgtttaggtgttagcatcaaaggataattggattttgttgttcagcttctgcgagctttggattcgtttgtggttgtggaaagggaaggacagattatcgcttgcgcggctttgttccctttctttgaagaaaaatgtggagaagttgcagctatcgcagttgcatcagattgccgtggacaaggccagggagataaattgctcggtataatcacaaaacttttgagcattgtgtttcgaatctactggtaagaaaaaccccggtttcttgactgtgaaattttgcagattacattgagaagaaagcgtcagctcttgaacttgagatgctatttctgctgacaacgagaaccgcggactggtttgtgagacgcgggtttcaggaatgtccaatcgagatgataccagaggcaagacgggaaagaatcaatctttctaggagatcaaagtattacatgaagaagctgttgccagacaggagtggaatttctgttgttcgaacatttcagtatgattcttga

SEQ ID NO: 179905 - DNA, 108 bp, Arabidopsis thaliana landsberg
attttacgtacatctccactatactcacaattcacaaggacctcgaccattagctcttccaatttgttacgcgttgttcatatgcaagattcaaacaatacgaaataa

SEQ ID NO: 179906 - DNA, 458 bp, Arabidopsis thaliana landsberg
agcaagtggaaagaggagctggatcaagcggaaggactgaggaaacacaagtaaacaatccaagacacaataaggaagattctggttctgaggaatccgacttttggatgcctaagtcaagttctgattcagagttagatgaagagactgatgaagaaaactgtaaaggttgctctcttttgttttttggttctactgtcatctcatatcgaaactttaattagatttgcatctgatttgggtacaggttctcattgtgatgacaaagaatctgaagagctctcagaaaggtacattactatatttgctcttctctttttttacaatcatccttttgattgtgtctcataataactcaatttggtctcttctacagaacaaagagaatgtcactagagattggaccaagtagctttgcttctaggaagaaaaagagtaagaatgatgagttgtcttaa

SEQ ID NO: 179907 - DNA, 683 bp, Arabidopsis thaliana landsberg
gagcttgcgattttgctgttactcctaaggaggtgatcatcaagtccgagaagaaaacctccattaacgaggataagaaaaggtataattcctctacgatatttagggttctttgctgattcagtgctgatattactctctttaagtactggcgtagttatagcttctttaaaggctatatgattgtgatttgtgaatgatgttttgctggagacatctttgataaactagttgaattagtggaatactttgatgttggatctttgttggtgagcttttggcttgtttctctaatgtgtaggaatcgtaggaaaggtggaaattcttctgatgttcctctttgcaacgaggggaaaaaatcacctgaaatggttaggatgaagcactctgatatatcatatcaccagacggtccctcgtaatgagaatggggctactcatcttactcaggtccctgctactatgcctggtcctattccgactcaagtggttgataatacgagtttgttgcacaagattgaaagtaaatcaactcctattccagcagttgagaagaagctgccatgtaacgagggtcgtgaggaagtcaaggcttctagaaagcagggatctaaaactgaggttgattttgagaacatttttgctcgagatggatgcagtacgcgtgatgactccacgtggtag

SEQ ID NO: 179908 - DNA, 309 bp, Arabidopsis thaliana landsberg
atgatttcggcatcatacggttgtgaaatcacagttgtcccatcgacatggccagctgcagaggcgcttaaaatgaaaccagacgggattctattcagcaacggtccaggagatccttctgcagtgccttatgcagttgagacggttaaagagcttctaggaaaagttcctgtctatggaatctgtatgggtcatcagttacttggacaagctcttggaggtaaaacctttaagatgaaatttggtcatcatggaggaaaccatccagttcgtaacaacagaaccggccatgtcgagatcagtgctcag

SEQ ID NO: 179909 - DNA, 507 bp, Arabidopsis thaliana landsberg
atgaatgaacagccgcatgataagacgacgatgcaagctgtgctaaagccggtacagcgccacctgcgaccaagtccgcataaaaattaacaccaaacaaagacatataactttaagctaataaagacgagtaaaacaacaactacgttcacaagctgaaagttgtctagatgagtattgaaaaggaggaggatggaataaacctgcaagtccagcacaggctgatgaaacaactatcacaggtggagcctgcaaaccatacatcaaatacaatcatcacgcaagctcttttactaccatttaagtatgtaatgagaaaagatgtaacagacaattctatattcttaggtgataacttacaccaacaagaaaatgcaaccacatgggtcctttgatccacttgcgtacaatcggcattactgcatcaaaatcaagaaccacactatcaacaacacaacaacccaaagagagattctgaatgtttttcaagcaagttccaaactttaa

SEQ ID NO: 179910 - DNA, 1977 bp, Arabidopsis thaliana landsberg
ctacgagctttgggatgtggtgagatgcttgttttatctcgaacaatccgccggttgttgattttaaacaaactctctatcacaaatctttcccgatcatggattttattgagatctcgttgatctttcgagagcatttgccactactggaactatgttcggtcatcatcaacctcctactctttcttgtctttctattggctgtctccgcgaggcagattctcgtctgcgtgagaagaggcagagataggctctctaaggacgatacggtttcagcttctaatcttagcttggaaagagaggttaaccatgttagtgttgggtttgggtttaatctgtctttgctctgttgcttatatgtgttaggcgtccaagttttggtgttagtatatgatggggttaaggttagaagagaagtcagtgactggtttgttctttgctttccagcttctcagagtttagcttggtttgtccttagcttcttagttcttcatttgaaatacaagtcttcagagaagctacccttcttggtgaggatatggtggttcctggcgttttcgatttgcctctgtactatgtatgtcgatggaagaaggctagccattgaaggttggagcagatgttcttctcatgttgtcgccaatttagctgttacacctgctcttgggtttctctgctttctggcctggagaggcgtttctggtattcaagttaccagaagctcctctgatcttcaagagcctttgcttgttgaagaagaggcagcttgtcttaaagttactccatatagtactgctgggctagttagccttattacgctttcatggttggatccacttctctcggctggttcaaaaagaccgcttgagcttaaggatataccgcttcttgcaccaagagatagagccaaatcaagttacaaggtcttgaagtcgaattggaagagatgcaagtccgagaatccttcaaagcctccttctttagctcgtgcaattatgaaatcattttggaaagaagctgcttgcaatgccgtatttgctgggttgaatactcttgtgtcctatgtcggtccttacttgatcagctactttgttgattatcttggagggaaggagattttccctcatgaaggatacgtactcgctgggatattctttacgtccaagcttatagagacagtcaccacccgccagtggtatatgggtgttgatatcctagggatgcatgttagatcagctcttacagcaatggtataccgaaaaggtctcaaactttcaagtatagccaagcagaaccacacgagcggtgaaattgtaaactacatggcagtcgatgtccagcgcataggagattactcatggtatcttcatgatatttggatgcttccgatgcaaatagttcttgctcttgcaatcctatataaaagcgtgggcatagctgctgtagctacattggttgctacaataatctcgattcttgtcacgattccactcgctaaggtccaggaagactatcaagataagttgatgactgcgaaagatgaaagaatgaggaaaacctcagagtgtcttaggaacatgagagttctgaaattgcaggcatgggaagatcgttatagagtgagattggaagaaatgagggaagaggagtatggttggcttcgcaaagccttatattctcaggcttttgttacttttatcttttggagttcccccatttttgtcgccgcagttacattcgctacttcgatatttctaggcactcaacttaccgctggaggtgttctttctgctctggcgacattcagaattcttcaggagccacttcggaactttcctgatctggtttcaatgatggctcagacaaaggtttctcttgataggatttctgggttcttgcaggaggaagaacttcaagaagatgcaactgttgttattccacggggactttcgaatatagccatagagattaaagatg

SEQ ID NO: 179911 - DNA, 93 bp, Arabidopsis thaliana landsberg
gtgcagccctcccgcgtgttctccatcgtgtggctgcgatctcaattggagtttggagggaggaagaagaaaggaggaagggaagaacccaag

SEQ ID NO: 179912 - DNA, 2793 bp, Arabidopsis thaliana landsberg
atgaggttattgtgtctaagtggtattcaaggtttacccgataccatcatgtttagagtaagcttctgtctccctttttgtgttgtgattgtgatagtaagtcttgatcctgagtggtcacttacatgatggcacaagactcggagcgtatgccgagtaatgcatgacgatgcattaaagtgatgttctggttataagcctttgtggctatagctcgggtgttcacaattgtgtacgtacgtgtggtgtgggtgtgcacgtacgtgtgtgtggtagcatacgtgtggagaacacatatacacgtatgcaggagtttgtgttgatgttgtggtgcacctttttggtaaggttggtagtatgctgggcccaaggttcattcatgtgtctagtttggctgcatattctggtattattataagtatatgataatacgtttattacgtactctgtgatctctgatggataactttacctattaagttgattaaaccctagagatttatttgtgcatagacccagctcactgagtaatcttagattactcatgagtctacttgtcttacaggtaaccatagtaggatgaccatagcggggagacgagcactaggaaatgccggaaataggatgctttacgttgcttttgcaaaattacttattattatgtaaattttaacaaggatccgatataaagatatatttttgggtaactctttgccaagtataagctatatactatgcataaaatgttttcttaaaggcagccgagtgtttaatgatataagacctagtccgggtcgctcaacactataatatcacgagggttggcaagcctaagtggtgttcctagtgggtggaaggtcgattataatttggttaaagaaccggattcatctggaacctctactaagttgtgatcgatcaacttcactgtagcgtaactgtgtcacccgtggcttgtctagccatagggcaattcgggggcgttacaatttttgttatcagagcatggttatgcgatgctcgtggacacttgggttttcgatgattttatcgagtaaatttaagtcgcagaatgcaacattagattccggttgttcgtcttttagatggctaagtgggggataggtttacctcgttttgcagatgttgtctagcaaaggaagcaacacagtcagttcgttgcacggtcttaatgtgcccaaccccgaaaactttgctccgccgagcagtacggacgatgacagtttgtctgtggccatgaatgatcaaattatggccgaagatagtaaatctactaagtccgatatgtcaattgaatctgatccgtctgaatgttcggagaatgatgatgatcatgatgacccgttatctagtgaagaagcgaaccatgttgagtggatgatcaccgatgatggcaatttatttcgggctatcaataaaccaattttcaccgattttaactatgttttaggtatatgttttatagtctatttgttatttctagagtctttttagtctcttttcaagtattctatgcaatgggacaacaatggagataaggagacattttggagcaaaagctaaggaaaaggaagctaaggacaattttgattgaggaatcagcgaggagtgtcgactgacacactcttggtgtcgatcgacaccagtttcggtccagcaaaaaccctagccgctttcgagtttacagaagctcaagtttgccccaaaagactttcctatttgcattattagtccctggacgtttttagggtctatatatattgtttttagacctaagtttcttttatcaagtcttttatcaagttctttgcaaaccctattgtaagagacataagctattcatccattgttattcagagtttcattcagatctatatacaatgaagagatcccttctaactcttttctttattcattgtgtttatgctttcacacttaatcatgttgtttgcttcaatcaatatgtctgagtagttttcttgttaggaatagggtttctcattagggattcatatggtttagtagattgtcccccttgttaggttatctgtagaattcttcatctttgattatgcataatgctagatctggagtaattaactagatcttgaatccagacaatagatatgcccgccataggtatctgtagttggatctattatttgatgagtctggtttataggtgtgtaataagaatcggcctatctactaaaatgaacaattgaactcgttaagaatgcatatttacgttgatagtttctcggcttctctggttattataagctatagatatagggagttttgcagcacgcccaccggttattccataattagagtttgagtttaagaatggttcgataacaacctagctttcattagatctactaactaatagttaccctgagaatacccttttcctggctctttattaaatcgtttacaacacaatcaatctgctgtctttttactttgttctcttttatattcactatcaccctgctagtttaatctcgacatttaactcgttatttgaacaaaagaactctgtgaattcgatcctaaaatacttcaattgatctcttatttgagagagtagttctaggtaatttgaaccatatccctctatccctcctctttttattgaccttaggcaacatgatggtactgatgtcccgtgtcagcagtttagcttcattagagctaattccattgtcaacaaggcgcttgacatactttttgagtggagcagaggatgtctcagtgtatccttag

SEQ ID NO: 179913 - DNA, 322 bp, Arabidopsis thaliana landsberg
atgaaaacatatccaacacataattccgaggttttccaaagcagacgcttcattacgtttgacttacgtacactaactggtgataaccagcgaagcggtgtggatcctgcttgcataccaaaatcaaaatgtgatgatagagtgatggaaataggtaatactccagattatcacagtagtaagttcattgatttgttggcacatctttaaacttgtaagctttttataattactttattttgtaggtatatggaggagaccgcgtactctttacagacctaaaaagttcgaccacgagattcatgacgaagaagaattatga

SEQ ID NO: 179914 - DNA, 1048 bp, Arabidopsis thaliana landsberg
atggagactaagctcaaaaatctgaggctgttaagttggaaatccaacaaagcacgttttgaggcacggagtcttgttgtggctagggaggagcttatgtctaaagtgcatcagttgactcaggaacttcaaaaatctcgttctgatgtgcagcaaatacctgctctgatgtctgaacttgagaatctaagacaggagtaccagcagtgcaggtaatggttgtagaatggaagtttctgatatcactggctcccgacactcttcttatagttattgagtttgtcagcttttgtatcatcctcttatgaaggttgggatgaatttgattttatctgattctggcagggcaacatatgactatgagaagaagttttataatgaccatctcgagtcacttcaggcaatggagaagaactacatgactatggctagggaagttgaaaaacttcaagcacagttgatgaacaatgcaaattcagatagaagagcaggtatattgaattatttagttagtttctgctctatttagcttcattgttccacgaacttttttcagtaatttaagagttgtatctgtcaatcaaatgaaggtggcccttatggtaacaacataaatgctgaaattgacgcttctggacatcagagtggaaacggttattatgaagatgcttttggtcctcaggttcgtgagtttctctttgctagctcgtctttttgagacccattatagttttccacatttagtgatttaaatgtgcttgagctatattacgttttgttacttttgcagggatatattcctcaaccagtagctggtaacgcaactggaccaaattcagttgttggcgcagctcaatacccttatcaaggagtaactcagccaggatacttccctcaaagacccggttacaactttccaagaggccctcctggttcatatgacccaacaacaaggttaccaacaggaccttacggcgctccattcccacctggaccatctaacaatactccttacgccggtacacacggaaaccctagtcgcagatga

SEQ ID NO: 179915 - DNA, 530 bp, Arabidopsis thaliana landsberg
gtttgggtatgctcatggttccagacggtcctcagcctacgactgaacaagttgaagaaactatggagaaatattgtgaacaaggtgacaagaaaattgaggaaatcaacaaccgcttgaggacgggtcagagaaaaccaatatccactagtgagaatattgagaaaggtaaaagcagttcaagaaatttgatttgttcatcgtgaaactctctttagtggaatggaaattcgttttcttcatctttaatggaatgtaactttgtaggagagcactgggatcatgacactagttgctcggatgatgaggatgttggtgatactgaaagctatcatgttccaagtgcaatgagggtaagtctttttcaaatatacaacttgctaaaatgatatcttacgaaagttaaaagcatgctatatatgtgaatataggattttctagatatagatagcgaggcattccttagcaattcaggtagagacatgaagaacattcttaacaaggtcaaggaatctgagaagaaagtccag

SEQ ID NO: 179916 - DNA, 436 bp, Arabidopsis thaliana landsberg
atacgctgcaccggttttggaagaaagaacatgattggggatggaaaaagtttatggagttaccgaagttacgggatggcttcatagatgattctggctgtcttacaattgaaactaaagttcaggtgatcaggtaatgcaagaccgactctatgagcaaaatattaccacatgcacggtccatttttccatgctaccatatacttacaagttacatctccacatgttcatatgttatattttttcatttcctcggccatataattggtccttgcagagagagggtagaccgaccttttcgctgccttgattgcggttataggagagaacttgttagggtgtatttccaaaatgtggagcaaatttgccgacgttttgttgaagagaaaagaagcaagctagggaggttgatagaggacaaggcaagatggacaag

SEQ ID NO: 179917 - DNA, 420 bp, Arabidopsis thaliana landsberg
tggcgctttttcgtcatctccctggtcctgctccccctgttcatcgtccccgccaagcgggtgggccgccggctccaggagctgacccgcgagcagatggacctcaacgcgtcgatgaacacgacgatcagcgagcggctgtacgtgtccggggccctgctcgtgaagctgttcggccgccacgactccgagacccgcgacttctccgcccgggccgacggggtgcgctccgtcggcgtccgctccgcggtctacggccggacgtttatggcggccctcgggctcattggcgcgctggccaccgcggccgtgtactggatcgggggccagctggccgtgtcggggtcgctgacggtcggcacgctggtcgtcctcgcacctccgtcggccgatttacgggcccctgacctcgctgccaac

SEQ ID NO: 179918 - DNA, 376 bp, Arabidopsis thaliana landsberg
caaaacgaacatcttcggtatcaactagccatgttctttcgcgatgagcttctgtcatggtttggaagaagacctctcggagtgcctattcctcctgttgcaggaattgctactttgagttcacccgagctgaagcacaaagttaactctaacgtggacgatgtcattggacgaatcagaggaatagcaccacagtatttctctgaagaggtagaatcattttttacatctccacgagtttttgatgcttactaacattctcataaaactcggagacggtcctgtccattctctgaactaataaatctgatattttcgtgttattcatttcaggatgcagaactcggtggagccgccacagtctgtacaaagaggt

SEQ ID NO: 179919 - DNA, 146 bp, Arabidopsis thaliana landsberg
gaaaagggggaaaatccgcccattttattaaaaagaaaatacgaaattacattcggatagttcttgaaaacgcatgcccatttacatcctccaaaacaaaagaagcaatagaatccggaactgaattaaaaacatacaaaccatga

SEQ ID NO: 179920 - DNA, 333 bp, Arabidopsis thaliana landsberg
atggattcggtgatggccgatatcgattatgcgatcgccaacctcgacgccagccgccaggtaacaaccgtcaccaaatacacggcattggcattgaaatcacgtatcggattgtatgaaggtactttccgtaaataccacccggagtttaacctgcctgatgccgacaaattcctcgacgcctgtatttccgcttcggaagacctgatgaaaaacagcggctattccatctacaaagctacaccggcaaccgcctatatgaagctgttctcttccgacaatgcgatccccgacgaagtgatcctcgcccgcgatttcagcgacgagttgcag

SEQ ID NO: 179921 - DNA, 675 bp, Arabidopsis thaliana landsberg
atgcggtggaaagaaggttgtatgaatgatgaacagaatagagtaactcacgcgactgagcaaaagccatgctgttgcttagcttatgataccgatcttactaaatccttgaaggatcgaggaaaaaatactgctcaaatttctcgtggtcgatgcagttccattcctgagagatcctctcatgttgctgcagaatgtagtgctggaagtttcagtgaagaaatagacgacaaacctagcacaagtaatcagtctgaccctgactttggttatcgtccagtaagatttatgcggactgcacttcaagagagtagaatctcatctgctatactaagcgaagaagaactattggatgctctattgctattataccatattgctgttgctccaaattttaagcaggtaattttaattattcccgtcttaattagattttgttgtattttttgtacgatacataccacaacctgaataagcttgagaggctgataggttctctttctgcttttcttaggcatcatattacatgtctcaccaatcgcaatcaatatcacttcttgaagaaactgataaacagataagagaacgggcttcttgtgaccaaataaagcgcttgaaggaagctcgcaacaactacaaagaagacgtgatggactgtgttagacattccgcatg

SEQ ID NO: 179922 - DNA, 177 bp, Arabidopsis thaliana landsberg
gccaacgatacggtagcaaacgagttggagtatcgactcaaacttcttgtgataaggaatggatttgattttgatgtaccaatatcaaatacgactacaatggtttacgattgctgggttgatggatgtcgctggagagttcgtgcatctacacaaggggatgagccttatttttag

SEQ ID NO: 179923 - DNA, 424 bp, Arabidopsis thaliana landsberg
  unsure (1)..(424): unsure at all n locations
atggtcacaccaatctgtttcttagctcgagaaaccgactgcgtggtaatggctttgtaagtgcatatgcaagctgatctttcgtgttgacatgagagacgcggagaagaccgttttgaactnnnnnnnnnnnnnnnnnnnagtcgatggcaatatgtttcattcgagattgaaacacaagattagcacaaagaaacgtaaatctgacattgtcgcaatagatgactggtgacactggtagtatgattccaaattaagtgagtaggctacaaatccaacgaatttctgatgatgtgtttgcaaccgctctgtattcggcttctatggatgatcttgcaacaccattttgtttgtttgcagaccaagagataggacttttaccaaagtagacgatatatgcattagtggagacgtaattatgtga

SEQ ID NO: 179924 - DNA, 110 bp, Arabidopsis thaliana landsberg
atgagtggggctgctgacatcatcaaggatatcagcctcggtcaactgaatgtgggaatcgcggttattccccatcccgcggacccatatgtcggcatcgttgatagatc

SEQ ID NO: 179925 - DNA, 1179 bp, Arabidopsis thaliana landsberg
gacggaacaaatccggttgttattaggtcttccggtgacggagagagaaagaaagtgaaacctagtgaagaggtttcagtatgtaatgatgatcttattgaattgatccctggtcaccatttcttcaagctagttttgctcaatggaagagctgctaagaaagctcgaaaggtaacttatttggcttaaccaaagaatgttgctttttttgttgtttctttgaggctttgtttgatgtgatggaactgttttaggctgaagacgatgtagaggccattcgtcgtttttgtccacctaatgagaaactaccttcaacatttcggcttttgagtgttgatgcattgcctgattgggctaatacttcttgtgtttccattaatgatgtcattgaggttagtctcatgctaagcatattatttcatttgttttgttcagatatcattgctaaagattgtatttgtaaatgacagggagacgttgttgctgcgatcttatcgaattatatggttgatatagactggttgatgtcaggtgagttttctcataatcttctgtgttgagtttgtccaaatgattagttcttttgtttacattcatgggggtgttgtttttcgattttctcgagtctgttagctgaagttggtaatttgcatatatccttttgtagcttgcccaaaactggccaacattccccaggttatggttattcatggagaaggtgatggtaggcaagagtatattcaggtttgttatgacagtttttgctcatttcttttgattgatgtttatggtagactaaaaatctccaatatttgttttgtttaacagaggaagaagccagctaattggattcttcataagcctcggttacctatttcattcgggacacaccattcgaaggctatatttcttgtctatcctcgaggggtgagagttgtagtacacaccgcgaatctgatccatgttgattggaataacaaaagccaaggtttgtggatgcaagattttccttggaaagatgatgacaaagatccacctaaaggttgtggattcgaaggtgatctcattgattacctcaatgttcttaagtggcctgagtttactgcaaacttacctggccgtggtaatgtcaagatcaatgcagccttcttcaaaaagtttgattattctgatgctacg

SEQ ID NO: 179926 - DNA, 139 bp, Arabidopsis thaliana landsberg
ctttcacttgaatcttcgaaccagtagaatcggaaacataggagtaacaagagtcaacgctagtcaaaggaatcactctaagaaactcactaagaatctccgtaatccacgccgtaccaagcttcctcctgatttggtg

SEQ ID NO: 179927 - DNA, 552 bp, Arabidopsis thaliana landsberg
  unsure (1)..(552): unsure at all n locations
atggactcaagagccttacccttctccggtctcgtcatcctcaatgctacggccgttttggccaacggttacaattcttcttcttcttcttcaaccaccggataccctgtcgtgaaacccgtggaagcggcagtggaaggaatggtgtactgtcaatcctgcgacaaattcggatcatggtcattggctggagcnnnnnnnnnnnnnnnnnnnaaaatcagcattatctgcaagaatcataggcaacaagtgagtttctacaaagtctttcgaactgattcctacggccatttctatggtgagctcaaaggtttcaagatgactccacatttcttggaccatcctcttcattcttgccgagccaagctcgtctcttctcctcgtgaagactgcaatctcttctccaacattaacaatgctctagatggagctccactccgatatgaagagaagaggctcaagtggactaactatgaggccgtgatttacgccgctggtccattggctttccgtcctgaccactgccctgcgactgcaccacccacttactga

SEQ ID NO: 179928 - DNA, 367 bp, Arabidopsis thaliana landsberg
atgagttcagctcaggcgaaacgtttcatcgagtctgtgaaaatgtctggcaaagacttcgacaaaacaaaactcgaagaaatgggagcactacctaaaggtcttgatgatctttatcgtaactttgatcgtccactctctaaaatggccgttctaccttacctggtcttgccactaagtattggtcacgaagcttctcagcttcagcactttgcgcagtcctcggtgaccgagacctctgccggtcctggtatcaagatgtgctcaacgatgaaaagcgttacgccactcgctgacgttcagacacgcatcgatgcaattcacacaaaaatggatgaactgaatctaggacttcgttcggcacaag

SEQ ID NO: 179929 - DNA, 789 bp, Arabidopsis thaliana landsberg
gacttgggcgctacaagctcatcgggggtcgatacttcaacgatatgcgttttcttcctcttgatggaaacaacaccgctagtactctgcaactcctctctactgctggtctgctcctaactgtcacagagatcgactcttatgtgcaagaggttgtcatggagttttatgcaaaccttcccgatggtgaagaaggtgatcaactggcctacttcccggttgttatctcctgagatcgctctgctcaacaagatctgttgtcacaattggatgcccacagtgaaccgatctgttctgaaaccagagagggtcactctgctttacatgatggccaaagctctagctttcaactttggcaaacacatctttgatgagatctaggcgtgttcgaatgcagttgcgaacccctcctccactctccatctgctgcctccgaacctgattgatcaaatgctgcgctttcagcgcattgtccgctctgatgaaggagataccatgtcgtttgcaccgttgaagtttaccatggaagtgaaacctatacttgtgctgcagacagacagccccaccttggatgcaggtcttgagaacctcattgtgtctctcacaacgatgcggttatgtcttgcaggtaaacctttttcactccacttacactctgttatctgttgagaatggttttttatgtgagtgtgcactcaagcaggggcagagtattctgatgtttcgtactctgttcccgatgatgtgggagatgagaatgtggaggaagaagacgatgtggtgaattaa

SEQ ID NO: 179930 - DNA, 57 bp, Arabidopsis thaliana landsberg
atggcgcgccagccgatcattggtcgcgaccggaaagcgggacgaagagcgaggcag

SEQ ID NO: 179931 - DNA, 894 bp, Arabidopsis thaliana landsberg
gttaaatgctacatgaggcagctcttaagagggcttgatcattgtcacactaatcatgtactccatcgggatatgaaaagctcgaaccttctgatcaacggtgatggagtcctcaagattgcagattttgggttagctacgttcttcgatcctcataacagtgttcccttgacaacccatgttgcaactctatggtatcgacctcctgagcttttgcttggggcttctcattacggtgttggagttgacttgtggagcacaggctgcgtaataggtgaattatatgccggaaagcctattcttccaggaaaaaatgaggtaagcaattagattcctatcactcttgttcttaccagataagcaaagcttcagatttttgttctctgtattctcatgttaagacagaccaactgcacaagatattcaagttgtgtggatcgccttcagatgattattggacaaaactaaagctacagctttcaactccactgagacccatctatccatatggatcacatatagcagagacatttaaacagtttccagcttcagttatttcgctcttagaaactttgctctcaatagatccagatttccgaggcactgcagctagtgctctcaagagtaaagtaagtttggactttacgtattcctctgacaaaaatattgttcttgtgacttcaactgattatactcttcactgtgaaacagtacttcaaaactgagccattggcttgtgatccatcttgtctaccaaaatacccttcaagtaaggaaatcaacatcaagatgcgcgataacactagaaaacaagcttcacaaataagaagaacagacgaagctcaagctgttcagccaattctagcagattcgtctcccacaaagccgatgcag

SEQ ID NO: 179932 - DNA, 130 bp, Arabidopsis thaliana landsberg
actatcccatagtagagtggttcgcttaaagatacgatcacgcgcgagaagaaaccgcgaaacgcgggttttaagaacgagacgagacggccgcgaaaaaggtgttttgggtgttcaaaagtgtgcgttg

SEQ ID NO: 179933 - DNA, 84 bp, Arabidopsis thaliana landsberg
gcttatactgtggaactggagttggaattgaacaacctcacggaagaaaacacgaagctgaaggaaattgtggtaatttcttga

SEQ ID NO: 179934 - DNA, 1274 bp, Arabidopsis thaliana landsberg
ccttgcgatgaagccgatgataatcttagtgcttcggttaaattgttacagaaagatagaccaaaagaaggtggatcatcgattctcctctgtctttcttgcagacagaaacttgaccaagaagctcaagtatgtctagaaaccctgagatgcatttccttttgttcattttcagtttcttagtaggaggctattcgttttgactattgtatcttttatcatcagggaggatataaggcaatagaagaagcttgcgtggacgagaagcatctcaagaacatgtgtgtcgagcaggctaccaaaattgagcagcttacttatcaggtaaataacttatggtgagactagtgagtgttatatgttgaacttgagtttgctgacactttgtttttataattcttaagttagacgaatacaaaaagaacgctttgcaggagtcaagtaaggtaacccaacaggttatatttcaaagaaaacaagcacattagtaaattgtttgcaagacatggataatcaactttagctatgcttatctgtttgtgcagctaatgaagtctgatgatggagaagatgagacagaggtcgtgaaggaaacatatgaaacaaaccaacgtagtgaagagtttgggaaagtaaggattgatctcagtgaaaaggaagctcttctaaaggagattgcagagctcaaaagcaagcttcagcctacaaaatcaacggataatgttagatcttcgttgctgttacggtctttccaaatgaggaagagcattgattttaccaagaacactgagaacaacagcgaggcgctagaagaagaacgtgagaggtggacagaaatggagagtgaatggatatctttaacagatgatctaaggatggatattgatagccatcgtagacacgcagaggatctagagatagagctcaagaaggagaaaatggctacagaggagttaaatgatgctctaagtagagctatgcttggtcacagtagattcatcgagcagtacacagaactgcaggagaagtacgatgaattagatgagaggcatagcgtgactatggcaggaatagttgatgtgaagaaagcagcggctaaagctgctttgaaaggtcgccacgggaagcgttttgcaaaagctttctcagctgaacttactgctattagagctgagaaggagaaagaaagagaattcttgaaaaaggagaacaagggccttaaaattcagctgcgagatactgttgaagctgttcaagctgctggagaattactt

SEQ ID NO: 179935 - DNA, 174 bp, Arabidopsis thaliana landsberg
atgactcgtgaggaagcaatcaatcacagatgctgaaacaacgtgcagtccttttgactagtttccaggaacgacactgaagcttgcggcaagtcctctgcacaagaatttcctttgatatataacacagatgatgatgatgtaaaacgacaacaatgcatgatgcatctgtga

SEQ ID NO: 179936 - DNA, 123 bp, Arabidopsis thaliana landsberg
atgtgcgagattcagtgccattgtgtaaaagtcgtacagggtaaacgtgttggtttctacgtcggcatcgggtccatcgactcggaccggaaaaaaaaaagacgtaaggaccggaaaaaaaag

SEQ ID NO: 179937 - DNA, 619 bp, Arabidopsis thaliana landsberg
taaaaaaaaaagagagactccattaaaagcagagagagagagtagtacgtcaaaaggcaaaagccaagccagaaaatatttaaagcaacaacgtgaagcacttgaaaacacgattgagatatatccaaccaaaccaaaaaccctattcgttgtagctacggcggatttggcggcggcggcggctaagtgttttagtgttttacaagttaaccaaataagccatcaccggaatccagtgcaagaaatctcaatccacccttttgaacacaattctttactttctcaaatcctaattccgatgagcagaaacagcagcagcaacggcgtttggcagagcaatagtaacggttactatagctatggatatggaggaggatacgtggagaagagacaactattccttaagagctaccaattctcgaggaaacagagtttcacagagaagattaagatatccatgaagagagtggtgaagaaagttgtttgtatgaggttgaaatctgctagaagattgaaacgcgtcgtttggtcgcggctgaaaacggcgtttttctaccgccgtagacgtttccttcgtctccttcatccaaacaaatcctcttcctactgtttctactag

SEQ ID NO: 179938 - DNA, 243 bp, Arabidopsis thaliana landsberg
atgggcatcaccaaagaaagcaagtacaccgttgaagatcaaaaggtgaaaatcaagaatggcgacgacgtcaccatttatgacttgcaagacgacggcaccatcaaaggcccgctgggcatgttgctcaagccgcaacccgagaagtaaatgctttagcccgccacatcgcatggcgggcgtttcgttaccttatttttttctggctgcggccagttgtgcctgcagcgcgtcaatgcgctg

SEQ ID NO: 179939 - DNA, 609 bp, Arabidopsis thaliana landsberg
atgaatcaacagaggtctagacggtttagatctgctaaagatgcatcggatgcagtatgttcttatttaccccatactggcttggggtttctactgtgtagtttcctcagccagacaaactttatttgcctctttactttcatctagacatgccttctaatgtttgttgtgttcttgatttcgtttccttacgtgttcttttttttttcattctgttaatgagtctcgtacctttacaatggaaatctgttgacattgttaatcttacaggctgctgaagaagaaaggctacgagaggagtttgagagggagggtagaagactccctcctaaagtggactctcaagtgtttgattctaatgttattacacctggaacggaattcatgggtgttctgtctattgcgctgcaatattatgtacaccttagacttaatcatgatgttggttggaaaaatatcaaggtatttgtgattccctattagttcttacttcatacagttatgcagtttaccgtattggattgagtttgtgactaattttatacttagctgttgaactgcccaggtcaaactttcagacgcgtatgttccgggtatagaaatacatgg

SEQ ID NO: 179940 - DNA, 684 bp, Arabidopsis thaliana landsberg
ggttacgatgttgattggagtaatgttgactacaacttccctgccgtgaatttcgattggggaaatgattttgatgatcaaatgaacaataatgagttaatgaaactgctcatagagacagccattgacgaagaaaacgaagaaaacggaacaagacttgagtttgtcaagtatgtgagtgcaaatgtacttggcgtccaaggttttttgttttacataacattctgggcaaaagatctttcctcaccaaatccacagccacattgttccaagcaaaagtgaggaagtttgcggatgagatcgaacgttagtgagtttaggctaaggccaacacaagaatgatcaattgtgaggtacaacttcttatccttaacacgaatggcttcatcttgttaggtcatttcttattgaatatcttaatcttctcgatgtatacaggtgatgatcacttccaattctgtgcgcttccagtgagaagactctttattggaacattttacttatgtagtaactttctgtcatgtattatgtcctaattaaataatgtagacttgtatgttattggtctttagaactaaatgtatctagatgcttgaaaatcgcaatccggatagatatgtgactgatgaatggttacttacattattttcttcggatgatgatggacaaaatcttgtgtcataa

SEQ ID NO: 179941 - DNA, 223 bp, Arabidopsis thaliana landsberg
atgaaagcgggacaggccttttctgagctttcgacactggccacttatttgcgaagcgagcttgtaagtaagaaggccattctgctttatgcgtataatggtacgggcaagacgcgactttctatggccttcaaaaacttgggcaaagatagcgaggcccgcgatacgctgtactataacgcctatactgaagacctgttccactggaataatgatctagagg

SEQ ID NO: 179942 - DNA, 83 bp, Arabidopsis thaliana landsberg
atgtttttcaagatgcaatttctagaggagttcgcaatataagcttcggtgacctgcttggcgacttgggaaaaacaatgtag

SEQ ID NO: 179943 - DNA, 667 bp, Arabidopsis thaliana landsberg
atggcgatatcttcagcttcactaatatcatcattctcacacgcagaaacgttcactaagcattcgaaaatcgacactgtgaatacacaaaacccgattcttctgatttccaaatgcaattctctaagagagctgatgcaaattcaagcttacgcgatcaaatctcatattgaagatgtttccttcgtcgctaagctgataaatttctgcactgagtctccaacggagtcttcaatgtcatatgcacgccacttgttcgaggcaatgtctgaaccagatattgtcatttttaattctatggctcgtgggtattctcgcttcacgaatcctcttgaggtttttagtctcttcgttgagatcttagaagatggtattttacctgacaactacactttcccgtctcttctcaaagcttgtgcagtagcaaaggcgttagaagaaggtagacaattgcattgtttgtcgatgaaactagggcttgatgataatgtctatgtttgtccaacgcttattaatatgtacactgagtgtgaagatgtggatgctgctcgttgtgtgtttgatcggattgttgagccgtgtgttgtttgttataatgctatgatcacgggttatgcgagaagaaacagaccgaacgaggctttatctttgttccgtgaaatgcaag

SEQ ID NO: 179944 - DNA, 193 bp, Arabidopsis thaliana landsberg
catattgctgggcaaaacaatgaaagtgttgaactgcgttaccagagtaaattgcatgagcataccatggaagacctgctggaacaaagttttgaccaggaccgcgtgctggagtataccagtaccgggatacacaaagacgacctggagtttgtgctgaatggtttcccggttaaaaaatttggctcgcagg

SEQ ID NO: 179945 - DNA, 621 bp, Arabidopsis thaliana landsberg
atggtaactggtgacaactggggaacagcaaactcaattgctagagaagtcggtatcgactctgttatcgcagaagctaaacctgagcaaaaagcagagaaagtcaaggaattacaggtacttgagtaaaagctccacactaaatgttaaaaagttcacatatatggaattgatataagcaatgaatatatattgcaggctgcgggacatgttgtggcaatggtaggtgacggaatcaatgactcaccggctctcgtggcagcggatgtaggtatggcgataggtgcaggaacagacattgctatagaagcagcggatatagttctgatgaaaagcaacttagaagatgtgatcacagccattgatctttcaaggaaaacgttctcaagaatccgtctcaactacgtatgggctctcgggtataacctcatggggataccgatcgctgcgggagtgcttttcccagggacacgtttcaggttgcctccatggattgcaggtgctgcaatggctgcttcttctgttagtgttgtgtgttgctctctcttgcttaagaactacaagcgacctaagaagcttgatcatctggagattcgggagattcaggtggagcgagtttaa

SEQ ID NO: 179946 - DNA, 422 bp, Arabidopsis thaliana landsberg
atgctagtcgtaactttctgttttgccttcggaggcgatagtgccacaaacaagctggtcgctctgtatgagcagcgtctgagccaggtcccctcggcgagtgagctcgaagaaagaaagaccctcatccgggagctgacgtcgactgtgaaggctggtcaggaacgcgaggtctcgttctaggtataccttggttttgacttgtttgtatataattcatcgatgattcgatgattctgacctgattgtgatttcaggcggagatcgagaggctgaaaatagagctgcccacttcaaaagacctcgagaaaggttatgccgagaagatcgggctcatggagatggagatcgggggtttgcaagccgacaagaagacggcgaggaacctgattcatcgcttggagcagaggagggaagtgatt

SEQ ID NO: 179947 - DNA, 52 bp, Arabidopsis thaliana landsberg
ccccagcgacaaaggcaccgaaggcgccgacggcaagacccggaccagctaa

SEQ ID NO: 179948 - DNA, 107 bp, Arabidopsis thaliana landsberg
atcatcatcctggaaagaggaactgcagagtaccactggctgatgccatggcatatcccttagacttagaaacggtggttttagccacaccacttcaaagactttga

SEQ ID NO: 179949 - DNA, 452 bp, Arabidopsis thaliana landsberg
atggatcctacctgggtggctactggtttgaaaattgactttgacacttttgtaagtttatgcatttaaacatgactctgagtgtatgtctccctgctttgttttcttatctattttccttgatgataagttcctatcccttcacgagttcagaaaataagcgttgaatttgaatgccattttttataatccaactagcttatgagtatgagtataaatcgtagttttcggtttcttgccaggtcaacgaatgtcattgggcgtctgatacaattggtgaaatgatctctttagatgagaatgaaagtcatcagaatgtaagtaaatgtgacaatgtcccgaacgaattcttttatgatatggagtcttcatggcgaggtcgcgttaagggaattcatatagaggaagaaatcactcaagtagaaaaatcagctgaggctttatctttagca

SEQ ID NO: 179950 - DNA, 1689 bp, Arabidopsis thaliana landsberg
taccattccgggaaaccaacattgactacaatcctgcagctttctcttggtggaaccagtaggcctctcatggtcgcatgtctggtaagaagattacctattgttgttacttgggttcagtgctttgatcagcatctatcctaaggggctaatgtgatgaatctatttgcttcttttgattgtcatagaatcctggtgtataccaagaatctcttcgcaccgttagcctggctgcatggtcaaggcacatctcaaacaatgtttctctgaatcccaaggtagagacccccacggctaagatagacatggaagcacaactgctagcttggcttgaaccacatggcaagatgatgagcgcgcatagaatgacggcaatacggtctccattgatgggtacaaaccagacttcaatttctcaaagctcagtcaagaaattactctgtcatagatcagccattgcagaaagtgctaagcttgccggcacaggacagaggtatccctttgaatggtctggtctagtttttaagtgttctacatcttaaaaccacttccctcatactttactcatgcacagggacgcatttgtgaccgcaagaaacttatttggtgtggaaactcttgctgcttcacatttatgggtatgctcttctgcattcattttgaataacatcgatatagctagtttctctatgtatattatattctactccacatttggatttatactttcatacaacataagaatctttttaagtgatggagttctctgaacatccaggaacctatacggaatctgcagttagcttctccaaccaaagaagatgagagagacacatctggcgaagagaatctattggtatcagaagcaagcttgagaggtttgctttcttgagccacttattgatgaagaatctggacatttcgtttctctccttacttttgtgtgcgtttattctagataacacattggatgtcgagaagaaatatactgaactgagtcctcttcgagaagctctatctccaatagactccaatgcaaaaccaaattcagcacacggaagctctccttttctgaagccaatgaccccaaaaacaccttttctttctacaaaccctgaaattatgcagatggaaggcacttgccagaagttcaatgcatggagcaataatttaaaggtatcaacattcccaaaatcatggtatatttgacaagaacactagaaatctgattctctatgcaatttactttcttatcacagacctctctcataaaagagtacattcacttcttgaacacagccaacaggtaataatagcctccagtttcatctgcctacctttgattcttcattacccttaggatcacacaagaactaacttcattcatatattaatttatgaacacacagagaggagctaagggaattaaaggtaaccttacttccatagtctctattgatttcactgcatgtagctctgtttcatttttttgttttcagggaattgggcagaagatggctgagtacatcattgaactcagagaaacaagccctttaaaatcggtaacacactcaatatctctccccaaatttgagcgtttagtgctaaactatctgtcatctactaaccaaatgtatggattctcaacagcttaccgacttagaaaagatcggtttcacctcaagacag

SEQ ID NO: 179951 - DNA, 591 bp, Arabidopsis thaliana landsberg
atggcgctcgacgagcaacttcgagaacgcatccgagccgacaccaaagggctacaagaaattcttgttcgagcggcgctcctgaaggctgacgcctcgtcttcgagctgaactccatgaagttccgggcccgacaagcattcgcaagcaatactgcctatcaactgcttccgttgcgtttccgccgtctgccttgggatagtggacgcgtgctcgtttcctccatggcaggggaatgggtgatcatctcacgcgacgatcttacccgcgtcgtggatggccaggttgagccgaacgaacctcttttcgccgagttgcaagccaagcatctcatcaccgccgatgagcaacgttcgacccttgcaccactcttgtctcagtatcgaacgcgcaaagcctacctcgaacacggccccaccctgcatatcttcgttgtctcccttcgttgtcaccatacctgcgcttattgccaagtttcccgtcagcctcaagccaacagtggttacgacatgccatccgaggcatccctcaaagctgtcgaacggctgttcgagtggccttccaaaaccttgacggtcgaatttcaggggg

SEQ ID NO: 179952 - DNA, 223 bp, Arabidopsis thaliana landsberg
gctgtttgatggaaaccaattcaccggtagcatcccagagagcctcggcctagttcaaaatttgactgtgttgtaagtagtagaaatatattttccaaactgtatgttcacaaaatttctttaatcttataagatatttgctttgttacagacgtcttgataggaatagactaagtggagacattccttcaagtcttaataatctcacaaatcttcaagaact

SEQ ID NO: 179953 - DNA, 441 bp, Arabidopsis thaliana landsberg
  unsure (1)..(441): unsure at all n locations
gtaaaagtgtacagctcggcccgttatgaaggtaactataccgtttccattcatgaaggcatcagcaatgaatggggcgccaggctggagaaagcatttacatcgaacctgttttttgagaaccggctgccctctgttaagatatatggtaaaggggcactgctnnnnnnnnnnnnnnnnnnnnnnnnnttgccgtttgaagcggttaacctgaaagccgttgatatctctgttgtgaagatatacgagaacaatattccccagtatctgcagaacaatgacctcaacaatgcatccggttatatcagggaagtggcgcggccgctggtggaggcaacagtgaaactggatgaagacaaaacactggacctgcataaaaagaacaggttcctgctcgacctcgataaatacatcagaaccgaaccgggaaacatttaccgg

SEQ ID NO: 179954 - DNA, 491 bp, Arabidopsis thaliana landsberg
gggtttaaaaatggatcccgtggcaccctacttctattgtgagctataatcatttgggaaacaacgacgggatcacccccccagtgtcacagactttccgctctaaggagatttcaaagagcaatgttgtagatgacatggtagctagtaatggcatcctctttgagcctggtgaacaccctgaccatgtcgttgtcatcaaggtttgattttgaatcagaggccagagtgatcaattcctcctttctttttaagtacattgtaaagtcttaaatcctgctattgttctgaatctttaacagtatgtaccatatgttgcggatagtaaaagagcaatggatgagtacacgtctgagatattcatgggagggaggaacacaattgtgttgcataacacttgtgaggactctctcttggctgcaccaattatcttggatcttgtccttctcgctgaactcagcaccagaatccagtttaaagctgaaggagag

SEQ ID NO: 179955 - DNA, 189 bp, Arabidopsis thaliana landsberg
ttacaaaaccatgaatttgaaacagaagttagggtgcttgatgtacaaggttatgatcttattttaggcattgactggttgtcaagttttggtcaaatgacagttgactggagtaaaggaatgcggaaactcaagcataaaggcaagcaagtgatcttacaagtgcaagatgtcacagctgaactgaag

SEQ ID NO: 179956 - DNA, 51 bp, Arabidopsis thaliana landsberg
ccaatggagcacattcgatctacctaccgtggctctaacatcaaccactag

SEQ ID NO: 179957 - DNA, 66 bp, Arabidopsis thaliana landsberg
atgggcttaaactttacagaatacaccacaaagagacgtattcgtagtttaaaaacccttaaatac

SEQ ID NO: 179958 - DNA, 52 bp, Arabidopsis thaliana landsberg
atgaacaaaacgcaggaaaaagaattcacagccttggcaaataagccccagc

SEQ ID NO: 179959 - DNA, 137 bp, Arabidopsis thaliana landsberg
atgaaggttggttagcttactaaagaactccacacgaaacggtcaacacgattctcgtgcctcttctctctcagacactctcacatatatacttacttctctatccatacgaaattaagtacgaatacgatacttag

SEQ ID NO: 179960 - DNA, 468 bp, Arabidopsis thaliana landsberg
atgaaccttacacaggaggatgtggaacgtgtgacaatcagcggctacgaagatgtccctgaaaatgatgacgaaagcctggtgaaggctttagctcatcagccagtcagtgtggctattgaggcttcaggaagagacttccagttctacaaaggggtatataacagatgattatgatatcgaaattgtgttctatgtatccaatctttcattctctcaaaaaccgatttggagatttttgtttgtttacagggagtgtttaatggtaaatgtggaacagacctagaccacggtgtagcagcggttggatatggttcatcaaagggatctgactatgttattgtcaagaactcatggggaccaagatggggagagaaagggtttattaggatgaagagaaacactggtaaaccagagggactctgtggaatcaacaagatggcctcatatcctaccaagaccaagtga

SEQ ID NO: 179961 - DNA, 353 bp, Arabidopsis thaliana landsberg
catgtgaccttactggctcggttcgcggtgaacctacacctataaaatcgactgtgactaaagcagtggctgagttccggcgaacccatgcggatacatggaacatccagaaagactcattcaccgaagatcagcttgaggtaatgagtgtggattttacatttacttttcttgatttacaaatgcatagacaagactctgttgagaaatcagaaacgtgataaataccaaaatattctagttctcgtttttatggtttaaatattcttggtgatgaaataatgtttgatattttgttccaccatttgcagatcttggccgatacatcttcctcttcctcgtactttgcttga

SEQ ID NO: 179962 - DNA, 686 bp, Arabidopsis thaliana landsberg
atgcgggtcagccagggttatggcatttttatatatttcaccgatcggcccgagctggctctggttgactcgtatgccaccctgcattgaacaaaccagtaggagacaagcaagcaaaacgttttaagataaggtctatggtaaaatgacaaggtaactgataaatgtgtcgtctatttgcaggtacgagctcccagattcacatcgtctccttgatggtgtaagtcaatttttaactctctctatactcgagttgtttcacttgagcaacactgtttaaaagtcctcatttgataaaataacagatggataaaagagaaccagatgatccaagtccttatctcttagctatatggacaccaggtgagaataaaactgcaatgtttcattcatgtgtctacagtatcaaagaaagtacagctagagctaaaaagcatttgaaatagaaagtttgaatctgtaaatgaaagccggaacgtagcattggtggatgttatatgtaaattagtttttgagattggtctaatgtagttgtttgactgccaggtgaaacagcgaattcggcacaaccgcctgaacagaagtgtggagggaaagcgtctggcaaaatgtgctttgacgagacttgttctgagtgtaacagtctgagggaagcaaactcacagacagttcgaggaactcttctg

SEQ ID NO: 179963 - DNA, 128 bp, Arabidopsis thaliana landsberg
tattgatgtatcggaaagatggaaaaaattggacaactttcatatatatgattctcatgattcgatacttggttggttcaccagatcgtgtgtcaaagacgatttttatgggactttttgggttttaa

SEQ ID NO: 179964 - DNA, 436 bp, Arabidopsis thaliana landsberg
atgcagcagggctcggtgtcgaccaacacaccctgggtgtcgatcgacaccatcaggagcagcacgcggatgcaatcggtgtcgaacgacacaacaatggtgtcgatcgacaccaacactagattcctgcaactattcctccagatgcggaacacgtcatactcttggggatttcaacagatcagacctgttctatgcaattcgatcagcgattgtacccccacccttccagaggaacgactatgagctgaagcatggctattttgctttagtaggctagcatccgtgccatggcttgtttcatgagcagccaatggaccatatcgagcgttttgaggacctcgttccgagcatcaaagctaatgccctctcagaggactacctactgtgccagctcttaccaaattcacttgctgggaatccgcttcttggatga

SEQ ID NO: 179965 - DNA, 1632 bp, Arabidopsis thaliana landsberg
aagcggcaacgatggagacaacaatcggagattctacgacgatgatgatgacgaagatgtgaccggtatgagctcaagtagacgaaatctccaaacgattcagagcttcaaagcttcagatctgtttccttggatcggttaaaaagagttttaaggttgatttttctttccacaccatttggcgactcgtacatcgaactcgctgatcggaaaatactcccggatagaaattgaaccgattagtttgatgagtgagtgacttgttacttcgatttgtagctgagtgtgtcactgctcaagtgtgtgaagaaggagaaaatgccgaggccaggaccaagaccttacgagtgtgtgaaacgagcttggcatagcgatcgtcatcaacctattcgtggttcgattattcgccagattttcaggtttttttcattcactcatctttctcaaaaccgtacgctagggtttctttgtatcttaatttggggttttctttgtttgatttcagactcgcaatggaagcacatagcgcagcgacgaggaagaacaaagaatggcaggagaaattgcctgtggttgtgttaaaagctgaagaaatcatgtactctaaagccaattccgaggttttaaacaaattttccttctctttttttagtgtgttttcagcttcacaaaatgacaattgggtttcggtttccattaggaagagtatacagatgctgatactatgtggaatagagtaaatgatgccattgatacaattattagaagagatgagagtacagaaactggtcctcttttgcctccatgtgttgaaggtaattgtcatttttgtttctctctttagctctagtgatccttattgaaactacttagaagttagtgctttgtactgtttattgtttgttgatgtggtttttttttatatggttagctgctcttaatttgggatgtattgctgtaagagcttcaagaagccaacgacatagtagcggaaggacttacctcggtcctaaaattcaggaaccggtttctgcgtcgactaatgagccgtcttaccatcatgaatatcgtcagcaagctcaacaatcatcaaccaaaccaagccagacagttcaagctgcagtccctgttgatgtacttgataacagcaacaagcgtgtagctactcctcgcggttacccgtttcttcatgaatccatgcagatgcatcaaaagccattggcaattagacaaggaactggtcctgcttctgctcctgctccagctccagtcaacttgggttcggtctatcctttgtattacgaaggtaataatcaaacgcagcaagctgacatgtcttttagagtccctgaagcgcccataatcattggcatgcctattggtataaagccctcagaagaagcaactgagagggtctgtgatttatccttgaggctcggtatatcttcagaaccgtctacaagaatagatgtcgggtctagtcgggcttacccgggaagaaaccaagaagagttatgtttattcgcagaggtaaagaagaatgataggtttgaatggttttcaaatagtgaaggtcagaattcagattcgagagttaaaaagcacagaactttgtgtggagacttcctttag

SEQ ID NO: 179966 - DNA, 186 bp, Arabidopsis thaliana landsberg
atggttgacgatgcatataaaaaagatgcattgatacttgatttgcgatacaataccggcggctatgtttacgatgctgtactcagattcttgtcacagcgcccctacctgcagtggcaatatcgcgatggcaagaaaagtccgcagccaaactttgcccctgccgcgaagccgattatactattg

SEQ ID NO: 179967 - DNA, 324 bp, Arabidopsis thaliana landsberg
atgcatcaaaaagattcatattatttgagcatagcgaagttcattgtttctgatctcattttgaatgaacagcttaggagtgttcgccagaaacttgaatctgatcttcagggtagtacaaaaaggttagcagaacttgttgatcagtgtgaggccataaagaagggaagggaagaatcggtaagtattttcagtattgtagaattaatgctcgaataagcttacgtgtgcttttcaccagaattgctgttcttgctgcaggaggaacgaacagaggccttgacgcaactcaaagatattgaaaagaaacacaaagatctgaag

SEQ ID NO: 179968 - DNA, 268 bp, Arabidopsis thaliana landsberg
tagcaagtagtatggtgtccattgtccatggcgtcttctcaggcggtgctgagccggttaacctgtttaccctcaagttcctgcaagtatttggtgctctcttgaagcctgacggagtgattgcgattgtaagtcccctcaaccacatagctactcatgctaactatccagaagtacgccggtgacttcagctagcctgccccacagctcatctaccgcactatcaagcaaatcttccaatcgtgccgcatctaccgtgagagcccac

SEQ ID NO: 179969 - DNA, 189 bp, Arabidopsis thaliana landsberg
gtagggggaatcgacaacgatgaagagaaagcgaccgccgtcattattggagtagtcgccgatcggaagaccggagacttggtgcgaaaccagagagaacggatcggcgcggtggtgtgtggagatcggaggagaccgagagatgagttgttgatgaggcgcgtggggaagaggaagcgcataaaatga

SEQ ID NO: 179970 - DNA, 306 bp, Arabidopsis thaliana landsberg
atgacaactgccttcggagctcgtggcaaaaagagattaaatagagtgttcgatgttaccgggtttgtgtacccggactactgctatccttcgcggaaacaagggaaaaagaggaaagctgctacctcgacgacttctagtgcgtcgatgtcaaaaaaggttaaagttttgacacatcagcccaggcgcattgaaacgaccgacgtgccgaagctaattgaagggtccgctcctattgtagagccaagttgctctgtgtcagtcgaagctaggacaataccggttgaagagccgaaactggagaag

SEQ ID NO: 179971 - DNA, 204 bp, Arabidopsis thaliana landsberg
cgtgttccaatcaaattcattaagggtaaccgaatggaaaacctaggaatgaagaagataactctgttggacaagcatggagtagagtggccagtgaatttagtcatgtacaagggaaatacacagacgcgattcggttcagggttgaaagagtttttcaaggctaatggcatcgaggcatgcaaatcttttgtgttggagttg

SEQ ID NO: 179972 - DNA, 1384 bp, Arabidopsis thaliana landsberg
atgttaataactatatcaacttctgagcaggtcactgttcgcctccaaagttatctatgctggtgactgcatgttgaaagtcccttttaatgcggtatattgttgtctactgaaacgagcttttctgttatcatgtgtcttaagaagtattggaaattctttttatgccattagtgttgttctaacttaaaatttcagcaaataactccagatgagctcccctcggatattagagttttattgagcaatgaagttgggaatatcggaatgcttgctgctgttctaataagagagaagaaaatgggtcaagtaagctagggcatcaacatttgagtaattgacttaaaataagtctcccatttcatgtgagtgttttggttttgacttagtctctgattgcttttgaatcagaagtctcgatgggtcccttatatcagccgacttcctcaacctgcagagatgcatagctcggtgagatttcactctagttattatgtcatatgttcgagtcttgaatttttgttttggccacttctttaatgtgtgttattttaccaaaagagatatacaaatataaatagttatagtttaagatatgatccatataacctggtacgcaaaaagcttcttaattgccttactatcaattttgttgcctatgctatcttggacaatgcagaataataaaaaaaaaagtggtttccttattctcttagatattttggggtgaagatgagctcagcatgattcgttgtagtgcagttcaccaggaaacagtaaaacaaaaagctcagatagaaaaggacttttcatttgtagcgcaggtaagtatgtttttctagtgatactggtaactgtttggttgggttcctaattctttaaaaggccttcaagcgactgcttatgtaccgttaagaatagtgtatgaacccataagacaggcacacacatatagactaaatagttacaaaacttatttgtcttgtctgtttggtctcgtggtgatatcagacctttagattgagaaaccgagttgggtctatcaaggtgctatattacctgtgtatataccgctgaaaaattatttacgggtttaaattttgaattatcttcttcaagttttatactccagttcataacaagtcttagcatattacgaaggctactatgattatgtcctatgtcaagctaaccaagtacgtagtatacatatgtcatatgtgtatgtttggtagatgtatttccatgtgtcgaatttatttttcatcttagtaaataagagttctaaaatcactttttggtgattcttaggcattcaaacaacattgtcccatagtaactgaacgcccagatttggaagatttcatgtatgcatatgctttag

SEQ ID NO: 179973 - DNA, 301 bp, Arabidopsis thaliana landsberg
atggtgcaagccttcttgacttcacactcatctgagttcggctctgatatcatttgtaacgctctgaccgtccctacccgcagaccccacatcatctttcgggctcaaggaccacccctgttcgacggtcggtgcgccacgtccaggaggctttaagacttgttaccgaccctacaagtcaacacatgatcttttcccatgctttgtcttcactcgcatggttccgataatcactttgcggaaggttacccatcctgaaattattccagcccaagcacgcttaactgtggtgttcttttag

SEQ ID NO: 179974 - DNA, 528 bp, Arabidopsis thaliana landsberg
tctctggtcatcttgatgttgagaaacgtctgcttcaagaaattgacgggtttgggaaccgtgatctgatcccgactgctcatgacttacaacacaagtttccatacctcgatcaggtgcttcattagtaacaaacaaaaaccgagaagttgagtttctgtgagagattagaatctttatgaatgttttttatttgcctcctttgtaggtcattaaagaggctatgagattctacatggtttctcctttggttgcaagggaaactgctaaagaagtggagataggaggttatttactcccaaaggtatattcaaacccatcaagcggattagtccatttacagtcagcacttgtaatctattacttaccttgtggttgttgcttaggggacatgggtttggttagcactaggagttctagcaaaggaccctaaaaactttccagaaccggagaagttcaagccggaaagatttgatccgaacggagaagaggagaaacatagacatccatacgctttcatcccattcg

SEQ ID NO: 179975 - DNA, 243 bp, Arabidopsis thaliana landsberg
atgcatcagtcaacgagatatcttaaactgtgtgttcggtctttgaccactattggagcaactagcaaggtatgtcatccatactcttgagagttccaatatttttaaaagtatatcagatttttatgtggtttcattcttacttctcttaatttaagttgttaaagttatcatgtgtcgtccttttctttttgtctatagttttatttaatggtccttaaaattcttgtgccagccacgtaa

SEQ ID NO: 179976 - DNA, 352 bp, Arabidopsis thaliana landsberg
atgccgatagccgttgtaccttttgcaccaccagcaccaccgataccgcgggcgcgggggctaccgtcattgccacccgcgttgccggtcaccgtggcgtcatcggccgtgtcacccttggccgccgtgcccgttggtgccgtcggtgccacccacgccgcccgtgcccgagttggtaccgccggcaccaccggtgccgtccgtaccgccggcaccacccgtgccacccgtagtgccgttgccattgctatcggtgacgccgttctcgtcggtcgcgccccggtcaccggctccgtcggtaccaccgttaccatcggtaccggcgtttccaccgttaccgccctggacaccg

SEQ ID NO: 179977 - DNA, 1390 bp, Arabidopsis thaliana landsberg
agagcgagttccagcatccaagaatgaaacagtcgaagaaagcagcaccgatatcgagagaagaacaacagctgctgtagcttcaaccttagacagtcccaaagcttcacaacaagctgaaggtacagacaatggaggaggaggagggtatagtgcgcgtaacctgatgaaaagctctagcattagtggttctaaatgcataggtgtacaatctaaaaccaacattgaggtaaagaaagggaaacttcatatttctttataggtgcatgaatgtttgaaacctagtgttcttgtgcaagaaatttaagtattgtgttatcttgcaggattccatagtagaggaacaagatgagactgctgctgtgaaagttgcatctctacacaattcttagtgattttctttttctgtttaatttaagctataccccataatagagttgtagaagcaaaagtttggtttgtcactctcactcggggtttggggttttggttggtgtatttaatagttccggggagacattgtaaagactatataaaacttgctaaccgatgtaattcattgcttttgtaacaaggtagatcattggttgaaactcgaaatcatgtaaaaatttggatatattcttgccagttttgttacttatattagttatattcctgtaaaagttgctttgcatatacaaaaatggagaaataagctgaattaagaaacgttgaagcaagttaccttactcaatccaggtttggaaacttgattagcatttgcagagacatatacagctaataatgatacgcatgacagacgtaatggtttgagtgatataggcaccaatgacagaatcaaaggaccactggaagatgaagtagctgatggaggttgattcatatcactgagagactgcgggacaagcgaaaggagattactccacttagatggatgacccgtcaaggttgaaatagatgatgattctctagtaatgcgactctcagagcagcctcgaaacaaacctggttatgtggattatgctactttttcatatgtcaagatctaaactagaatcataagcctcatgaaaagattatgctactttttcatattgctaacatcaattttaaaattgattcagaaaatttgttatttttcaaggtggcaaatgataatggggaaagttgagaacaaacggttaagagaaattggggtaatcgtttatttaagcaaagatactaatgtctaaacctctcctcctaatatgattattcatatgtacgattttacaccataccagtgccccccaaaaatataccaaggaaacacagtgacactaaatgaacatgtgccacgtagtattcgacggctatggcctatgatggcctatggagcggatcggag

SEQ ID NO: 179978 - DNA, 458 bp, Arabidopsis thaliana landsberg
  unsure (1)..(458): unsure at all n locations
atgagtccgatcagcaaatgggaagagttgacagatgatgaagaagctatcaaggttttaagagaagtgtacgaagacgatatagagaagcttgannnnnnnnnnnnnnnnnnnnnnnnnnnnnnnnnnnnnnnnnnnnnnnnnnnnnnnnnnnnnnnnnnnnncttcctccttgtcgcctccaggtttctaaactctaaatcaaattttgactacacttattaaaacagaggcttttctaaactctaacttacttggatttaaatttgattaggaggctagaagcagataggtttttcacgaccaacttcaacgagaagacgtatactaaagaagggttagagtgggtcaatactacagagactttaaaagatgtgatagaccgacacttcccgaagttaaccgatcaatggatgcgatgttcgagcgccttctctgtctggggctcgggatcctaa

SEQ ID NO: 179979 - DNA, 119 bp, Arabidopsis thaliana landsberg
gacagcaaaacgattccaacaacttcagaactgatttcggcagatgtggagaatctccaagcaatttacttaaagatttgtcagacggtggaaaagaatctcttagtgcttcagcctga

SEQ ID NO: 179980 - DNA, 504 bp, Arabidopsis thaliana landsberg
atgttctgcaccgaccgctctgatttccccaaccaggtcaacaacgtcctctgcttcccctatatcttccgcggcgcgctcgattgcggcgcccgcacgatcaacgaagagatgaagatggcggcggtcaaggcgatcgcggccctggcgcgcgaggaagtcaacgaggttgccgccaaggcgatcggcggggacacgccgatctttgggccggattatctgatcccgtcgccgttcgaccagcggctgatcctacgcatcgcgccggccgtagcgaaggctgcggcggaaaccggcgtggcggcccggccgatcaccgatttcgacgcctatctcgaccaactcaaccgtttcgtcttccgctcgggcttcatcatgaagccgatcttcaccgccgccaaggcggcgcagaagaagcgggtgatcttccccgagggcgaggacgagcgcgtgctaagaaaaacccaggtgctgctcgaggaggagattgccgagccgatcctg

SEQ ID NO: 179981 - DNA, 280 bp, Arabidopsis thaliana landsberg
gtgtaactgcggatcagggaaactcgattactactaacgaaagggtggttgttgaaccgtcttcgaaagtgggaagttggaaacttgcttctaatctcaagtccacgcggcagtataatgttcagtaagactccttacatgtgacctttctcttgttcctgcactttaagatctcaactttgatcaatataatggtgtgtctacagggtgggttcttcacttcctccttgctctatctcttgcgttgatgaaccattttctgtctcagtttcttgtaaag

SEQ ID NO: 179982 - DNA, 6 bp, Arabidopsis thaliana landsberg
atgcag

SEQ ID NO: 179983 - DNA, 161 bp, Arabidopsis thaliana landsberg
aaaaaaagaaacagagaaagattgtcggagaaaaagcgaaactcaccaacattccggtgtcagatcaagagggtcgtatccaaaatctcaactttcgaaatgaaataaggcgatcaaaggagtcgcctactctaaaatttcccagcaaaattgaaatctga

SEQ ID NO: 179984 - DNA, 404 bp, Arabidopsis thaliana landsberg
cgccgcgacgcgtgggtggacgagggtttcaacaccttcgtcgacgtgtacgaggccgaggccttcgatggcggcaagttcgcgcccaagcgcgacagcgaatacgcgccgggcaagggcacgccggccgagcagatcgccgcgatcctggccgatcccgccgcgccgccgccgatgacctacgccgacgcggtgaaggagaagtaccgccatccgatcacctatttcaaggcggccttcggcctggtgctgctgcgcgagcagatcatcggtccggacaggttcgacccggcgttccgtcgctacgtcgccacctgggcgtacaagcatccgagcccgtcggatttcttccgcttcatggccagcgaagccggcgaagacctcgactggttctggcgcggctg

SEQ ID NO: 179985 - DNA, 796 bp, Arabidopsis thaliana landsberg
tctttatataaaccctacgtacgtactctcttcacactcactgagtcaaactcacgtgtcaatgaccgagtcatccattatctccgtcaaacaatcgtctccggtgccggaggaggaggatcatcatcatcaccaacaagactcccaccgaaccaacaccaagaaacgtgtaagatccgacccgggttaccgaggcgtccggatgcgaacgtggggcaaatgggtctccgagatccgagagcctcgcaagaagagccgaatctggctaggcactttctccacaccggaaatggcggcgcgtgcacatgacgcagctgctctcaccattaaaggaacttccgccgtcctcaacttcccggagctcgccacttaccttccccgtccagcttcctcctctccacgcgacgttcaagccgcagccgccgtagcggccgccatggacttctccccctcctcctcctctctcgtagtctccgatccaaccaccgtcatcgccccagctgagacgcagttgtcttcctcgagctattcaacgtgtacgtcatcgtcgttgtcaccgtcaagcgaagaagctgcgtcgacggcggaagaactaagcgagatagtggagttaccgagtctagagacgagttacgatgagtcattgagcgagtttgtgtacgttgactcggcgtatccacctagttcgccttggtatattaataattgttatagcttttattaccacagcgacgaaaatggcatttcgatggctgaacctttcgactcttccaattttggccccctttttccttag

SEQ ID NO: 179986 - DNA, 261 bp, Arabidopsis thaliana landsberg
atgttggacgctcggacagacggtaccctgaaaattgagtcgtgctcgagctccagtagtccgtatcgttcctgcggaaagagaatcaacccgcttcgcgtacgcgttagtgggctgacctgatctcgtaatggtttgctgctagcgctgcgagctggccattgcactgttcttggaaagaaacgaacttgtcggagagtgacgtcacggcgagctgctgccggtcggttttctcagacaactgctgaagcagctatttga

SEQ ID NO: 179987 - DNA, 69 bp, Arabidopsis thaliana landsberg
atgattaaggtaataaaagtcaaagctcaacacaaccgacgcttttggcaggaaattcgaagacatatg

SEQ ID NO: 179988 - DNA, 1421 bp, Arabidopsis thaliana landsberg
atgaagagagaattgtctgtattttggacaccgagcaatggacttgtgaatgtaaattcaaacaaaacaacgtcatttacaggggagaggtttgggccattgatatggccagggaagtctactattgttcctaaaggatgggagattccaactaatggtaagaagattaaagtgggcgttccagtaaagaaaggcttcttcaactttgtggaggtaatcacggatcctatcactaacataacaactccaaagggttacgccatagacatctttgaagctgctcttaagaagttaccatattcagtcattccacaatactaccgtttcgagtctccggatgatgactacgatgacttggtctataaagtcgataacggggttagtttcttgtttttcttaaataaaatctaaaagtgcaagcaattctatgtaaaagcagttagcaatgagtagactgaactagtcttagatataatagattatgtctttttataatatattagatctctaacaaattattaaaaatgaaacagactttggatgcagttgttggagatgtaaccatcacagcgtacagatctttgtatgctgactttacgttaccatacacagagtcaggagtgtctatgatggtgccggtgagagacaacgagaataagaacacatgggtgttcctcaaaccttggggcttagacttatgggtcaccactgcttgtttcttcgtcctcattggttttgttgtgtggttgttcgaacatagagtcaacaccgacttccgtggaccgcctcaccaccagatcggcactagtttttggttctctttctccaccatggtttttgcccaccgtaagttcttacaccaataatgataaatgttaacttttcttttgaaaactatattatgtaaaatgagactattgttacattgtttatatattaaatgtcaacttattttcaatgtgataatttttttattaacaagaatcaagatcctaatgatgaagtaatttgtgtgtgtgcatataggtgagaaggtagtgagcaacttagcaaggtttgtggtggttgtatggtgctttgtggtgcttgtgctcactcagagctacacagcaaatctcacctctttcttgacggtgcaacgttttcaaccagcggccataaatgtgaaagatctcataaaaaatggggactatgtaggctatcaacacggggcttttgttaaagattttctaataaaagagggatttaatgtttctaagctcaagccttttgggtcttccgaagaatgtcacgcgcttttgtccaatggtagtatatcagcagctttcgacgaagttgcttaccttagggctatcctttctcaatactgctccaaatatgccattgttgagcctacatttaagactgctggttttggcttt

SEQ ID NO: 179989 - DNA, 213 bp, Arabidopsis thaliana landsberg
aaccactcgatagaaagctgcgggagagagcgaacacgttttaccagtactgtaaggagagagaaggcgtctacggttgcgtttgaggtggtcgagaaaattcttgtcggagtcaaccgaggaacggaaggttttgcagatgctacggaatcggagaagctcgactttggagaagagaccgttggctatatgatcgaggagttctccgggtaa

SEQ ID NO: 179990 - DNA, 898 bp, Arabidopsis thaliana landsberg
atggcgatagttatggaagcaagagatttgactttcaaatcaacggacaaaacgtgttattttggttggagatacatcattaagcgaattgtagcattccttttgttggaccttttggtcactggaatttggaagtcacgttacaaaattcaaggttagtaaggatctatgtattaatgatcatatatagtagtatttgcaagttcgatagactattaattcaccacttttgtcgtctctggacttttagtcaaaaccgacttcacttgttgttctcgtagagtttatggatgccaaaaaagccttgcatctctttaatgactgtctcaacataatatgattggaagaagtcggtcaggaaacccatagacccgggatttgtttttctttctgcatgcacataatacgtttccatattccttacataatactaattggaagaagtcggagaaagtgggctagctagtcttcctccttgctcggggtggtaacaagcttatcgttcatctagtttatgatcataggttttgatggcgtttgcaactaaccggaaatctccttgatctcgagtatgtaaattaaataactctagtagtgatgcttgatgggagatgatctcggctatatatattgtcctgttttgtggtgagcgaatctttagtcttcttcgaggactgagaaggtagagatcatttttgtttatttttttgttttttggtaaaaaatgacgtagtgttaacattaaaatttgattatgtaactagctattgttaagaaactcaatgtaaattttataatggatggagatgctctgacattacgtccaatacgagaccatccgtatcatctcatctctcaaaccatgtggatgtcggataatcgcttccttcaaatttga

SEQ ID NO: 179991 - DNA, 126 bp, Arabidopsis thaliana landsberg
agagataagattggctctacagctacccaaaaggcaaagttaatgaagtttcggacaaaacctttaattgcaaccttcccttcttttcctacgatcgatttccggaaaagcaactattttcactaa

SEQ ID NO: 179992 - DNA, 1555 bp, Arabidopsis thaliana landsberg
atgaaaaagttactgttcacccgcaacgggtctgctttgtctcgaaaacgtgtcgaagccacgattcacacggacatgtttcgattcgcctcgaaaaacatgccaaagttactgttcacccgaaacgggcccggtttgtctcgaaaaacgtgtcaaagccacgattcattcaaacatgtttcggttcgcctcgaaaaacgtgccgaagttaatgttcacccgcaacaggtcttgtttgtctcgaaaaatgtgccagaatcactcaaaccattttctgtcttgtgcctaactaatatatccaaattcttgagatacgcccgtcaagcttaaaaagactctcgcacaacggactaagggggggcttattgttggacatgggccttgccccttcaatgttaggaggcccaaaacagatatcaacaaagaagagggccttttgccattaaaaaggcccattaggtcgagaagggcaaaatcataatttgcaagggagacagaacggaatttagggttcagattccctataaatagagagaaacactattgggagcaagatccgatccacaggttattagctgagagacaaagagaatcgttgccttgcccgaaatcgttgcctagcccgacctcgttgcctagcccgacatcggtgcctcgcccatttctgtactttgtctttctgcttttacgatgaagttctcggctcggcaggatagtctataaccggcgagacaaaactagtttgctgtaatctctcgatctttgttatcgttaataaaatggaccaactccgttcagcccccaaaatctcgtatattattattattattgcatccccaatacaaataattgacgcccactgtggggccgttgatcgaagctatccttttttgacgagcctatgcatcctgaccctcacaagattcgcggtgatatgatagatacttccagcgatcgagaaactgatactggcatacctcaagcgcccgacgcgctgggcttacctccgctcaacccagcagccatccgtgccgagcatgatccctcgcgccgaatcttgttcacaccagacacaggaggagaaacagatcatgttcaggtcgcacgacctcctgccgcgcctacccccctcgcagtagctccagccgacgaagcgaccgcagctgcagcagcagcagcaaaaggcgccgctcaaagacgtaccacaacagcagaacgaggcacccatttagacgacctcgttcaaaccattcttgatcgactcgacggacatgaagcacgaacgaccgaacggattgacgcccttgtggcagcacaagtcacttccaagagtcagatcgaccgacttcgacgccgaaaacgcacctcccaacctcatgatgatcaagatggacagcagtctccgcgaactccagtcgctgaacgctccgagatccaatgctgcagaccagcgtctgttatcttaggattcattgacgagcattcttgcgatagcccacaatatgaccataacctgcagagcggccacaacctgcactcgatcaaacggtggtga

SEQ ID NO: 179993 - DNA, 876 bp, Arabidopsis thaliana landsberg
  unsure (1)..(876): unsure at all n locations
atggtgtatgcgnnnnnnnnnnnnnnnnnnncctccgagggagaaagcctcctcaagatccgcattgagaggatgcataagaagctgaaggaaccaccacggttgctcagttcggccgccgggaaacctacttgctccatcttccgggtacctcagagcatgattgattgtaatggaagatgctatgagccacgagtggtctcgattggaccgtaccaccgtggccaaacacaactcaaaatgattgaagaacacaaatggcgttacctaaacgttctgctcactagaacccaaaacctaactctagaggattacatgaagagcgtgaagaacgttgaggaagtggcgagagaatgttactccgagacaatccacatggactcggaagagttcaacgagatgatggttcttgacggttgctttctccttgagctgtttcgcaaagtgaacaatcttgttcctttcgaaccaaacgatccacttgtggccatggcttgggttcttcctttcttctacagagattttctctgtcttgagaatcaaatccctttcttcgttctagaaactttgttcaatctcacaagaggagacaacgaaaacgagacaaacgcttctttacaatctctagcgtttgcgtttttcaacaacatgatgcacagaacagaggaagatctcgccaggttcaaagagctaagagccaaacacctcctcgacctcctccggtcaagtttcatcccggagagtgagcttcacaccccgccggcaatgaatccagggaaggaaaagatgccgtcccacattatccacagcatttcgaagctccggcgagccgggatcaaactccgagagctgaaagacgcagagagcttcttagtg

SEQ ID NO: 179994 - DNA, 329 bp, Arabidopsis thaliana landsberg
ccattccagcatcctaatgctagctccatagatttaccccgaggctttgctccacccatgaactttcaggtaatgttttatgtcatatatgtatctgaagactatttatcagctcaaccctacatgtgttttgcatattttcattacagtttcttcctaccattcaagctcctcagtctgagcaagttgctcgattgtcttctcagaactttcaatgtgttggcagaggtggcacagtattgagcattggatatccacctcaatcttatgcacctcagttattacaatccatgcaccattcacatgaaagacccagccaattaaatcag

SEQ ID NO: 179995 - DNA, 501 bp, Arabidopsis thaliana landsberg
gtgaaaactgcaagtacaggttacatgtctcgtagactgatgaaagccttggaggatctattagtccattatgataacacagtgagaaatgccagcggatgtatacttcaatttacttatggggatgatggaatggacccagcactaatggaaggaaaggatggagctcctttaaattttaatagattatttctgaaagttcaggtgcttttttcgacttttgtatattggttttggtctctctttatttagagttttgtcacaatcggtacttgcattttgcaggccacatgtcctcctcaatctcaccacacatatctttcttcagaagaattgtcgcaaaagtttgaagaggaattagtcagacatgataaaagtcgggtttgcactgatgcctttgtgaaatctcttcgagaatttgtttccttgctcggagtgaagtctgcaagcccgccccaggttttatataaagcatctggtgtgactgataagcaactcgag

SEQ ID NO: 179996 - DNA, 2239 bp, Arabidopsis thaliana landsberg
gctagaaaatggaactacaattccagacttgagagtcgaagtccaggatctagagaagtttgcagtgatcaatcgttttgcgaagttccacccgccatcttcatctatgaaccggaccgtgaattcacttaagttaaacctacaaagatatgttaccatagctccaatgcctcagaatattccagacagggtacaatgtctctctctctaactattcatggatccatataattcactttttggccaatcttccccattctttgctttcatatctatttccccaaatctttctatttttgggtgggtatgagttagttggtcggaatcctgagtatagtaaaggcctccgttgtcaaaaagcgggagatcctctactaaatatgtagcattactgtatgcatcatcagaaacattgtaagttaaatccatttgtatactttagtaaagaaatatcgctcagtacagtgccccagtaagaaatccagtaaacaagctaaaatatagcagtaagtggcaatttttgtttacacagctacggttctaaccacctctttctctctcaagtccttgagtacttttgtagaatcagttgtgctttgtataaaagtcactgaaacttaaccagaagctgaacttgtgaacacctttcgagatttagaaggtgactctaatttcttccccaaccaaagctaatatctcatccaccctgtaacaaatacgcaacaccaggttaatcagaatacactttgttcccagaattcgggaatgacgatggtgaaaatattttacctatgagtgtcgatgtttacttctgcaagccaagttgtcaagtaaatctgtggaacgagaagaattgaagttttacgatataatgctaacagacaattttacttgtgcggaatcaaaatccacatacctgcaaaatttctgcggttggctggttggtatgtgatatagaagaactaccgatattataatctttcactctggggagaactggcttagctacttccatagaatataaagaacatttggtgagatgatcaaattctccatggtaaagctcatctgaccaactgttgttgatgggttgaggaacttcagtgcttaaagagatcagttccattatgagcaatctctgttaatttccccgaaaaaaaagatcagaagctgatctagagtttaagatacatgcaggagttaggagtagacaatacctttagcattacttcgcgtttgaacatctccacaagctcctcagccatcttctctgggatcatttcaacatggcaagtaccaaactttagagacaacatggtaagtagttaataactattgaacattggttttatgggtctcttaccaaatgcagagacattccaaaaattaaacacaggaatgccaccacaatctccagcatcatttgaatcttccttagtgccagagaactgtataagtgacccggtactcagcttcgtgtaacatctcagagatctgcttgcatttaccatctcaacaacaacagctacctgcatttttctacagttttgtttatagattccaaattacaccagaataaaatttctcaaattcacaagattttagcattgtcacacttaccatttccttgtacgaagataaaagcttgattcgataggaactctgaacataataagacttaatatgagaattaaaaacagagagaatgaatagaagacaaaaaatagatttgaaatgcaaattttcacctgttgcgtaaacagcttcttcaaagctttcttgtcgatatcaaacatgtcactcaacacaccaagctccatcattggcatatacctattgccatggaaacacaaaagcagtaagaatcaccagggacatcaaagtgaaacagagtaagttgcaaatacaaattaagaaaattccacacttttgtgacagatacgaattgactagcaaagtagcgtgagatcttcccgcagaacaagcgacgatccactgttgccgacaattcgacaggttagaccactggttcctaagattccgctgagcagctggtctccatagcctcatcgatgacgaaaaactccccggagatggagatgaagaagccagcgatcgcgaagaagacgccggagatggagaagcaggcggcggaaactgcgagatgctcatcgaatacaaaacgagttttttgagcttgagtcccactcctaaactctgttacgtccccgggaattga

SEQ ID NO: 179997 - DNA, 275 bp, Arabidopsis thaliana landsberg
ggcacttcaaccccatgatcgagctcgctggaatattccaccaccgtggcttctccgtgacgatcctccacacttcctacaacttccccgatccttctcgccacccacacttcacttttcgaaccatctctcataacaaagaaggagaagaagatcctctgtctcagtcagaaacttcgagtatggacctaatcgttctcgttcgtcggctgaaacaatgctacgccgaaccgtttcgtaagtctgtggcggcggaagtaggtggaggagagacg

SEQ ID NO: 179998 - DNA, 157 bp, Arabidopsis thaliana landsberg
cccgatggagccacaggtctttcagcagtacgtcgtcgacagcttcaagagcgtctggaatgccgtagctacactctctcgttgtggttatgttgctcccacccgtcgccgtcgttacttttccgcacccacctccggctccaagcatgaggactag

SEQ ID NO: 179999 - DNA, 912 bp, Arabidopsis thaliana landsberg
gaaagcgcctttgaaggtccagttttcacccactctgatgtcaagcctggtatggtgacaaaggcaaaagtcatatctgttgatacatttggtgccattgtccaattttcgggtggtctcaaagcaatgtgcccacttcggcatatgtctgagtttgaagttacgaagcctaggaaaaagttcaaggttggttacattgatcgtacatgattaatttgcaacattgttgcggcatgcctaagttttgaatgatgttctatttcaggttggagctgaattagtattccgtgtgcttggctgcacatcaaagagaataactgttacctacataaaaacactcgtaagctttcttatgatagtgaatctgattttgttaaattgtttacatattccttgatatgtctagctttgatggtttatggaggcttataattgttcaaatcatttccctcttataatctatgtaataaaatgcatctcgttttaataatcgttccttcttttattttcttctgctgattcaaggttttactttttacacttgtgtccatttctttctggttaaaaatggaaaataagtttcttctttattaaaccatttcacttaactatggacgaaaaatatttggagggacttttgtctcaatttgtatctcttttggaggttaggacttaggagtggagaaactctattgctatttactttcagtcatctattgctaccgtttcaattctgttctcatgcagtaaatatgaaatgtttattctttttcaggtgaagtctaaacttccaattttgagttcttacactgatgcaactgaagggctagtgacgcatggctggataacaaagatcgaaaagcatggatgctttgttcgcttctataatggagtgcaaggatttgttcccag

SEQ ID NO: 180000 - DNA, 584 bp, Arabidopsis thaliana landsberg
gatttgcctcctgaagtaagagagtctctagtagaaaagttggaagatttgaagaagcagcaagacgctcatgcccgtcttgctgttgaacgtaaaatattctttaggaacagaaagattaagttctttggtaagaagagcttgtaccttgcatttagtcaggaattaattagaaatggtgcctgaaagtttagagattttttgttttcttgaatagagcggagaaagatcgaaagaagcattagacgtcttgagaagttacaacgtacttcatctgctcatgtgggagatgtagatatagctgagcaactaagtaaactcaaagaagatcttgaatatgttcgggtaaattcacttctttttatccttctctgcttgttagttatatgatttagaatgagctaagttgagaatgtctgttggtcctatatataactattgtagttcttcccgaaaaatgagaaatatgtatcactttttactggagctgaggattcagatgtaattgagaagagaggtaaaatgcggcagcagatcaaagccaatattattgtggctgctgctagtgggaaggagttagaagg

SEQ ID NO: 180001 - DNA, 514 bp, Arabidopsis thaliana landsberg
gttgatagatcgatcgattgattttatggattgttatgctgaagagcttgttgtgcctaattatcaagaatcatcatcagagacatacccatctactggtatgtggggtggatggagcatgagctcccctgaagcagctgagaaatgtttcgattacgatggtttcaatggagaaggaatgatgtatagtcagatgagtatgaggactagtgaagaagaagaagagtctaaaagatcaaaggctttctatggtgcttcttcacttcacgatttcgaaggcatcgaacagatggatgatatgttcttgtacgtctctcaattctaataagtctcttttttacttattaccatttgcataggtttgtgttttccgatgtaattgttgttttcttctgtttgtttttccggttttactgcagaagttcaattttggaggatgttccagaggatgatggagatgttcaccgcgcgaccagtagcaataacagtgtcggttcttcttctatgtatggtg

SEQ ID NO: 180002 - DNA, 416 bp, Arabidopsis thaliana landsberg
aaggtctaactcacctcatgactgtgctgaaagccagagtctcataagtggtatccgtttttctcctaatggaccagctattcaccacctgctgtttgcggatgatagtttgttcatgtgtaaagcggataagaaagaagtggcagtgataaaaaacattttcaaggtttatggtgatgctacaggacaaatgataaattttgaaaagtctagtatcacttttgggtcaaaggttgaagagggttgtaaagagtggattaaagcagcgctgggaatcacaaatgagggtggagcaggcacttatctcggtctccctgagtgtttcagcggttctaaggtccagcttttagactatattagggcccggttgaagtcaaggctgtcgggttggtttgctagaatcttatctcttggag

SEQ ID NO: 180003 - DNA, 66 bp, Arabidopsis thaliana landsberg
ctgaatgccttcctcggtcggaagagaataggaggaatgatgtccaatgccaacaccgttggttaa

SEQ ID NO: 180004 - DNA, 63 bp, Arabidopsis thaliana landsberg
atgcatggtctttcactcgagagaaaggaagacgaaaccaccgaaaaaggtgaaaatgagagg

SEQ ID NO: 180005 - DNA, 227 bp, Arabidopsis thaliana landsberg
aaatctctacagacgctctgctttcttcataaggtattttccaatttcataaattgcccttagaatctacgagaagtcgtttttaccctttttatctttgggtgatgagacacgtggaataaaagcattgagcaataagcacaataagacaggagatttttcaatggacgcgagctttatgatattacaggatcgaccggtgaacccggtggtacggatggctgatg

SEQ ID NO: 180006 - DNA, 79 bp, Arabidopsis thaliana landsberg
atgatgatcgtgaaaagcataaccaaggatagagttaaggcaggactcgcgaagtggcgaagtggagaaaacaatcaag

SEQ ID NO: 180007 - DNA, 118 bp, Arabidopsis thaliana landsberg
tcctttagttaattgcgaaaatagttttctgtcatatgtaaatgatgatcggatcggatttaaaggaccaaagatattcactaacttatgcgattcatttgtcaactcgagtacttga

SEQ ID NO: 180008 - DNA, 136 bp, Arabidopsis thaliana landsberg
aaccacatgcatcccttctgttgcgttacaactgtctccgatcactctccttcgatgcctccgttacctgaaccacaaccgcctctaccgaattacgccgccgattttggttcagcgagatccgaaccgattataa

SEQ ID NO: 180009 - DNA, 2723 bp, Arabidopsis thaliana landsberg
atgggaaagcttcctgttggtgctgaacatgctggtcttgttgtcccctcaaatcaaactcggatgaaagtagaaaaaactgttcttaagactcatgatatagtccggaagacaggtgacaaggaaactctcagaggagagtgtcaaacagaagcatcttctggtgctaagactgtttccttacagctaagttgtaacactaaaaacaattctccatattggaagaatgaagagcctacagaactgaatttgtcattaagcaagggagtttgtcccgctcataacacagattctacttctaccaaatctggcaacagtggcctgaacagagaaaattgggatttgaatactaccatggatgtttgggaagatgctctagatcgcacaagtggtgcattcttaaacagtaacagaagtcttcgtgacatagagagatcaagttgtcgtgatacgactgctattacaaagtctgtttctgaaagacagaaggaaagtgtaggatttagttctcctaaggtgacgttgatgcagtttgataatcatgttaatcccacatgctcacttagtctaggcctcagttcatatcctcctattgagaaatctccttctctaccagctaccacatcagaggcaagagctgggaatgtgtgttcagtgaaccttaggactgtgaagtcagaaatcattgaagagagtgttaggcaggcaacagagagtactcaagtttctccaatcgggctatctattaaaggactgaaacatgagggtattggcagattcagccaaggaaatagtccctcatttggcattttgaagacagtggttcctatatcaataaaggctgagccaaataccttctctcaatcagaagttttcaataggaaagatggaatgttgaatcatccccataccccaataatgcaatcaaatgagatccctgatttacctacaagttctacgccatatcagaaggataaatatttaccttgttcaaatggtatcagcaatgcaccaatgcccttgagtggaatgacaataattccaggcgttcagagtgatcctgactgtacatcaaaagaaaattcgggccagagtagcagtttagctaatggtaaattacgcgaagtgctgaaacatggtggagtttacacgacttattctggtcatggagatcataacctcaatgcttcaggtgtgaatgttacttccttgactgaagagaaaatactagatgattgcaagccttgtatatcgaaagaactcccttgtaattctcgtggaactgatgaactttccagaaatgatgaagagaagattactttacctggtaaggagctagaggaacagttatacagttatgggtttgaatcagatcgtggttatgatctatctagagtaataaaggagcaagttggcaaaagaaatttgtgcgatgacgggaaggtccaaggaccagctgccgttttcacggaaagtaatgaggttgcacatcctgagtgtggtggttctgaaactgaacaaaggaacattaatgttccatgccatgtccactttcataattctaaccatgtggaagaaaaagggagtcaacctgcacttcttggttatacaggtaataaacatattaaagcatgctctacctaatcatcaattaagtttaataattatactgttgatgaatcatgtttgaaattagtcgaaatggcaagtactgaagttcatattaagaggcattctccagaacttcaaagtagaatatttgatggatcaggtgaaactgaaggccggatagttcaagatggtgaaggaacgtcaggtgtctatacagtgtcaggcggcattgaaaaccctgaaatagtagataacagtagtccagtttcactcaaggcagaaatgtctactattgacaatgatcctcctatggagtgcagtgacggtagtcagagtcgaattataaacttaactcaggttaaatctccagttaaggcactaaatgcttcaggcagctttgtgccaccccgaatggaaagagatagatttcatgatttcccactcgaaccgcgggaatatactttcagagggaggtgatatttctgagcgcttttcttacctccatcctttcttggtttcgtgctttattgaaagcttgtgtatttaatttctccactgttgtttcttttgctagtgatgaatcctgccaattctcgcgtgagaggtaccatggcagaattatgagaagcccaaggttaaatttcatacctgacagaaggagattacctgataacacagaaagcaatctgcatgaccaggacacaaaaagtaaagtcctatctaagtttttttatggaaaaacaaagctcattgtttctaaaattcaatatgactctcatcttgtgaatgcagaatttgagtttgataatcatggaaacactcgtcggggtggtgcttttatgagtaattttcagagagggagacggcctgcaaatgatggagttacaccatatgctcactcctttccgagaagatcccctagcttttcatataatagaggaccaacaaatatagaggatacatctgcatttcacggatttagagatggtgaaaaattcacaaggggattgcaatgcaacaacacagaacctctgtttatgaatcaccaacgtccatatcgaggtcggagtggttttgctcgaggacgaacaaagtttgtaaacaacccctaa

SEQ ID NO: 180010 - DNA, 168 bp, Arabidopsis thaliana landsberg
atggccgggacagcgtcgtggccagaatgagcgcgttcctccaccgccgccatcgcctcccactctgcaggagctgatggctcagcagaatgagatcttgaggcagctagctcagcgtcagcaccacctcagcactatggtggtggagaccatcagcgtcaccccgcg

SEQ ID NO: 180011 - DNA, 489 bp, Arabidopsis thaliana landsberg
ctgttcgagagcttccggctcaagctgcgggcgactatctggccagccggtggcgcgatcgacgcggatggccccctcaccctgggtgcatgggctatgtaccccatccgccgcggcatctgctatgtccgcacgcgttcgtcggatcggcgctatcaatacaagatcggccgcacggatggtgatcctaccctgttcatcaccgaccatagccgggggtcggtaacgcaggtgaatacccgcgccacgctcgacatcgtcagcccggataacaccatgtcccgccaagtggacatcagttggaagcccgtcgactccgatatccagtggcaaatcccacttggtgacgatcagctgaccgccctgacccgggcgaccagcatcgccctacggtcaggtgacaccgtcaaccgctttcccttccccgacctgcccatgtcggcgcgcgacttcatcagcctctgcccggcaccgctgtcccggcactag

SEQ ID NO: 180012 - DNA, 286 bp, Arabidopsis thaliana landsberg
atgaccggagccattgatcacggagccatctttcctattgaagattactattcaattcatattgaggctaacgtatcatcaccattggaggaccttcgagcactttgtatataccgatttagggggggcctcctttttctagggctccatacttggggactttatgaacagaacgacgccatgcatgctaccggtactccgaggaaacaaaaatcgatcgctccttgatcggctcaacggatactggctgctcatgggagaacctcatatggattggatgaactga

SEQ ID NO: 180013 - DNA, 861 bp, Arabidopsis thaliana landsberg
atggatgactcgagaggagtggaggagagccttgtagaaactgtgtgtgtgaatgacacctgcgcaggattgacggtatgaatgattaattgagaaattgtgtgtgttttgtccaggacaaaacttgatacatacttgtgtaaatgcagattcgtgggaattactatgtaagcataaataaggtaggagaaggagggcggtggagacgagagactggacaggaaatatactcacctcttctaatggcattcgcacacgagaacaaggagaaatggaaagcctcaaatactgtgaaaggttatgccatggatcatctctacaccttgcctcaaaacattgctctcatcactcttgaggagttggatctcgggaacgtccttcttcgcctggctcatctctacgaggtacgtacagttagatgttcttgaattgggatatacatgacagtaattgagtgttgagcgttgtttacaggcgggagaagacagtgattactctaaaatcgctaaagttgagttgaagaagttgttttccggcaaaatggtaagaaacacacttgctcatctacatgtggagagatactctaacatactagctagctaggtggtgaatgaatccatactatttttgcagatcaaagaagtgacggaaatgagtttgtcagcaaatcaagagaaagtaaagatgaaggagaagatgaagtggaaagtggagggtgaagcggaacaaccttcttccccgctaagaggcggacccgttgacaagtcgactttagtagtagagcttggtcccatggagattcgtacatttgtggttcagttttatcagaaacaacgaaaaagaaagttgtttgtgggatga

SEQ ID NO: 180014 - DNA, 66 bp, Arabidopsis thaliana landsberg
atggaattgatctcaaagataaggaatccatttattgtggaatataaagattcttgggttgagaaa

SEQ ID NO: 180015 - DNA, 110 bp, Arabidopsis thaliana landsberg
cgtccacagtcagcaacgcggatatttggacagatgctgccatcacgatccctgatttgggcgataaaggcatggaccccctggttgggagccgtgatatgaagctgtga

SEQ ID NO: 180016 - DNA, 415 bp, Arabidopsis thaliana landsberg
atgggccggcagcccaacagtggtgccaaccacctacacacatatagaaacacacactctaacatccccacggagcagcaaccggaagcaccacaaacaatgagactggagcagaagccaaaggtaggagccgtcggttgaaatccccccgcaaacgtagcgtcgtgagggtgcgagtgctgcggctagagtagatactggtgtgcactccatgtacatgatagccactggacaccgaggtagccgaagccgacgcaacaatagcctcggtcttcggggggttgacgttcgagcgtcaacggtcggcggtgcacgcaaaagggacagcagcagtctcgtgggccttcttgcttctttccgcgtccggtcgtcgaggacccggccaggaagccagcgatagcacgcgtctgcgctg

SEQ ID NO: 180017 - DNA, 40 bp, Arabidopsis thaliana landsberg
atgaagaatcctacagatatcctaacagatggacaatcta

SEQ ID NO: 180018 - DNA, 220 bp, Arabidopsis thaliana landsberg
atgggggacaaggtgggcttcaccggttttgtcattgggaagtgatggcctgatttcgcccactccatgtactcgatcacgcgttggatttaaacgggtcactgcacgttttcgttccttcgttcagctccgttatcaaaattttcgaactattgcttcccgggaaataaaccactcgatcgcaaagtttgaaaaccgtcttgacttcgtgatcgagtga

SEQ ID NO: 180019 - DNA, 480 bp, Arabidopsis thaliana landsberg
atcatcgtaaacatcgcacgatgtatggttatgacatcaaaagcagcggtggagaaggcggaagctacaaccgtagtaaccgaagtagtagcggtggataaggcggaagctagtagcagccatggtagcagaactatcaatggtggtaacgaaagtatcaaaggtgatagcggaagtatctgcggtggagaagatggaagctacaactgtggtagcggagactacagccgtagtagcggaagtagtagctgtagagaaggcggaaatgatagcgaaagtaacagccgtggtagtggaagtagcagccgtggtagcggaagtagcagtcgtggtagaagaaatataagcgctgaaaaagatggaaactacagcaatggtagcggaaatagcagatgtggtagcggaagtatcaacgatgaagaacctggtaacagagataacagcggtgaagaaggcgaaagctacaaccgtggtagctaa

SEQ ID NO: 180020 - DNA, 779 bp, Arabidopsis thaliana landsberg
atgggtgatatcgtttatgaacctccaagagatggacctacattatgggaaatcggtatccctgaccgaaaagcttctgagttctttatcccagatcctgatcccactcttgtaaacagggtgttagtccatcaccaagacaggtttattagctacacttttgtgaaccttactgcttggatgtgcgagaaactgaactcaacactgctttattatttatctgcaggttcaggcaatatgggttatggaagagatacacagatatgtatccaaatgatgaccttgtttacactgtcggtgtgagtgattaccgcagagactggttctttgctcatgttcccaggaagaaaggagatgtgcatgaaggaacaacttggcagattagatttaatcttgaaaacatcgatcaaaaggccaattacaaactgcgagtcgccatagcatctgcaaccttagcagagttgcaggtaaagatgaaacttcatttttctacagaaaagaatgagataagactgtgaagttttgttggtactttctatttgcagattcgaatcaatgatgcggaagcaaaccgccctctcttcacaaccggactcattgggagagacaactcaatagcgaggcacgggatccacggggtttacatgctgtatgaggtgaacataccaggtaaccggcttgtgcaaggtgataatactatattcctgaaacagccaagatgcaatggtccctttcaagggataatgtatgactacattcgtcttgaaggccctccttag

SEQ ID NO: 180021 - DNA, 481 bp, Arabidopsis thaliana landsberg
gaaattcgagagcaagagaatccgcaagaacatatatttcgattttacagtttaatcaaaaacaagagatgcagaagccacaatgcccatacaacgcagcaacaacaatctgtgcagactccgctgcaacatcagacgttagcttctcatctctatccggtaagaatcaagaaacaaaaagttgatgaatcaatttattctccttgggggtgtgatatatcgtccttgtaaatgtcttggattcacagttggtggaaaatttaaaagatgtgactgaatctagagcacgagatcagagctgtgatgccctggttagtttctctatacaaaaatttccaagtattttttaaggttgtttggctttatagggcttcatgaatgttgaattgcaatgcaggtgacttaagtgagtatccattttaacaagagttaacagatttttctttcgatttctagatccctagaatctacaccaataaag

SEQ ID NO: 180022 - DNA, 350 bp, Arabidopsis thaliana landsberg
atgtctggagttcgtgttcgtatacaagacgttaagaatctctctgttatatgccccaaggtgatttttttcccctatatcttttaagtatacctacttattctgtgacaagaagtttttatatgtaaccgccaatggttgtttgtaggtagtaaaggttatcactgatgactatgaggctgtgaactatgagaacgctatagttatagctgactatctggagatggatgaaaaatcaggtcgtaaaaaaattcctcttgcaaagctctttagtgccatgaaaaaacgggaggcttcctttaagtctgatttctgggagtccatcagatcgctactgaacaaaaatacag

SEQ ID NO: 180023 - DNA, 415 bp, Arabidopsis thaliana landsberg
cttatagacatatgatatcaaccttgctgcagaatctagaaatcaagaaaatcaatgaggaaaagaaagcatcaatggctgctcagtttgctgctgaagccactttaagaagagtccatgctgctcaaaaggatgatgacatgcctcctattgaagccatccttgctccattagaagctgaacttaagcttgcacgatcagaggtatattgtcattttaagtctaactgcttgctgtttactttcatatgggatattgaaagtttatgaggtcactgatcaaatctcttgtatctgtgtagattggaaagcttcaagaagataacagggctttggaccgtctgactaaatcaaaggaagctgccttacttgaagctgagaggaccgttgaagctgccatggcaaaagccgctatg

SEQ ID NO: 180024 - DNA, 390 bp, Arabidopsis thaliana landsberg
gtatgctgcagcaagtgaaaaatgaatgggacccctcggtgagcggaaattaccgtgccactttcctggccatggacaataaaaccgccctcaccaaaatgttcaaccaaatggctgtactggcccacaacgaactggccggggaacgtatttttgtcgcttataccagcatgaaccaggaagacgagcattcgtgcttcagcgacaatacacaccgcgacattattttgaacgccaaaggaattcaaaacctttacaccggtacttatatccgtaccgacctcagcgtggtgaacggtgatgccatcgaggacctgatcgcgatcgtgaatccagcaaagaataccgagatcctgaccatgctcaacgacagccagaccgcaacaacca

SEQ ID NO: 180025 - DNA, 126 bp, Arabidopsis thaliana landsberg
atttgatcaatgggatacggacagagaaattcaacgaggcagacagagataaaatattgtcattccttgaccgggcttttgtacggctagatgcatggtttaaatggttcaatacttctcagatag

SEQ ID NO: 180026 - DNA, 162 bp, Arabidopsis thaliana landsberg
atgctgttctgcgatcgccgcgtcaacaccaagctcatcacgtggaaccggtacaccttattcctcagccttatgagtgttctgtgtgctgatgtctttgagggattgtttgccgtgtgctgtgactgtgatgtagggtggtgctgctgcacgggccgccgg

SEQ ID NO: 180027 - DNA, 609 bp, Arabidopsis thaliana landsberg
atggttgatcaaaaagagaaactggagagaaaggcaaaagtaacttgctttgtcacgtgaagtgaagaaccctctctctctctctctctctctcctttactacttttgggtaatccaacttggctctggtgtatctttccccgtaaggtaagtcttttcaagtcttgattctagttatatctgcagttgagaaacacgagtggtctgctatgcaacacttttcatccacaacaatcttagctgacaaaagtttgcttgcctctgttgagagtaattgtctcaatttatgtaggaatcaattcaaaagacggcttgtttttgtgtgtaagaacatgtcatgtgtcaaaaagtacccaaattttactaagatttgaagattcatattcattttcatttagtttttgacagatgccattcttcaagtcagaacagtaccctgggactcgttaccggcaaaatttggacttcaaactttcttccaacgaaccaaagaccccggagaacaatcctgcatatgcaaaattaaaccgacaattcagttgtcttgacgttggtaactaccagcgaaagttttggtacttcgcgactttggtgagatcagatgaatag

SEQ ID NO: 180028 - DNA, 1210 bp, Arabidopsis thaliana landsberg
atggttgtgaaatcggtttctggagattcgtcggaacgggaaaactgggaaacgattttcaagagtttggtcaagattttacagacgaaacaggaccagcttgagtcgctactcaaagacaagaagattcttgaaagtgagatcaagactaataacgaaaattggctctctgatgttcgaaattacgaggatcaactctctctggtaaaaaccccctttttgattccttgtttcagataaagttaggttttttagggtttcgctctctcctaaacaattttgaagtgtaatgctcttaattcctctgaatttttcaattgttttcagatgatgaaagaaattgaaacgactaagatgtttcagttactggagacctataaaagcaatctcttgtgtggcttaaaggagaaagatcgttctctttgcaatttgaaactaggtgagtggcttatttggtaacagattataataaagtttgttcctttcgttttctacaacatgtgagggttcgggaaaccaatttggaaactgcagagcattcgctggatgagttaaaagacttcaaggcttggtttgatttcctcactctgaatacaaatgtaagtgaaagtttcaatttttgtaagctcttctgtgttttcttgttttaggatctcatacaatgcttgttggttttatataaaatgtgcaggtggagagtgtaagtggcaattcagaaggtacggcttttaagtcattggaagcaaaaatcagaaaactgaaacttgagtatgagaagcttgcttctgaaaagaaatgtgaggtatctgatcttttacgagaaaacgggtttgcgtggaatcagttcaaatgtatcgagagtgaattcactgataagttaaagaggaaagatgatgagatccttcaagcgaatacgaaaatttccagtcttatatcttatcaagagcagcttcagtcatctaatcaagagaaggatgagactatctcaaggttaaaggctaagatggctgaaatggagaccaattctactaagaaagatgaggaaatctcaaaactcacaagggatctagagtctgcaaagaagtctcgtgggttcacaccggttttaactcgatgcaccaaacttgaaaagcgtagcaatggaaatacggtgggatctcatatatctactaagaaagacaagtctgctgcatcaacaacaaatgaaaag

SEQ ID NO: 180029 - DNA, 133 bp, Arabidopsis thaliana landsberg
agttgtggtgaatgcggatgcgccttatattaagatggtcactgaacagttcgacagatgtcatggaattcttctccaatacgtggacttcctttctagtgctgtcagtcctactactgcttatgctcggctg

SEQ ID NO: 180030 - DNA, 431 bp, Arabidopsis thaliana landsberg
gaaactactcctttagcaggatcttctgctggtgctatagtctgtgctgtgataacctcaggagctactatgcgagaagcccttgaagctactaaggaacttgcttatgattgtcgacgcaatggcactgctttccgtcttggggtaatgagccttctatctcagtgtgctcacaaatatttacagccatagagttgaataagttcctaggtgttggtcttgtgctttagattgtcactttgttaatttgttcaaacaatttcttatgagtgaaacacaagacccaccaatgttgctgtgatgagtttggctttaagttacattataaagatgttcatacaagtcgctgtggttttaggctgtccttagagaatccatggagaggttactgcccgatgatattcacattaggtccaacgggagaattcgtg

SEQ ID NO: 180031 - DNA, 185 bp, Arabidopsis thaliana landsberg
ttctcttctcaagacaattttgtcttcaaagaggagactacaaagaggaggatatagccaagagaggggagagctttatggtggtggatgatgtcacgagagggctaccaaagaccgacgggctcaaatctgactttggaatgggctttgctctatgggccctttttgctactaaatccaacaag

SEQ ID NO: 180032 - DNA, 86 bp, Arabidopsis thaliana landsberg
ggcttaacaaatgcgcaaagaaacgtgatccatatggcactgaaccgctaggcttggcccgttataatccacaactcttggcttga

SEQ ID NO: 180033 - DNA, 876 bp, Arabidopsis thaliana landsberg
atgtatgagaatgccactgcaaaagtcctagatagtggcgtaacgtcatctatcactgcacggcttgtggtccggtcaaatcagattaattgtttgctgggagaagagggtcgtataaaaactacaattcagcaaagaactggtgcttttataactgtattgaacgttgagcagaacccaaaatgtgtttcagagaacaatcaagttgtgcaggtacactagcttgtaacccaagagagaactctatgatttactgcttttgtttggatattgtcttatatttttctttctaatagatttcaggagagttcccaaatgtgagagaagctataaaccaagttaccagcatgctacgagaggatcttatcaaccaatcgttccaaagggggtctcaatatgcagttaactattcagaagatccatttcctgaattgttcagtcctactgctggatatactccaacttttggtcggtcttccactatggaccctaatgatatcttccattactctagtcaagcttcatctaggttgtgggaatcaccggtatgtctctgtctcttacctttcccctctctatgtttggtttctttagctgatatacatagtataaatatagccacctgctgctccaagaagtgtaaatgatggaagtggaggattattttctacaagagatgaccttgtacttacaaggtaatagtacataacagctagatagattacgagagagtaacctgtccttgttctaaaaaaagtgacctttttttgcagtggactcaaaactgtgcgatatagagtttcagaatacgatgtgtgctctatgtttggatatggaaaggatggtcacaatcgtctactgaagagtctgagagag

SEQ ID NO: 180034 - DNA, 150 bp, Arabidopsis thaliana landsberg
atgtgggcagcccgtaaggaacgtcggcatgcatccgcttcctttgagtaccgcgatatccttgtcgttcgatttttccaggtgatcaacggaaagcgctcccaattcaaccgctgcttttacttcacccataatggaaaaccgattgac

SEQ ID NO: 180035 - DNA, 229 bp, Arabidopsis thaliana landsberg
atgcgcaacggaggcggcattagcatacgtaccggcggttgtagtgattacggattacctgtaacagggcagggtcccggccagcccggcgtagctaccaccatagcaggcggactgaacttcaatgatctctggaacgagaaaaaaacggatttcaatgccagcgccatggccagtgatattgatctccgcaccaaccgcagcaccaacaggcgcaatgtattacccg

SEQ ID NO: 180036 - DNA, 236 bp, Arabidopsis thaliana landsberg
cagcctataccaatgcacagacccgccaggtggtggtcctcaacatgaatacttataacctggaagccaataactcccgctaccaggccaccctcaatttaatgcgcctgacaggcattcctttcgacaccacctcttctatcgacacggctttacaatatcctgtggtcattaccggctcgcgcattaccgatacggcactcacctcctcccaacggatacaggtgcagaattac

SEQ ID NO: 180037 - DNA, 253 bp, Arabidopsis thaliana landsberg
gtttaggtcagtattattctcgttgacaccgggttccgtccccctgcgccgtcgccgtgagcccgtggagatgtcgagcccgtgagttgtcctccattgccgtcgcgtccttcaatcgtcttcctcctccattagccgggcgcagcagcctcccacgaagagccgccgattgaagagattgaagggcgccggtgacgcctgtctgaccgagctacgacccctgcatccgactccgtttagggcccgaatcaag

SEQ ID NO: 180038 - DNA, 98 bp, Arabidopsis thaliana landsberg
ggacggtggtggacaaagtggtggaggagctcgagtccagcggttttcagtgtttcacggcattgattggtggtaacggagctcagatttgctattga

SEQ ID NO: 180039 - DNA, 97 bp, Arabidopsis thaliana landsberg
tgctttactccaaaacccagagtccatcacacaagtccaagcccgaaaacaagggttcttgctccgacacgacaacaaatccagattctgagcttag

SEQ ID NO: 180040 - DNA, 261 bp, Arabidopsis thaliana landsberg
atgcttgctaacgagttgtgcgtttgcattgtaccacagatctacaaggctcagaggaacgtggttctatgcgctgcaggaattctactctactggtaagttgtaacatcatcagctattatcagtcactcacagacagggtctcgcgtaggtttattgatatctcttttattcattgacaggtgcatctaccgcatctgcaaattcaacaaagacctgcagcgcttggaggcaacggagaatagattcaaggaagagtaa

SEQ ID NO: 180041 - DNA, 1097 bp, Arabidopsis thaliana landsberg
atggcacattttgagcgtacttttggttttgggattcttatctctaacacaatctgcgaaaaacttgaactacaatcagttctcctgaaaaacagcgatcgtcttataaaccgcgacgggcgtctttgtgattggcacggacgtgattgcggagatccttggataggcaggtataattgcagtcacgcactgggcagtaaaattgtgcgaaaacacactgctcttcatggctagagagatttgtgtatgagacactcccactactgacactctagctgcttcaataactttctccatggctctgcaacgaaattcgtacataaccggtttatgacaagacgggcatgtgttcttaatttttttccagcacggagtacaagctaggtgaccattaatacactgtagaaatttaagaaccagtgttattatcacaaccggttgcttagagtatatgattattctagtataaatggattatagcaatagttacactcgcagaaaaaaaaagttctgaatttaaaatgctaaaacgccaccgtttagtaaaaaaataaaattatttcttgttttcataacttgtctgcttccatcatctctcccattttatcggagcacgacgatgtctcaagctttactaaattttcagctttcttcttcttcttctttctcaatccccaaaaccctaatttactctcactctctcaaaaccttgaaaaccccgaaactaaactcacgacaattcttctcacaatgcacagcttcttcttccgatggacccaaaaccttaagaacttgcaaaaactgcaaaacccaattcgatcctctcctcaataacccacgcgcttgtagattccatactgctcatttcggaggtaaaatttgaaaaatcccctctctgatttcggaattaggtttttgaattttggggttcttttgttttaggtgagacaaagaggaaatttgagagtgtatatacaggtggaacaatggatacaccaaattctggaaaagtgttacaatattggcattgttgtggttctgaagatccttttgattctggttgtactgcttctcctcatacaacatatgatgattga

SEQ ID NO: 180042 - DNA, 206 bp, Arabidopsis thaliana landsberg
gtctgatgatagtgaagaaagaggaatttctggcactcaagcaagggcccatgtctgtcagtgagtaccgagacagatttctgcagctatcccgctatgctcctgaagatgtcagcacagatgccaagaggcagtatcgtttcttgagaggcttagtcgatcccctgtactatcagctgatgaatcataccttccccacattttag

SEQ ID NO: 180043 - DNA, 83 bp, Arabidopsis thaliana landsberg
atgacgaagttaccctttgcttgtggacatcgagaatgtgttgtatcgcgtctttcttcgttgagaggacacgaccgacacac

SEQ ID NO: 180044 - DNA, 180 bp, Arabidopsis thaliana landsberg
gtgtccgccggagatgttggcggctatggaaacaccaacgaaaagggcaaaggcgtgagccacagcgacagcgacaagaccagcggggtccaaggctgcatcggatgtgagcttggcaaaagcaagagcagagccaacgccagcaaacacaaagagaagagttgcgataaattcagacaa

SEQ ID NO: 180045 - DNA, 458 bp, Arabidopsis thaliana landsberg
atgagtaaaagagctgcggaagaaatgactccttcattggagagcaatagaactggaccagacttttttggctactacagagctcaagtagaagagctcttgtctcaagaagagaagatacctcatcataaccatgtggatgctaagaagtcttctgctgagattataggagctgagttgtcggatgtcaaacaggagaagttgaatgccttgttaaggcagtgtgtgttgaattccattccagaagttgatgaggtacactgagttatacttgaaaatcataattggtatcatgacgcgtagctataagagacattaatattagctatgcaatttgtttgcagatgcagtctcgtgttgattcaatgtatctgatgtctcagttgagtaataaaaaacggtcaaccttaccaaccaatgctgagtctgtgattcctgaggatcctaggtgtaaagag

SEQ ID NO: 180046 - DNA, 1264 bp, Arabidopsis thaliana landsberg
cttcctaaagatgatggcacgacgccttgtcgttatcagaccgttgtgtccgagtataccgcaaacggtacttcctcgagcccttcaacggtaagtttaaaactaaaaaagattcaagatttgatttcaaccaaaatgtgagtttcttgggggtcaagattttaacaagattgttgcttttataattgtgtaggcaaagattggtaaagcatctgaagtgaggaggattttcactatgggacttccgtattcttcatctcacggtggtcagattctctttggacctgacgggtatttgtatctcatgactggtgacggaggaggagtttcagatactcacaactttgcacagaacaagaagtcgttgcttggcaaaatcttgaggcttgatgttgatgttatgccaagttaagtgacgaaatcgataaccaaaagcctgtatttgggagtttggatttggtgttttaactcttgtttttaaactctgcaggcgtatctgaaatctctaagcttggtttatggggaaactactctataccaaaaaacaatcctttccaaggaaatgaaaatgagcagcctgagatttgggctttagggctacgaaatccatggcgctgcagcttcgattccgaaagaccagattacttcttgtgcgcagatgtcggaaaggtttgtgtattttttttcttacgtctcaagcatctagttctgtgatgatgcagagtttctcatgaaatgattgctgtgttaaaaatgtaacaggatacatatgaagaagttgatatcataacaatgggtggaaactatggctggagaacttacgaaggaccatatgttttctcaccgttatcgccttttggagaaaatgtttcctcggattcaaacctgacattccccattctcggttacaaccactctgaagtgaacaaacatgaaggatctgcttccatcattggaggttacttttatcgatccaacactgatccttgctcttatggaacgtaagtaaaaaaactaaaccatgaaccctaattccaaaccctaaaaggctaaaacactaaatcctcaaatatttttttgtctcaggtacttgtatgcagatctttatgcaaacgcaatgtgggcagcgatcgaatcaccagaagatagtggaaacttcacggactctctaataccgtttagttgcagcaaggattcaccgatgaagtgtaccgcagctccaccaggagctagctcaggacctgctcttggttacaattactaa

SEQ ID NO: 180047 - DNA, 1379 bp, Arabidopsis thaliana landsberg
atgagcactgacgacaacgaaagttccggctaccaagcctccacccttgacgatatcaagaagctgcttcaagagctctccgacaagaccgagcgacagcaaaccgcagtaacttctttatctgataagttcgtttcttttcaggaacagtgcagtgggcagctcgcggcgctcaccaccagccattctgaaataaggacagctcacaacgcgtacgcagatcgagttgacttcctgtctgccggagtgtcatgtacccctggagttcgctcacgccttgattttcaaggagacatcagtccgagcatccaaacttcacaggcaggagcaggtcagtagactccgccacctcagttacctctcgtctctcaagttgaagttggggcaacttcaaaccagaaccaggctgtactgactaccccggtaaatcccaaccttcctattgatggagttaccgcaccaactccatcattatttcgagtagagccctcccttagacgtctgacctcagaatcccctaggatccggatggtgtcagcaatgagcttcaaaatctcaaagatcaaatttgggctatgaacgcaaaggttcatcgacctaccaccgcggcccccgacgttgatagagtaattgaaacaacccgcaggactccgtttactccaaggatctcgagacttcgcatttgtgagttccaagattttaagctcccgagctacaacgacaagggagatcccaaggagcactttacctcttttcaggttattgccggacgggtacctctcgagccgcacgaagaagacgctggactgtgcaaacttttttcagaaaacttgtcaggaccagctctcacctggtttacctagttagaagaagtttcaatcgacaacttcaaacagctctccaccgctttcattaaacaatatggatacttcatcaaaaatgacgtcagtgaggcccagctttggaacctctctcagtctgctgacgagccacttcggacatacatcactgcgttcaaggaaattatggtccaagtgcctaatctatccgactcagccgctcagtccgccttaaaaaatggattggggcatgaatcgcgttttcgcaaggcgttaacagtaaaccgacctgaaacaattcaagatgctctccatcgagcaacgaactggataactgctgaagaggagcgagctcttctagctaaaaagtttaatgctacaccaaagtcttctcctccccctatttcaaaaaaaccgtccgaactccaaaaacccgcagaaggaactttctcggtagaaaaagagtcgccaaaggcctctccaaaagcttctccatctaaaccgcctttctctcgaacggcaagaacggggcatttcaga

SEQ ID NO: 180048 - DNA, 1762 bp, Arabidopsis thaliana landsberg
ccagtttgtaggaactccatcacttggctgcggaccaaaaccaagttaagtgctattgttcctttcgatgacagcctcaattttcacaaggtaatgttttagcttcctggagtataaaaaagaagtttcctatatatatagaagaatgcttatgattgaaccttacacaggtcatagctataggaatttcagttggagttggaatccatgctacatctcacttagcatgtgatttcccccgactgatagctgcagacgaagatcagtatgagccaatggagaagtattttgggccacagacaaagagatatttggactttgttcaatcggtagaaggagttaccgggattggaatggttgtactaatgaccatagcctttacattggctacaacatggttcagacgtaataagctcaaccttcctggaccactgaagaaaataacaggcttcaatgccttctggtactctcaccacttatttgttatcgtctactcgcttcttgtcgttcatggattctacgtatacctcatcatcgagccatggtacaagaaaacggttagtaacttattaaccattagacccattacagagttggaatatggactctaattttggttttcatgtgatctaatagacatggatgtatttgatggtaccggtggttctttacttgtgtgaaaggctgattcgtgcattcaggtcaagcgtcgaggctgtttcagtgctaaaggtggaatctataaacatttctatattgatatatccaagaaaaggaggactttgtaaattcatctctattagtaccttacattttcaacaggttgctgtgttaccagggaatgtcttgtcgcttcacttgtcaagaccaagcaacttcagatacaagagtggacaatacatgtatctcaactgttctgcagtttctacattagaatggtaaatgaggaaaaaaaactcatattatgtgaagacatttgtatggaacaaaactgaacatttgttttcttataaacaggcatccattctcaattacctcagctccaggagatgactacctcagtgtccacatcagggttttaggagactggactaagcaattaagatcattattctctgaggtattttactccatttccactctagactataaacacaagatattattttggtccaagtatgtaactccctctgaaccacaggtgtgcaagccacgccctcctgatgaacacagactgaacagagccgactcgaagcactgggattacatccctgagtaagtattatcagtaactaactataattcagttatactctagctatacatatgcagtctctaactaggtcatttttttctttaaattgtgatcccttagctttccaagaatcctaattgatggtccatatggagcaccagcacaagactacaagaagtttgaagttgttctgctagtgggtctaggaatcggtgccactccgatgatcagcatagtgagtgacataatcaataacttgaaaggcgtggaagaaggcagtaaccgaagacagtcaccgatccataatatggtcacacctcctgtttctccatcaagaaaaagtgagacgttcagaaccaagagagcttacttctactgggtcacaagagagcaggggtcgtttgactggttcaagaacgtgatggacgaagtgactgaaacagaccgcaaaaacgtaattgagctgcataattactgcaccagcgtttaccaggaaggggacgcgag

SEQ ID NO: 180049 - DNA, 408 bp, Arabidopsis thaliana landsberg
ttcatgctcgacgactgcaagctttgaaagctctgacatattcaccatcaggcaattctgagcttttgtcaaaattgtatgagattgtatttggcattcttgaaaaggtttgtctgactgccaatgctctatgatttttaacaagatgctttgtttatttttaataaaccctggcgtagttcattgtctgcactctgcgtgatttaaccgtagtcccaccttttcttatttatatacaattatactattttattcttattgcttttcatatgagtgtggtttaatttacggggtttttcccagtgacatgcagaggccctgatttatctttcttgtcgctttcaggttggtgatgttccgcataaacgaaagaaaggtgtatttgggacaaaagggggtgataaagag

SEQ ID NO: 180050 - DNA, 3584 bp, Arabidopsis thaliana landsberg
atgtctatcatcctgctattcacatcccaatcatcattcataaccggaactaacccaggcggtacggtgcacatcgacgacgattgggaaatcatcaaacccgtggggctattctgcatgaacctcgggtcagcatcactactcgagctactaatcccttcaccggaacttcctactctctgatgataatcactagtcgcggcggccgctccgatggacgtcaatgtcaacggaagttcttccttctccgacatcgatccttaaaattaacaaacgaagaatgaggaagaaaacttttaaaaccccaataatcaaaaacacaaatttactttgctcacatatcgatttgttgacttttcgtgttttttttttcgtgccactaattaagtattttatattggataaattgtttttgtccggtctcgcaattatgagagaaaccaaaccacaagccttgtttttctcagctcatcgttgactttaaaactggacaaattggatcagagcttttctcccatggaatcatcttctccatcttcagcagagttcgatgtgtttctcagtttcagaggctttgacacacgcaacaacttcaccggtcatctccaaaaagcacttcgtctaagaggaatcgactcattcatcgacgacagactccgtcgaggagacaatctcactgcgcttttcgatagaatcgagaaatccaagattgcaatcatcgtcttctccacgaactatgcaaattctgcgtggtgtcttcgagagttagtgaagatcctcgaatgtaggaacagcaaccaacagctagtggtaccaatcttctacaaagttgacaaatcggacgtcgagaaacagaggaatagttttgcggtgccgttcaagttaccagaattgacttttcccggagttacgccggaagaaatttcatcgtggaaggctgctcttgcctcagcatccaacatcctaggttatgtagtcaaggaaattaggtaactttgcaaaatctagatcgatgtcatcaatgtcacacaaaaaaacttaccaagtctttgtgtcaaagttctacatttatcttcttagagatgctattaaagtttatgctaaatccagcttttttgtcattttgttagcacgtctgaggccaaacttgttgatgaaatagccgttgacacattcaagaagttgaatgatttggctccaagcgggaacgaaggtctcgtggggatagaatcgcgtctgaagaatcttgaaaagttgttatcatgggaggatttggataccgttcatatcataggcattgttggaatggttgggattgggaaaacgactcttgctgattgtttgtatggacgtatgcgtggtcagttcgacggtagctgcttccttactaatatccgcgaaaattcaggtagaagcgggttagaatctttgctgcagaaactcttttccactgtacttaatgatagagatttggagattggagctcctggaaatgcacatgagagatttgagccgcggcttaagagcaagaggctacttattgtgcttgatgatgtgaatgatgaaaagcaaatcagatatcttatggggcattgcaaatggtatcaaggaggaagtagaattatcattactactagagatagtaaactgattgagacgatcaaaggccgaaaatacgtgctcccgaaattgaatgatagagaagccttgaagctctttagcttgaatgcttttagtaactctttccctttgaaagagttcgaaggtttgacaaatatggttcttgattacgctaaaggccaccctttggctcttaaggtgttaggatctgatctttgtgagagggatgatctgtactgggaagctaaactggatagattgaaaagtagatcacatggagatatctacgaagttctagaaacaagctatgaggagcttaccactgaacagaagaatgtttttctggatattgcatgtttcttcagatcagagaatgtggattacgtgacaagccttctcaacagtcatggtgtggacgtctctggcgtggtaaaggatctcgttgacaaatgtctgatcactctttctgataatcgcatcgagatgcatgacatgttgcaaacgatggccaaggagattagtttaaaagtagaaacaataggtataagagactttaggtggctatcacgacatggtaaccagtgccaatggcatatcagattatgggacagtgaagatatttgtgacctgctaaccgaaggcctggtaatgagtaatgacatatcttgatgatattcaattgtcatccattttgtacaatggtacagaatcatgctctgaattaacctctgcacatttacgccatgagtcatagggagctgataaaataagaggcattttttgggtcacatcagaattaagagcaatgcgtctaagtgccaaagccttccaagggatgtacaatctcaaatacttgaaaatttatgattctcattgttcccgtggatgcgaagcagagtttaaactacacttgcggaggggacttagtttccttcctaacgagcttacatatctacactggcatggttatccactacagagtatccctctagactttgaccctaagaatcttgtagaccttaaattgccacatagtcaattagaagaaatttgggatgatgaaaaggtatgttttacgtcagtttgatcagtcctaagctaaagtgaattttgatttgcatcaaaaatttgacttgtggttgtattttttttcacaggatgttggaatgctcaaatgggtcgaccttagtcattctataaatttacgtcagtgtctgggtttggctaatgctcataatcttgagaggttgaatctagaaggatgtacaagtttgaaaaaattgccgtcatcgataaattgtttggagaagcttatatacctcaatctcagggattgcacaagccttaggagtcttccaaaaggaatcaaaactcaatccttgcaaactcttattctcagtggctgctccagcttaaagaaattcccactgatctcggaaaatgttgaagttctacttttagatggcactgttataaagagccttcccgaatccattcaaacctttagaagacttgctttgctgaatctgaagaactgcaaaaagctgaagcatctttcttctgatctttataagctgaaatgtcttcaagagctaatactctcaggttgctcacaactagaggtttttccagaaattaaggaagacatggaatctttggagattttacttatggatgatacatccatcacagagatgccaaagatgatgcatttgagcaatatcaagacattttcgttatgtggtacaagcagtcacgtttctgttagtatgttcttcatgccacgtacattgggctgctctcggttaacagatctttacctctcaagatgcagtctctacaaactcccagataatatcggtggcctatcctctttgcagtctttatgcttaagtggaaacaacatcgagaatcttccagaaagcttcaaccaacttaacaatctgaaatggtttgatatataa

SEQ ID NO: 180051 - DNA, 926 bp, Arabidopsis thaliana landsberg
atggttcatcgcctcaccggctcaacctgtggtcgtcgtttcgacatgttacgtcctccgccattcgttgttaacaatagcccaccaagtgcctctcgtattactacacaacgtccttatcgatttcctacggtcccgactatgaccgatcccatgatcacctcaacggttgaatcactcaacactcgacctccgtctccaccgtctcttcctcgagagaaagattctgtggaagcgcgagtgatggaagacgatatgaaccaggaacagttacatgggtctatgttgcctcccctgttcgtaaatggtgatgagtgccaacaacaagagagcattcctcctccaccagttccagcgaacattacaccaccaccagttccagcgaacattacaccaccaccagttccgacaagtgcaccgttcggtttttttgagtggcttatgtctcctgataatctacaaacggagaacattcaacaaccaccacttccgacgactttaccgtccggatcattagattgggccaattctatgaccgatctactatccgagggcattcctccaccagttcaggtgacttcaccggacgaatctttatattggcagttgccagaatctctgaacggtccactctctccgagcttgatgttgtctccagttcaacgttctccggaaaattcactgttagggagtgtagacttgccaaatcctctcaacaatatacgaccagagaatgttccaccacaagtttcggcagcttcactgttatggagtctagactgccccatacaatcagagaacgttctaccgttagtttcagcgacttcaccgttagactggccaaatcctcagaacaatctacaaccagagaacgttccaccactggttccggcgacttcaccgtcaatgagtctagactttcctaa

SEQ ID NO: 180052 - DNA, 392 bp, Arabidopsis thaliana landsberg
tgttgattgagaaactgttgagggaaagtcttgaaattgggaagatcttccttctgatgagatccaaggatcaagaatcagcaaacaagagactctacgatgaggtctgatttaaacatttccattctcaaccttctttttttaattcctttttcccttcttatatccttttatatatattgttccaaacagatcataagctcggatctgttcaagcttctgaagcaaatgcatgggagctcttacgaagctttcatgaagagaaagttgattccagtaattggagacattgaggaagacaatctagggatcaaatctgaaatagcaaacatgatcagtgaggagattgatgttattatcagttgtggtggtcgtacaacattcgacgacag

SEQ ID NO: 180053 - DNA, 438 bp, Arabidopsis thaliana landsberg
gagccttggaaacgacaaatcttaataaatgcccctgagatttgcgatctccttcgatatgagaaagtaagtcctctttcttcatttgctctttacaatctaaacaagtcgctttaatgacaatttgtttttgtatagggtactagctgtaatgtgtctggcatatcatttgatacatcaggaatcagtgaagtgactatatgtgatggcgctttcaaaagactgcatgatcttcgatttctccatgtttacaaaagtagagatgatgggaataacagagtgcacatacctgagaaagtggagtttccacctcgtctaaggttactgcattgggcagcatacccaagcaagagtcttcctcctacatttaatctggaatgtcttgtagaactcaatatgcgggaaagcctggtcgagaagctatgggaaggaacccaa

SEQ ID NO: 180054 - DNA, 801 bp, Arabidopsis thaliana landsberg
  unsure (1)..(801): unsure at all n locations
acaggttcaggaaagacattgacttacctgctactcatattctctcttataaaccctcaacgatcttctgtgcaagctgttattgttgttcccactcgagagctcggtatgcaagtaagtgtagtagtaggcattgatcttaaatcttcttttgactttaactttttatgatatgaaagtaattgttgcctcttttggtttaggttacaaaagttgctcgaatgttggctgcaaaatcggagattgatgtgaaaggatgtactgtgatggctctcttagatggagggacgctaagaaggcacaaaagctggctaaaggttggacttttgatagttccgtttcttattaagttagatagattaggttgtgacttagtcagcaannnnnnnnnnnnnnnnnnnnnnnnnnnnnnncaattttggttgctacggtagcaagtttgtgtcacatgctagaaaagcacatatttagaattgactcggtgagagttcttgttgtagatcacgtatccactttctcaactatgtattgtactttacagcttattttccataggaaatgattgaggctgttttgtttattgaacattatgctcggaactttatctcacccatgaatatatttgaatggtcactttgataggttgatttcttattctactcatcaaaacaagttggttctgtgcggaagcttttgacatcattttcttcatgcgataaacgtcagacagtttttgcaagtgcttctattccccagcataaacattttgtgcatgactgtatacaacaaaagtggacaaag

SEQ ID NO: 180055 - DNA, 118 bp, Arabidopsis thaliana landsberg
agagcatttgctcaccttccaatttgaagctgatgtgacgtccaacaagcttttattttcgttcaacgtcgagggtaaccaagcggtgataaaagaatgtggagtattccaactctaa

SEQ ID NO: 180056 - DNA, 542 bp, Arabidopsis thaliana landsberg
atgggtcctaatggaaccactgtttcatttcccattgacaaagtgcctagcctgttcgatcccaaaccatcagggtatgctatactcttttccttctctctcaatctctgtttgtggaatcagaccaattcataattcaatgtcccttaatctcgtagctgattgggtctggttaatgtgaacaatccttaatcctacacttgctatgttattgagccagtataaatagtagagaatgcttcaactgttttggatgtggtaaaatttaaggaatgctctaggattcagtttctacccattattcttttggtctgttggtggtgttctacattcaaaaagtctaaaggaattttacgatttgaaatcttatgataacaatgtcaagtactatctttatctgcagttatcctcctccgcgggaaaattgtgtgggtccatcgtgcaccaatccttacaagtatcgtgactcgaagactaaagttcctctatgcagtctcaaatgctacaaagcggttcaggggcaacagattgcacctccttaa

SEQ ID NO: 180057 - DNA, 1994 bp, Arabidopsis thaliana landsberg
atgaagatagtgacttacaacgttaatggccttaggcaacgagtttcgcagtttgattctcttctcaaacttctcgattcgttcgacgccgatatcatttgcttccaggttttacttcgacttttgaaatttcaatccttttcttcggtttcgccgatgaatccatgataatagtattactctggttgaatctaggagacgaaactgagaaggcaagaattgacagcagatttggcgatagctgatgggtatgaatcgtttttctcgtgcactcgcactagtgagaaaggtcgtactggttattctggtaagcatcaagctttgccttcagtggctttagagtaaaatttgagaaaatgttaaaaagttggagtttttatgttattgaaatttttgcaggtgtagcaacgttttgcagggtaaagtcagcatcttcaagctgtgaaactgctttgcctgttgctgcagaagaaggcattacgggtcttgtaaacagtaattcacgaggtgggaagagtgaaacgtctacagtagctgaaggtcttgaggaatatgagaaagaagagcttcttaggattgaccaagaaggacgatgtgttataactgatcacggccactttggtatgaatcaaatccttttttaatttatgtaacttcttttgtgtaaaatgaaattttcatcatagtttgtatgtatctatgtgttttgtcagttgttttcaatgtttatgggccgcgagctgtagctgatgatactgataggatcgagtttaagcatcggttttatgatgttttagaggtaagtttatcggtttctgaatgtagcaatgagatgcttcggcttataatgatacttggattaaatgttttttagttttcttgtagagaagatgggagtgtcttctgcgtcaaggaaggagggtatttgttgttggggatctcaacattgctccttttgctatggatagatgtgaagctgggcctgattttgagaaaaacgagtatgtatataccgattctcatgatctgtttgagccattttttgctttactcaatattttttttctattaaatatctcatttcatgtcattaaaaaatgcaggttcaggaaatggtttagatctctactagttgaacgtggaggctcattctctgatgttttcagatcaaaacatcctgaaaggtgaaattttgtgataacctcttctgtttctattattgagggagacagtctttgaaatttttgtttatcattgattgcttctttctggatttctaacaggaaagatgcattcacatgttggtcctcaagtagtggagcagaacaatttaactacggttcgaggattgatcatatcttagttgctgggtcatgcttgcatcaggacgaagataagcaggggcatagttttcttgcttgccatgtcaaggaatgtgacatattaacagagtataagcgttttaagaatgaaaatatgccaacaaggtaagtctagatgatcaagaatgatcacatgtgtgtttcaacttaaaatattaagtacttcagatttcctttttcattttacttggatctcaaatttacagtgatacaacttctgaacacactacaggtggaaaggtggattggttacaaagttaaaggggtcagaccacgtacctgtattcattagttttgatgatttaccagatatcccggaacacagcacgccgccattagcttctagatatcttcccatgatttacggtttccaacaaactcttggtaccagaaccgctgtcatgtattggttcatattctcaagttattcctgtctctatcgtttttttatatttgcttcacttgttttttttactgtaacagtatcggtatttaagaagaggcgggccaatgaagaagctaaagtcattgaggtgtcatgttcatcatcgagtcaaagtaacgcttcatccatttgtggtgatatttctacaggaccactgagaaattgtg

SEQ ID NO: 180058 - DNA, 9 bp, Arabidopsis thaliana landsberg
atggctttg

SEQ ID NO: 180059 - DNA, 120 bp, Arabidopsis thaliana landsberg
atgagaaatggggatgacgtgcgaaacgaacgaccggtagattccatgagttccgctgcggattttccccggcgacttacagagattctaaggaatttgaggagtgagaaacgattgtga

SEQ ID NO: 180060 - DNA, 433 bp, Arabidopsis thaliana landsberg
atgcaggatttgggaaaagcttataatgaattgaaacaaggagagccagcgatagaacgtttgtttgatttgacctctttggaatctaaggtactacaccctatctttcctctgatcttctcttcagtttatactcctaatgatttggttttgttcgttgtctatctcaaaatatgatgcaaagtgcttctggccctgtcttgaaaattaggtgatcgagagacctgaggccattcaattggaaaaagttgctggagaagttgagttatgcgatatatcatttaaatatgacgaaaatatgcttcccgttttggatgggttaaatcttcatattaaagcaggagagactgtagctcttgttggaccatctggaggaggaaagacaacactgatcaaattgctcctccgcctttacgaaccttcatctgggtag

SEQ ID NO: 180061 - DNA, 110 bp, Arabidopsis thaliana landsberg
aaaagaggagaaatagttatgttggtggacgagaaaaagagaagccgaaactgatgcgaaatcgtatctatctatcaagtacttatcatatctacacagaaaataactaa

SEQ ID NO: 180062 - DNA, 542 bp, Arabidopsis thaliana landsberg
tttcaatctaatgcaacaacgctgttatgtctcagacccaatatctttatctggaaatttggttcaagcctatgaagttttatcaaagtgcttgcgtgagattgaaggcatacctctcaaagtctctagcgttcagtctttagattcaggtttgttaaaatttagaaactacaagagtgtactggcactgatattttcagtatctgtagtttcttattttaaattttcctcgtgacttgcagctctcaggttgacatccgtattccctcctgaacctcacccagtggcttgcgaaaaaatcgattcgcgaagactgcaaaaacttataccatcctgcattccagcaatggaagtcatgattcaggtgtgatcattacaccagatggttactggcatagttactttgtcttaattagtcatcttaacactcctgtcattattcttcttttgctatctcagctagaaggttctggtaactggcccatggatgatttagcagttgagaaaacaaaatctgccttcctcctgaaaattgcagagag

SEQ ID NO: 180063 - DNA, 374 bp, Arabidopsis thaliana landsberg
atgatcaagtgcttcagttgcggcgcggagtgcatgaacgggctcgcgttgtgcgacctgtgccagcgtgccgcgatgacctacgcggagtggattccggtgcattttgcgaatctcgcccgctggcgaccagggcgggccggctcgcgaccagtgccatcgtcgcgcgagccgcagggggcatttggcggcaatcatggcgaccgagtggcgcgctgcctcgacgagaccggcaacgacctcgtgaattgggttcggcggctcgtggacgaccgtggcgtcgaggtgccctatgcggccgacgaggcgaacacggtgcgggtggcttgctggctgctgggcgagcacctgaccagcattgcgacgctcgactg

SEQ ID NO: 180064 - DNA, 164 bp, Arabidopsis thaliana landsberg
aatggacccatcaaacaatgcgacttcttctcagcccatgtcaaattcatctattggccagcagtttgttcctccaccccctatgtggcccacggcttacatgcagcagagtgctatggattgtaacctcgtgggaaacctgaattttccaaaccctgctcaag

SEQ ID NO: 180065 - DNA, 595 bp, Arabidopsis thaliana landsberg
agaaacctgaaccggacactgactatatccgagcacaagaagcacgccgcttcatgatctatgttcacactaaaatgatgataggtgagtgttttataacatttacatcatttataacttttcaatactaaccaaatgattcaacatcaaaattttcgcagttgacgatgagtacattataatcggatcagcaaatatcaaccagaggtcaatggatggtgcaagagactcagagatagcaatgggaggctatcaaccatatcatctttcaacaagacaaccagctcgaggtcaaatccatggattccgcatgtcgttatggtatgaacatttaggaatgctcgatgaaaccttcctcgatccatcaagccaagaatgtatccagaaagtcaaccgtgttgctgataagtattgggatctttactcaagtgagtcacttgaacatgatcttcctggtcatctacttcgctacccgattggtattgctagtgaagggaacatcactgagcttcccggatgtgaattctttcccgacacaaaagctcgtatccttggtgtcaaatctgattacatgccttcaattcttacaacctaa

SEQ ID NO: 180066 - DNA, 399 bp, Arabidopsis thaliana landsberg
atggaatttgccatcaattacctcaaatgcagcctcggcatagacagcgcagtactgctttcatcaccgttcctgctggttgctaccgcctttttcggctaccagcgcaagtacgagatcggccccggcgagtcaagccggttccggtactgggctcttacagccaatgcaaaagaacgtttttccagagggtccagcgacacgctcctggtccaagacttggcgaccttgcgagatggtggcgacgctgaagcgcttatcgagcggctacgccagcaagtcgggcggctcgacgtctcccctgccgaactcgtggggcggaaccagcggagcgctctcttcaagaccatgttcctcgccttccggcaggacggcgccagggagtggagctctggcctc

SEQ ID NO: 180067 - DNA, 181 bp, Arabidopsis thaliana landsberg
atgccgagctccgtctatgcaccacctcgtggagccccgtccgatgtcaagaacccattgcccgcacgcgcagcagcaccaccgctcgccgtcgtgcctcaccgaagatgtgcccgaaccccatccaacccttcgcctagacacacgctcgagcttgtttgccatcgtccgttcatccaag

SEQ ID NO: 180068 - DNA, 89 bp, Arabidopsis thaliana landsberg
caaatctttgacaatattctcaaccgtaatatacaatggcctcctgttcctgaagatatgagccatgaagcccgtgatttgatagatcg

SEQ ID NO: 180069 - DNA, 396 bp, Arabidopsis thaliana landsberg
tcttacaacatcatctctccactgcgtcattccaatgggtatcggggctgctggaaggtatgattccgagaaaaccgactaaatatttgtttgggaattttcagactagtcacaatgtttactttggcagcacacggatttcaaacgaattgggagcgggaaatccggaggttgctaggctggcagtgtttgccggtatattcctttggttcctagaggctaccatttgtatcacacttctgttcacttgcaaaaatattttttggctacgcgttcagcaatagcaaagaagttgtggactatgtcacggagctatcttcgctgctttgtctttcatttatggtcgatggattttcttcagtgcttgatggtattaagatcaaacccttcaattag

SEQ ID NO: 180070 - DNA, 245 bp, Arabidopsis thaliana landsberg
atgggaggccttaaatcagtcaggtaacaggaagacttactcattggttgctttgctttgagctgccacagcctcttttagtttacaaggattgtgttgttgggtcccaacactagtgaaattgcctcctattttcccacagagagcacaaggattttttcccttgcacgttccaccattcttttactctcacggatgatacaggaaccaatcctttttgcgcttcatctgagtcaaaagcctga

SEQ ID NO: 180071 - DNA, 134 bp, Arabidopsis thaliana landsberg
tatccaagttaagtaatcagagagagaaagaggatagttccggagagcgaagttcagagggaggcaagcaagcttggatacccgaagaagaagaacaacaacaacatgaagggaaagggaagcttcaagaacaa

SEQ ID NO: 180072 - DNA, 1983 bp, Arabidopsis thaliana landsberg
aatgagtaccaaccacctgaattgttgccgcttcttcagtttattactggtaagattggtaatgaggaagacgaggacagcatgttgtttcagcttctcaaatccgtggtcgagtcgggaaatcaagatattgcaatgcatattccttacattgtctcttctctagtaagtaatatgttgaagtttatgcatccaagtgaagatccatggtctcaggtatgttttagtcctgcctttcttaaattttttgcttatattgaagtttcaacaacatgaaactgaaggtaacggaatgtattcctcgtattttgaagtaaaaaaaattgacacacctatgtttatatcacgcacatgaaatccttgacgctaccaaaatatttgtagtattttcagttgttcgtggtctaggtattgtgaaatgtcttatattattttcaacgtaggctattctaggtggccttgagacattagcagcgatgactcagacttatgaaagctctaagcctgaagcggatgaggagaataatcaggcgactgaaatatggctaactggtcaaggcaccatcagcaaagctttgtcagcacttttacagcatgcatggctggtagttaaattactactcctttgtactacaatttatagaaattgaaacactgttctaattttaggatactgctctgccttttctctttgcatggttcaggcaacagatgtgcctccgacttcatgcatagatcatttgtcgacgatgttgcggttcattgtgattgctgctactaattgcaatgtatttgtggagctcagattaactgatttactcatagtttgggccgatattcttgctagttggaatggttgggaagagtcggaggacttatcagtttttgactgtatagaagaagttgtgggtataaacaataaatatggttttaggagtttccttttcagagatataccatcccctccagccatgccagtccgtccacgatctgttgtagaatccattggttcatttgtcagcaaagccatacttgagtatccgtcggccacaaggagggcttgttcttgtgtccacacattattatatgtacccgactactcatctgacatcgaaggggtggggaaatcattggcgatggtcttcgctgaatcagccttttctcattttttagcattgcgtgagaaaccttgtacattgtggaggcctctattactggcaatatcatcatgctatatctcctattccgatattgtggaaggcgttttagagaaagtgatatctggaggtttcgagttatgggtatcttcattggctttttcatactcgcttacgtgtgatgacagtccatcagtagtatcggaagtaaaactatatggtgagtagataaatctttcctttctgtggtgaagttacgattacagttcacatgttaaacatgtgcctttgccaactcgtcacataatcataaaaggtttagttgtatgtagaaactgttgttaatcataaatgcatgagcatagactaaaagacctcttgtttcagtgatgacgctagtaaaggtgatcgagcatcttttagatgtaaggcacgggaatgcaactgatgatttggcaaggaagtgctttgtttcattgatggaggcttctcggaggctaaaggaagtgaacgaagaaacagacgatgatgaagatgatggagaacctggagaagaagagacagaatctgaagaaactgattcaaatgacgaggtttgatttgaattctagtactcgttattaaattataatcaaagtatgttctgcaatcaatttgctggtccagatgcaaagtagtttataaacggctaatttcaagaaacaacattggatcttctagtggtttgtttcttctcaaataagcagtctcattttgtgtcttctttttttgaacaggattccgagagcgatgagtgtgaagaaacggaggaagagtttctagaaag

SEQ ID NO: 180073 - DNA, 1490 bp, Arabidopsis thaliana landsberg
attttatcatcactcaatggccttgaaagtgaaacgcgattggcagcgaaagctgagtaagtgtttcatctatcgaaatgttaggcatatattcatatcctaattgattgtgatacgtatttgtgttgtggtttgtttcatagatacctcttatcaagccgaaataaagttaagtgggatctggacgtaaaagatcttaccttaagtttccctggacgattggttgaatcagaaagctataatctggtatttcgcttatgtaaacatacgagtgtctgtgttttcttatttgtatccttctcagtatttattttatcctcctatgcattctcgtgtacaggttctggtattggaatctctttctatcacatctagtagcacagatgctcttagcccaattccaagattgcagtctgatgtggaccatgtggtcaatagcttacaaagttccgttgaagctttggatgcttttcaagtcaaagatctctatgaccattttgatatcaaaatctgtaaccttgaggtaagatatgtttatgttaatttttcgtattctttttgattgaagcttgtaagcaatcatatattttcttacatgtgcgtcttgtgcagatgaaactcatgaagattcatcctttccaagaacttccccttgtggagaaatcatctttacttatcaagtttgcgtcttgtataattccggaggagtcgattttgaagcagttggaggtattaaaatttatctcagggttgaggtggccatatctagtttagctgagggaatgataaacttacttattccttggtactaaatgcttgtactttaatagtggcatcgaccacattttggtattgatgtttttgccattccattcattttcaggttgaagctactctgcctatgttcaatgtccatttctctccgtcaatatttaaaggagtcatgtctgtgattgaatatcttgatattcaggatcatggaactcgaaatgctccaccttcccctgctcccatctttcacttcaccatcaaaatcgacttggcatttttaaggttgcacgtcaatctcgaaaataaaggagaaaatagcacagtgcttgttctttctatacagcagcttgatctctggtaggtaattgttgcaacggtaaaaggagcccattttgtgtctttatacagtatcagtggaaagttaacctttagcaattaaacgagcatgaatttagcatttttgttgttgtatatttgtatttaccatgatgatgtctgcttattttgccaagcagttgatatgttcacatgcttcttatcacacatatttggtcttacgatcactactataactcatctaatgatgcattgtcaaaaccaagtccatccaattctttttctattggttctttgttaaatattgtatcactgggggttcctgacaagttcccttgtacaatggtcattttcaggtattcacgtgctatatttgaagagtg

SEQ ID NO: 180074 - DNA, 2372 bp, Arabidopsis thaliana landsberg
atgaatacattatctgagaaagtggattccctgcttgcagaatctagcgtattacttaccgatacaggcttcttgaatggctctgctcaacaaagagagaaggatagtgtgcggaacaaaaagcaaaacagaaccaatatcagtgctgctcatatccttctgaaagataataatccctttaaagtccattgtgaaacagaagttatctcagctgaagactttactgctgtagctaaagaaaaccttcctagtacctctggctcttcatctgtggacagaagcaagaatgaggcttcacatgctaaggtataatcctagacccatgtacatgttttgaagaactatctttcgacaggacataagaattacacaatttatttctgaacgtgaatggatcttgttgatctctgagatggttgtaaaattccaaattggcctttttacaccaacagctgaaccagacattccattgtaagaggttaagaacccgctaaaaggtcattcagattgaaaattttgactgggattccatcaaagaccttgagcagtgcatttctgaaataaattactcagaatgcaggagaagaactatcatatttcagagctatccgtaaggatgtaatgatacaatttaatgttgagcctgatttctgaactttattaatttgcagggaccatccagattgaaaagaaaagcagaagatgttgattgtgctgctagaaattgtagccccaaagtcgagagaagtacaaagtatatttcgaattcagtgatggaacaccctgatggaaacattgatgctaacgattgccgcagagttcgtgaacaagtgaactgggtagaagtaagtactgttgataacctcttatgttaacggatgttagtccctcttttcttcatacaattaagttattgttccactaccttgcagattccaggaaaagtatcagaggaaatcaatcaaatgcttgctccattggcagataagctgaactcaagactggtatgttattcctctctgtggaaacccaatctggctactgagactgtttccttttagcttttatagtttcagtactaatgttccaaaagtgcagatatgcaagctggaagatatattaacacacatgaaaaaggttcatttgtgtgagatgctttgtctacaaattcaatctcaggtcagcctataagaaaactttctgctatcattctttctacataaatgtacattgatgatcttgttctaattgtagaaagtatgtgaccacttgagtggtgccaagacaaaaaggtttctccctgtactgccttcatatactctttaaaataaatcagtgccaagtatataacattcgttgcaattattattgcagacgtgttgagagtagatcactactctgcaagttagcatacgataaagctaaacttgagttgctgcacctcaagaaggagataatgatggtaattactttgttcctccttttcaaactttctattgattctgcttgcttaatcaaatttcatttatatggtatgcagaaaaagtttcaagcagtgagcaccggtgtacaaacatccgaaacattgaggttgaattgtgctaactttctacgtcaacatggtttccgttctactggcttgttaaatcctgaccaagcacaagaggtaactagaccagtttgaaatacccattatagtagtatgttggtggtctagtcttccaagtttcaataatttggacgccttaactctttcacaggctttaaatggtttttggtaggcatggaacattttcaggttgatgacttttttcactctaatggcagaaaaaaatatttgtttacatatcagatgtaatgttctgcccacagggtctcatgatattttttagatcagatgtaatgtatgctatgctttctcttatttttgtttacacttatgctattttagtgtattttggttttaacccaagtaattaatagactcgttatccgtcaacatttttctaggttattataactggcaaacgagcagagataacacaggagatcaaagaaattgactcaaaaatcaagaacttgattcaatgttttacggcgtgcgacacgatgacagggccgcagccggcatatgcagacactattatgattgctgaagagaccttgaaaaagagaatgagttgcagatccctacgtcaggatattctggtatataccatcttatttctatagacatggggatctaaaataaagtgtttttcttaacttgaattacccttctgctgtcgccagatttggaaagttgacagtttaggtgaatggaacgattgtcagagtattgttctaaactatagtggcgtgttcaaccaaag

SEQ ID NO: 180075 - DNA, 577 bp, Arabidopsis thaliana landsberg
atgtatctggtgtggaatttgaataagaaaatagctacgcttttatgggacatcaaggagcacaaaagcacagtaacatgcttttcactctctgaaacaggagagtgtgtcttaagtggatcagcagataaaactatcagggtatgataatgattcaactctttgtttccaggacagatcactaggatcaggacaaaactgtatctatgtttgaccttcttttatataggtatggcagatagttaaaggaaaactggaatgtgctgaagtcataaaaacaaaagattcaataaggaaactggaagcattcggaaatatgatctttgttataacaaaagggcacaagatgaaggtagacatctctctctcattaagccacaagaaggcagagactatttacatagtaatatcatataatagttcccaagtcatatttaaacactcagaggctaataactttcttcagctgcttgattcatcaagaatatctcaaagtatcttcaaaggtaaaggtgtgaagagtatggtatcagctcaaggaaagatttatataggatgcatagatacaagtatacag

SEQ ID NO: 180076 - DNA, 53 bp, Arabidopsis thaliana landsberg
atgtatgtcggcgctctaaagtttcaccttgccgtatccaatgccgctaacag

SEQ ID NO: 180077 - DNA, 225 bp, Arabidopsis thaliana landsberg
tactttcctttggtaaatcttgctgctgcatcgcttcttgattcgtctgcgtttcttcgctcggagattctgaagatgaagcggtcgccattgacgatgatgatatcaaccaaagctcatgaaaaaacatattcgaaaaaaggtcaaattttcgatcgaagaagaagagagacagattattggaaattccgaagaaattttattttttctgatccagatcgataa

SEQ ID NO: 180078 - DNA, 1411 bp, Arabidopsis thaliana landsberg
atgcaagttattctcgaggaggaaaaggtacacaaatataaacttaaaagttaatttagggtattaattaaatgccaattagtttctggtttttaatcaatgattttgtttgtgtaaaggtgtgattcaaacttctggtttagcctgatgtcgacttggtttaatcagttagttgttggatcacggttcaatgccggttttgtattggtttaaggagaaaggagaaatcggtttgagttcagtagaagattgaagagactctcttggtattagagggtttgacttggactctgttataaatagtcttcttcttcctttgttcgttgtaacagaaaattcttatctcaattcttctcctttgtaacacgatcttgagctctgggttttgagcttgagtaaatattgattcatagtggattgctggattgaatccagccccagacgtaggatcatcacaccggtgatctgaactgggtaaacaatcgtgtgttcgtttcgttctttgtttgattatgttcttgatcgatctattaagtgttccgcgaattgaagcttgatcgagttgtgtcgtgattgaatcgagttgtgttgaatcgatctttaagtcatcggattgtaacagtttggttatgattcagtcttcttggattcactaactgaaagataaatgtttataatgtgagtagtttacaaattacttacgaagtacgtgacttatgtagctttaaaatcgggttactcaagtgcaaacttttttttctactataatgttttgtaacaaaatacttgattatgattttacattaccctgctttgcattcaatatttgtgtaaggatttaaaaaatacagctgacttttgtatactatctctcatttctttaatccatctctattatccgtctatacatgtttctcttttgactacgagctacaacaattacgacaaaagggagacaaataattcaaaaacgttattcaaacgttcaagcactaaatgtcactgaaaagacgatgctatcatgtatatggagtttccatggagatggcttcataacaaagacgacatactgaaagataaactgacaacaacaaaagaatttgaagatgatccatttgtatatggctctaggtagtgactttgtgttaatagttcatgtttaatctcttacatcttcgtctttaaagttatttttctccgtacgggtctaatactagtagtcaatgatttcgagttactatccaaaatttggcaaaagaaatttgttgaggcaatgtgatgacaatggctatgatgtctgctttagtttctaaaatatgtgaaagttgcaattaggtctgggcgttcggatattcaggtcgggtttgggtcgggtatttcggatttgggtatttcggatttagaaatctaa

SEQ ID NO: 180079 - DNA, 357 bp, Arabidopsis thaliana landsberg
atgaaaagccccaccaccgcatcatcggccgcgctcttggtgctagccctcgcgctagtggcggccacctccccacaggtagcggaggcaaagaagaagagagcggcggacagcggcgaggcggcggaggcgaagaacatccaggacgacttctgctcgacgctgtgcgagggcaagaaggggacggacctggtcgtgtgcaaggagtcctgcgcgctctcccagcagtccaacctggtgctgtacggcaggatccagtgcaagggcaattgcaccgagcagaagggcatcacggcgccggccatgaaggtctgccaggaggagtgcgacaaggcgtacgtggtgaaggccgccaag

SEQ ID NO: 180080 - DNA, 68 bp, Arabidopsis thaliana landsberg
caatccagtttgttctcagtgatgaattcagccatcttcgtccagagcagcgattggctttgttgcat

SEQ ID NO: 180081 - DNA, 486 bp, Arabidopsis thaliana landsberg
aagtcaagttctacgacgctatcgtcgttacggtgagttctagaaattaatcccggtttagtgtttgaaatctcaactccggtttgagtaatacggtttttgtgtatataggtggagaggacgaagcatgaacgagacgaggaagggaacgaaatttgtggatgtgatttcaaacttttctggaaacaaggtccttggattaaccaagtgactactgcgaaagttggagatatttgtctcagagcaaaggataatcgaataaatccaaaagtggtttcgttcttgaaagaagctagaaggaagcttcatggagaaacatgtaatcaaggtaatttattacacttatctttcttttgtcttatgattaaaaacttactatgtaacggattagtgtatatgtgtgaaacaggggaagagacagagtggcaaaagattcttgagaaggtgaattctgctattcaaaacaacttaagcgttgatggatga

SEQ ID NO: 180082 - DNA, 113 bp, Arabidopsis thaliana landsberg
tgttgggtttcactaaagcttttgttctatggacttcgcagattgagaagctcagtgacatacagtgtcagcctgaatcacaactgaagttcattatagaagcatggttacag

SEQ ID NO: 180083 - DNA, 72 bp, Arabidopsis thaliana landsberg
atgaccaccgtgacccaaaaccaaagaaccggccggaagacaccaaagggacccgaaaggaaccagacgccg

SEQ ID NO: 180084 - DNA, 598 bp, Arabidopsis thaliana landsberg
agaatcctgaatgttcagtatgctattccggattatgttcacatatctcctgaatgtcgccatttgatctccagaatatttgttgctgaccctgcaaaggtaaaggaaggatcatgaaagctgcatttgttgatttatttgtgaattttctttatagtatgactgaaaagagaactttgcattttggccctcttggttggtttcttggcagaggatatcaattccagaaataaggaaccatgaatggtttctaaagaatctaccggcagatctaatgaacgataacacgatgaccactcagtttgatgaatcggatcaaccgggccaaagcatagaagaaattatgcagatcattgcagaagcaactgttcctcctgcaggcactcagaatctgaaccattacctcacaggtgagacaacacaaaacataaacttttcgctttcttgtcttttttaatgcttctcaatgtttgaaaaacttatcattactggataaacaggaagcttggacatagatgacgatatggaggaagacttagagagcgaccttgatgatcttgacatcgacagtagcggagagattgtgtacgcaatgtga

SEQ ID NO: 180085 - DNA, 3075 bp, Arabidopsis thaliana landsberg
atgcgaaggaaaagattctcattccctcgtcaagaagaagatgtcctctccttctggactgaaatcgatgctttcaagacacagctcaaacgcactgagaatcttcctgagtacatcttctacgacggacctccttttgccaccggacttcctcactacggacatatcctcgctggtacgattaaagatattgtgactcggtatcagaccatgactggtcaccatgtcactcgtcggtttgggtgggattgtcatggcttacctgttgagaatgagattgatcggaaattgaatattaagaggagagatgaagttattaagatgggaattgataagtataatgaagagtgtaggagtattgtgactcgttatgttgctgagtgggagaaggttattactaggtgtggtcgttggattgattttaagaatgattataagactatggatttgccttttatggaaagtgtttggtgggttttttctcagctttgggagaagaatcttgtttacagaggattcaaggtttgtttggcattcttcttcttgcattgatgtggttttgaagtttcgtggatcgtgatttttgtatttgggtcaattctggtttgcaggttatgccgtacagtactggttgtaagacacctttatctaattttgaagctggtcagaactataaggtaatgttgttgttattgtgttcttcaggtgattgatttgtgttgtatagtttgatctctgatattggtagaatgtgtgtatgtacaggaagtccctgatcctgaaatcatggtgacttttccggttattggggatcaagataatgctgcttttgtggcatggactactactccgtggactcttccaagcaatcttgctttgtgtgtaaatgcgaagtttgtctatgtgaaggttcgtaacaagaacactggaaaagtgtacattgttgctgaatctcggttgtctgctcttcccactgataagcctaaggccaagttaagtaatggacctgctggtgatactaagaaagcaaatcctaaagctaaaggtgctaaacctgagagtgcagctgattcttatgaagttttggagaaatttaatggagcttccctggttgggaagaagtatgaacctttgtttgattactttagtgatttctcaagtgaggcctttcgagtagtagcagatgattatgtcactgatgacagtggtactggtattgtccactgtgctcctgcctttggtgaagatgattatcgtgtttgtcttttgaacaaaataatcaaaaaggttaggtttgactacatcttccttatcacccttgctaacatcaggcatgaactttgctcatttgttgtttctctcttgtttaggcttacagtatcttcaagaacccattctcagtttactctaataatcttgctttatctcattgtgttaaatgttctatatatgttgcagggggagaatctagttgttgctgttgatgatgatgggttgtttactgagagaattacccacttcagtggccgttatgtcaaagatgcagacaaggatataattgaagccgttaaggtgattaccgatgcttgataattagtcagttcagatcataatgatttatctgtttcttagagaatctaagtgctttttggaccattggatttctttactgtaggtgatttgtttcatgaagtaatattatttttattatttcaggccaagggcaggcttgttaaaacgggaagctttactcactcatacccattttgctggcgatcagacacccctctcatatatagagcagttccaagttggtatgcttcattttcatatgagtttgagctaaggtcttagtagttggatcatttagtgctagttccagtgagacggtctctcttgtccttgccttgaactttggctcttatgattatatctggcagccccttttcggagctgtattaggtatctttgtgtatttgttttgcacaataatcaccaaactgtttaggatattttgatttcccatgttttcatttatttattttagatttcatatgtagtatctgacctaaatggcacgtagttatggtcataacttatgaactttattctgtcgtttttcaggtgtggctatgactttaaagtttttttgtgttttgacctgttaggtttgtgcgtgtggagcagttgaaagaaaagttgttaaaaagcaatgaacagacagaatgggtacctggttatgtgaaggtcggtagaagaaaggatcagtactctgagtatatattactagttcgttttgttaagtttctgatatgaatacatttttttgattaatgtgcaattcaggataaacgttttcacaattggctcgaaaatgcaagggattgggcaatcagccgaagtagattttggggcacgcctcttccgatatggataagtgatgatggggaggaagttgtgatcatggattccgtagagaagcttgaaaagctctctggtgttaaggtctcttcttttgttttatttacatctctctttatatcagcaaatagctcactgatgctttgggaaagtctactgtcatgatctcggtacctttatatgcaaccatttgctactactcaactgttggataaatttttctagaagtcttccttatatgttctgtcaactttatgacactctatgagggtttggtctttatttagtactggagaatgtagttgtcaaaaagtctaatactcatttgtttctctgatgatttatggtacaggtctttgacctgcatcgtcaccatattgatcatattacaattccatctagtcgtggcgatgagtttggtgtgctccgtcgtgtagaagatgtaagatgaaccaatttctttcatttatcacttatccggggtcttatcccaagcttaagtttatatacgcttttacaggtttttgattgttggtttgagagtgggtcaatgccttacgcgtatatccattatccgtttgaaaacaaggagttatttgagaagaactttcctggtgattttgtggctgaaggtcttgatcagactcgtggatg

SEQ ID NO: 180086 - DNA, 584 bp, Arabidopsis thaliana landsberg
tgtgatagaaaaggttttgcttctcactcgaagaaaggaaaaaaccctagtggctgcagctgttcgatttgtccgcactctcctctctgtccatgtaagtaaagtagtcttcgatcagcattttttcttataggctcatctgtgcattctctcttgagaatgaatttgactagacaattgattctataatggctagaaaatgttctcggatgacaataagtctttaggtaagttatgcaatttctaaaatattgttctatttcagaatgataatgtccagagttacattgttgagaacaacacgctgaaaccgattatcgaagtttttgttgctaatcgtcatcgggacaacctgatgactgctgctgtgttggagcttcttgagcacatacgcaaggttcctattatttcatccttttcttcactgtttctttggggtgttcctctgtacataatacatattactgttttgtgtgcaggaatatgcagtgttggtcaaatacgtaggtgatacattttgggaccagctagctccatttgagaacctgcgttccatcaaggatttgaaaacgaaatatgagaag

SEQ ID NO: 180087 - DNA, 432 bp, Arabidopsis thaliana landsberg
atgggttcaagaggcactcgagcgtctcgaacacattcgtgcggcggtcgccagtctgggcgacgaaacggtcagcgaggccgtgcgggtcgttgtcgcgccagtcctggaggagatggtcagcaacctggcgtcactggaaaccaggatgatcagctggcggcaccgatgaccaccactgacccgcaagacgatgggtccccctcgacgcttcgagacgtggccgaggccgcgttccagcggcacgcacccacctctgggtaccaacttgccgagctcgctctcaaggccggctaccagctcaccttcaccacgatcaactcgatccgggctggcacctaccgcagtcgtccgaagcgggcgacgctcgccgagctgtcctacctgtccggtgtcccactgtcgcgggtgctggaggtggccggggtcgag

SEQ ID NO: 180088 - DNA, 87 bp, Arabidopsis thaliana landsberg
agtctgaaggattacaaatttaaagcggaaggcaaaggttcttcttctgaatataaaaccgcagcattatcaacaaaatcagtgtga

SEQ ID NO: 180089 - DNA, 571 bp, Arabidopsis thaliana landsberg
atgtatgcttatcatgccgggacaccaatgccgaatgtttctgtcgctcctaccattggcccagctactagtgttgatacattaccaatgtcacaacaagccgagcttgccaagaaggcattgaaagacaatgttaagaagctgaaggtattgctcttaaacttggcttcttcatatctatgaatctgctaccttctcgtagggttttattagtattctccgtatttgtatgctgataataatattctagttgattattagttgaggtggatttttaaaacttaattcaccatagatgttttcctagttctctttgccatttgactgattttccttatgacttatatatcttagaattaatttggtttcttacgaactgaatttattttgaactatttgccaggaatctcatgcaaaaacgttatcctcccttagcaagacagatgagaatctggctgcgtcggtgctgagtatcacagctcttgaaagttcgctatctgcagctggagataagtatgtgttcaaacaaaaactcagactcttcatttctgttatctccgccttcatgcag

SEQ ID NO: 180090 - DNA, 484 bp, Arabidopsis thaliana landsberg
atggaatccgagcttaaaagtatggattgtttagagatttcgaatagggagaaagattatgagattcttcttgaagatgaagaattcagacaagctctaagttggattatcgtatcagcgaggttaagagaagtttcagagactgtgaagaatcatgagaagattctagcaaataataacagagtgattgaggaagaagtagacagagtctgcttggagatttctttactctacgatgattttgatttcaagattcaagagaagttaaagatggcaactttcaggtgagggttcttgaaaaaacaaatcaaaacgttatgttgaatcttaacaaatgatcttttgtttttttttgaggctacaaaacttggagattaagattgattcaacgatggattttatagcagagttaaggcaaagagaatcagtttatagaacagcttttgttcttaggtctgagaatctcaggaaggcagaaactgag

SEQ ID NO: 180091 - DNA, 922 bp, Arabidopsis thaliana landsberg
atttccggaaggatccttgaagccagatcttggacccaagacatacattgcgtacggtttccatgaagagcttaatagaggagattcggtgacaaaacttcattgtgacatttctgacgcggtacgtgcaccaattattttcgtacttttcttaattattcagagacataaaccatggatttttactttctgaggtgttttaaagctgaaactaggctgtccaatctatcccttgtacttcggagattaattgttctatataattgtgggttaggtcaatgtgttgacacacacagctaaagtggaaatccctcccgtcaaataccaaaacataaaagtacatcagaaaaaatatgcagaagccatgttgcagaaacaacaatacagtggtcaagtgaaagaagccagcgaacttgaaaacaagtcaatgaaagaagtggatgaaagtaaaaaggatttaaaagacaaggcagctaacgaagaacaatcaaataacagttcaagaccgtcgggctcaggagaagctgagaaagtaattatttcaaaaggtattgcgagaataagagagctttcccattcttatgtatacaaacatatgttactgaatatggagaatggactaatgatgccaacacttcttgcaactcccccatgcgatacagaggataatcccacacaacctgctgtgagtacaagtgtggaatccatacaagaacagaagctggatgctccaaaagaaactgatggcaataccaatgagaggtcaaaggctgtgcatggtggtgctgtctgggatatctttcgaagagaggatgttccaaaacttattcagtttttgaaaaggcacgagcatgagtttcgtcacttcaataacgaacccctggaatccggaagtgtcgtctcatacatctcttgtaaatga

SEQ ID NO: 180092 - DNA, 763 bp, Arabidopsis thaliana landsberg
agagcatctccggatatagtccgcagcctatgttgaagcgtcttccacgtgatgctctctatgaagagcgtgcagttatattgggcaaaatgaaccaacatgagcttgctttgtccatctatgttcataaggtacccatcaacatgagcttgctttgtcgatctttaacatgaaccaaatatcattaatttatttcaccaaataatcttctaattgttggccagttgtggtaaaaaacactttgatatgcaaatgcattgttagataattgtatcattgtgtagataagtatactctgaaactatttagaactcagatatcggtggattctatggagtgttgttgcttatggcttaactctttgtttttttctttctgatagcttcatgcacctgatctggcgctggcttactgtgatcgtatatatgagtctgttacttatctaccatctggaaaaccgtcaagcaatatctacctcacagtgctgcaaatatacctgaatcctaagaaaagcgcaaaagactttgcaaaacgaattgtagctctaggatcattcgaaagttcagacaccacaaaaatgatggactctgttttatcttcaaaagctaaaggaggccgatccaagaaaattgttgcaatagaaggcgctgaggatatgcgagttggtctcagtagcagcactgacagtggaagaagcgatgttgatactgaagaacccttggaagaaggagactccaccgttatgatctctgaagtttcttga

SEQ ID NO: 180093 - DNA, 61 bp, Arabidopsis thaliana landsberg
atgtggcttctcttcatggtctcccctgtcgtcttcattcgcgtcctttacgtcggaaaag

SEQ ID NO: 180094 - DNA, 361 bp, Arabidopsis thaliana landsberg
gtttgttgagagtcttacggacaaaggagaagttgcgacatggggagacacacgttacaataacaacaaagacctttgcaagaagacccacaagatcatggtgattaggcaagacgaagagcaagggattggtccttacaccgatgacattggcgatctctgcattttcttgggcgagaatgaatctttctgtctctctgctaaggacttccctggtcttaaccctaactcagtctactttgccggccatggttccggttatggcatatgggatctcgcctcttgcaccattcgttatctctctgactctactccaccacccggtcgcatgttttggcttcctcccacaatatcccaatag

SEQ ID NO: 180095 - DNA, 476 bp, Arabidopsis thaliana landsberg
atgccgccgccagtcgccgccgcgggtgacgccgcgaccgcgcctgcgacagctgcgttgccgagcaatttcaacgacctgcttaaactcgccaacaagtccgcgactgccaagtcctctaagtgagatagagaaaaacaatgcttacacgcctcctcgcaatctgcttctggtgttccctctcgttttccggcgcgctgcatgcgcaggaatcttcgacgggaacgaaaaacaacgaaatcctgatgttcgtcggcgaggtcaaatcgatcccggccgcaaaaattcagcgcatcgcggtcggcaacggcaaactgttcagcacgtccgtcatcgacaacaaggaattgctgctgatcgccgaagcggtcggcgattcctcgctggtgatctggtccggcaacaaccggaaaaccgtctataccgtgcgcatcagcccgcgcgatgcgggcgaagcctaccgcaacctgagcacg

SEQ ID NO: 180096 - DNA, 541 bp, Arabidopsis thaliana landsberg
gattcatcagcttggattgtgggttggtgcctaaggaaactacttatgtagagatttcgacaaaaataaaatacaaatcagacgcagattacatcgacagtggattggtcaagacaatcgatgatgcatacaagactcagcttgagcaacaggtttgggccttgagaagctttcctgtgggtgaaagaaactgttacaacgtcaacctcacggcaaagagcagatatttgatcagaggaacctttgtgtatgggaattatgatggccagagtcagttcccaagttttgatcttcacattggtcctaacaaatggacttctgttaaaatactaggagtgacaaatatttctatgcacgagataatccatgtcgtacctcaagatattctacaagtttgtcttgttaagacaggaccaacgataccattcatatcgtctcttgaatttcgtccattgaacaaggaaacttataacacgcaaagtggagcactgaggttgttcgccagagtatactttccatccagttcactatcttacgtcag

SEQ ID NO: 180097 - DNA, 96 bp, Arabidopsis thaliana landsberg
atgcagagagatgcaaatggcaaggcttgctggcccaataaatgtaagtttgatcagattccactcggggtgaacactctggtggcaccagaggat

SEQ ID NO: 180098 - DNA, 409 bp, Arabidopsis thaliana landsberg
atgaatagggacacagaagcacacacgcgatgtaattttggacggtctgaaccacaatttgcccagagcaccgccgcctttttggtcttttctatttatataattattcagtccgccgcccgatcaacccgcttctaccgcgaacggcgccatgaccagcacgacgcgcgcaccgtccgggagcgagaagaccgggcacgatcgctcacgtaagcacgctctgtttctggcgatcaggacaagtccctgaactcagccacggttttattcactaatgcagaaatgtaaacaaactagctacgacgctgcaactaactaacaatctcccccttagttcagagtcgactgcagtttgattacaccaatcctcccccgaaggtcttggaatcgcaccttcgccagagccttc

SEQ ID NO: 180099 - DNA, 340 bp, Arabidopsis thaliana landsberg
atgtctgcgaagtggcgagctctgcagcatcgccatcgttatacttacagtgctgttctgttccccagctcgttcactgcttctttgagccaatctagtttgtctcagtcttgtcccaagttttactccaacattgaagaattggtttcgttgaattcaatctacgcgcaagttaatcacgccaagaaagttgttgcttcgttcggagagtttgtcgccaagaccaatgagaatgcaggaggcgagataagggaagctattaggttttacttggagattctcttcatggagaattctttgcctcttcataagacccttgtttcagccttggctaaaacca

SEQ ID NO: 180100 - DNA, 477 bp, Arabidopsis thaliana landsberg
atgacgcatccttctggtgataaaacccaacaacttatgtctgatactcagacaacatcacatcagcaaaatggtggggagttactacaagataatgggattgtgtctgatgcaactgtggaacaagtgggtttactctcaactggtcatgatgtgttaaagaactctaatgagactgtgcctatcccgggtgaagaagagtttaactcgcctgttcaagtcactccattgttcagatctctagcagcaggcatcccaagcccacaattctctgaaagtgtaagtatccacctaacaaattgaattgtggaaaactttctggtttagttttatagtaaaagaaacctgattgatctgtttttgcaggagaggaactttctgctaaaaacacttggtgtcgagtccccatctccatatccaagtgctaatccttcacaaccacctccttgcaaaagagtccttctcgatagcttgtaa

SEQ ID NO: 180101 - DNA, 99 bp, Arabidopsis thaliana landsberg
gaacttacaagcaccacaaggagagccagagctagagctggaactagtcatgatgatgatggtgttgtgacggttcttgatattaaaggtcgaatttaa

SEQ ID NO: 180102 - DNA, 668 bp, Arabidopsis thaliana landsberg
atgctatccaagtcagggacaaacaggtttcacggttcagcctgggagttcattcgcaacaatgcattctacgcgcgcaacagtttctcggacttctgctcaacggggcgatgtgctcctggcacgccgaacaccacgccggcaaagccaggacactatacgcagaaccagtttggcgcgtctcttggcggccccatcattaaggaccgcgtcttcttcgaaggcgcctatgaagggtggcgctactcaaaacccacgttgacaacgactcttgtcccgacagcggaggagatgtcgggcgacttttcaaatgccgcgacctccttctatcaacacaaattctacaatccctattcgacgagttgcgttggagggaaatgcaccgtgcaacagttccaatgcgatgccaatggcaacccgctttcggccccgaacaaccagcaggcaccaggcaccccgggcctcaaaatccctgcatccatgctgaacgcaacgatgctcacttatttgaagacgtattactccacgcccaattcccccggaaccatagcgtcaggctacaacttcgtcgagaaccggccgcagatagaccataacaactcctatcaggctcgactcgattttcatctgacagacaagacctttggcttcggtcgcatcactcagat

SEQ ID NO: 180103 - DNA, 82 bp, Arabidopsis thaliana landsberg
agagtcgccaacgacagatctaaatgacgttgacggcagccaccaacaaagcaaaacaaagacagcagatgcgaaacgatga

SEQ ID NO: 180104 - DNA, 814 bp, Arabidopsis thaliana landsberg
gctatcaagggcatgcggaatatttatgctaatcagaagattttgcttgtccccataaaagaaatgactgctgttctttctgtcgagagtaaagcaatcgatttatcccgtgactcgtgggttagaatgaaacttgggatatataagggtgatctagctcaggtacgatccatttttcatgtgttttaagtgttcagagttctctgaaacctttctgaaatttaagtttggtacaggtggttgatgttgataatgtacgtaagagggtcacagtcaagttgatcccaagaattgatctgcaggctctagccaataagctggtatacgacctttttatacttaagtgtaacaaatgctgtgtattgtgaaacatacttcttcctatcttatatacttagggtatatgtaggaaggaacagagaatgtcaagaagaaagcttttgctccacctccacgtttcatgaacattgatgaggcaaggtactgttccagacttctggtgaaactatcctatgtttttctaagcaataattgtgttctttggttatgatttatcagtatttgtaacgtgattatagggaacttcacatacgtgttgagcaccggcgtgatccaatgacgggtgactactttgagaatatcggtggaatgcttttcaaagatggttttctttacaagaaagtatcgacgaagtccattgctgctcagaatgtaacaccaaccttcgatgaacttgaaagattcaagagaccaaatgaaaatggggagatcgacttcgttgatgagtcgactttatttgcaaatagaaagaagg

SEQ ID NO: 180105 - DNA, 580 bp, Arabidopsis thaliana landsberg
ttggatggcaccatcgttgcacctagtgacaaattcgcatggtcggaccccatctcccgaatgtggatcaaattttcaactgtgtctggcctaataatcgttggttcgggaaccattgatagtcgtggttcatctttttgggaggtgacaatttgatatatcataatttatattaattttaaaatataattttgttcattgcaatatcaaaatcactgagatttgtttttatttgcagcttaatctgaaagcttctcaacgacctacagtgagtatatctattaattttactatacattttttggaaattttgtttctgaattctgattatgattgcttttaatttattattaaataaaccactttttgtaggcattacatatcagcaaatgtgacaaccttaggataaacgggataacatcgattgatagtccaaaaaatcatatatcaatcaaaacatgtaatactgttgcaatatcaaatataaatctttttgcacctgagacaagtcccaatacagatgggattgatataagtgactcgactaatatcaacatatttgactctacaattcaaactg

SEQ ID NO: 180106 - DNA, 237 bp, Arabidopsis thaliana landsberg
gggcagcaacccgtttttggtgaccaaattcctccgggtgaatatcacccctactcccgggacaatgtaaccgtcactggatccagcttgaattctattggccagcagccacattttaatgaccaaatttctccggatcaatatggccgctacttgcaggaaaacttcgggtttttcgatgatgatggtgaagatgatgggagtttagcaagctttcaacaactatacaaggcttaa

SEQ ID NO: 180107 - DNA, 277 bp, Arabidopsis thaliana landsberg
cggctatgcttcagtgaccttcaaagagtggaaggagactccggcgaacctcctccctccgactagttccgcaacatccaaacataagcacacaaaaaccagtgatttacaaaaattagatctagaatccactgaaccaaaaccttctcgagccaaatctcttatcccccatgaagatctctcaccctgggcttcgttgctggcaggagtaatccctcttggatcggcagatgcgccaaggggagacgtcgtcggcgcaagacgactctcttcttag

SEQ ID NO: 180108 - DNA, 261 bp, Arabidopsis thaliana landsberg
gtacacctctactgtatgcgaactcgatcaacaggcaatcagaacctccttttcaatcacaacatcgaccgaataactcgcgaactcagagaaaggagaaacacagtcaaccttgtacctcagcaaccactcgatatggctgacgaacagaatcaacaaaatggccctgccaacattggtgctggagatgcaccacctgatcaccgtcagaggaaaggaattgcacctcctgctatccagaacaacaacttcgagatttag

SEQ ID NO: 180109 - DNA, 264 bp, Arabidopsis thaliana landsberg
ggatatatcagaacaatggctatcttatggtttcttgcaatggaggactcaaccaaatgcgagcagcggtaagttcagaactaatcctcttgctttcttaaagaaatctctttttatttctgaaagctgtgtgtttctattcatgtgacttttggactctgttttctttcttcagatatgtgatatggtcactattgcaagatacatgaatgtcacacttattgtcccagagcttgacaagacctcgttttggaatgatccaag

SEQ ID NO: 180110 - DNA, 333 bp, Arabidopsis thaliana landsberg
atggattttactcgcgatgacaactcaagtgatgaacgggaaaatgatgtagacgccaacaccaacaaccgtcacgagaagaagggttaccatcgccacactaatgaacaaattcataggcttgaaacgtaagatcttaatctaatctaattaatttatattactttttaaaaagttagcttcgtaattcgttgttaatattttttcgatttaaggtttttcaaggaatgtccacatccagacaattctcagcgacgtcaattgggtaaagaactgaatctgaaacacaaacaaatcaaattttggtttcaaaacaaaagaactcaagccagg

SEQ ID NO: 180111 - DNA, 44 bp, Arabidopsis thaliana landsberg
atgaagaaactcgcaagaaaaaaccggataatagagagcattag

SEQ ID NO: 180112 - DNA, 92 bp, Arabidopsis thaliana landsberg
acattaaaagtcaagagcccttgtttgagaaggttcgttctcatattcggaaagaagctaatcactatgttttggctctgtttttaccttaa

SEQ ID NO: 180113 - DNA, 282 bp, Arabidopsis thaliana landsberg
gatgattcgactgaggcaaaatcgttgttgagtgaccttgataattcagtgaacacagagccggagaatagtcaagggagtgcagctgatgaagacgaaatttcttcatcccttaggaagatggcagagggggtcaggctgagaaacaaaaccctcgagaataactttgagggtttctcaacttccattgatactctcatagcgacgttgatgcaaaacatgacagcagctagggctgatgtgttaaatatcgtgggtcataattcatccttggaagaacag

SEQ ID NO: 180114 - DNA, 414 bp, Arabidopsis thaliana landsberg
tgagctcgaattcaccatcgggaaaccccagatcggacatgagttcaccaatcggagtctgatcggagaaatgatcatcgaacggagggatcgagatggaatcaaaatcggacggaggagggtgggtggaattagggtccggagcaggtggaggaggctgctccttggtgattggttcagccattttgaaactgagtttagggttagggtttcgaatttggggatgaagaagaagaagaaggagagattcaaaaggaagaaaggggttatggaggaatgaggttagaacacgggagaaagacgacgaggggtttaaagacaaagaggaagaggaagaagaaggtgcttgcttccgtcttcgtctactgcgcgtgggtcttacgctccggaatcgcactcgctaacttacactag

SEQ ID NO: 180115 - DNA, 190 bp, Arabidopsis thaliana landsberg
atggtacagacaaaacatttctgcatgttacatcggactctcctgtgtccgaaacgcatcaaatttctgctatccatttctaaactcaagcggcacatcactcagatccacgcttttgtaatcagtactggcaatttacttaatggaagctctaatagaagagatctcatcgcttcatgtggacgaatcg

SEQ ID NO: 180116 - DNA, 305 bp, Arabidopsis thaliana landsberg
atggtgcactcgcattacacatttgaaatccgacaggcccgttcacatttattcttaattcgtcatcctcgtccaggatactttaagaagaggtaatttctaggtttttaatgtgttttttccactctgatttaaaatcctttcttctctcccaagcttccctttgctttcaatccccaggagctggaaggattgtaatgagttcgagcaagaaatctcaaaaatcgaatcatttccggaaataatatccagaattgatgaatatgttgcacaacttaaggaggaggtggcctatctaaagatag

SEQ ID NO: 180117 - DNA, 265 bp, Arabidopsis thaliana landsberg
aaccatcagagtgtgggagagtgaacgttggagacctgcttctatgtttccaagtaaggctgactttgatctaattatgaaggatggaacatttaacaaaagaaatttgaacttaaaaatgaaagttggggtggttaatgagcaggaaagagaggatcaagcactctactgtgatggtcatgttttgaatatcaagagagggattcatgatcacgcgagatgtaactgcgtgtttcttgttcggtacgagcttgacaatacagag

SEQ ID NO: 180118 - DNA, 44 bp, Arabidopsis thaliana landsberg
gtccacttagagatgacgggcctacccgcgaccgatcggactga

SEQ ID NO: 180119 - DNA, 160 bp, Arabidopsis thaliana landsberg
ggaccttcaaaactttcagattcacctccctttttctgtaattgaaaacgaatcgagatcaatcgaaaaaatatataaaaccaaagatctacggatttggatcgatagagaaaacggaaaacccacatctctcgaacagtttgatcgaagaccttcatga

SEQ ID NO: 180120 - DNA, 101 bp, Arabidopsis thaliana landsberg
ggatgtgggcgatggcggcgcgcttgcggcggagctagccggcgaggaagacgagagcgacggcggcaccaaggactgcggagacgagagcgaggacgcga

SEQ ID NO: 180121 - DNA, 133 bp, Arabidopsis thaliana landsberg
ctgtttctcgcaatacatcttgctttgctgctcgaccacaacaaataatccattggcatttcttagggacgaattggagaagcatgaagattacttctcggatgtggccttgaatatactctctgtgtacaag

SEQ ID NO: 180122 - DNA, 185 bp, Arabidopsis thaliana landsberg
attctttaagaaatcctttcaaagatgacccgttaagaaatcctatcacaaatgaaaaagttaaagaaccaccgtgctatccatatggaaaacagtttaaatgcacaggttttgctggaactgtcgttgttgacaccgccgatcggtgttggtctttctgtgcagccgctaataaacgtccgtag

SEQ ID NO: 180123 - DNA, 1148 bp, Arabidopsis thaliana landsberg
  unsure (1)..(1148): unsure at all n locations
atgacgccactcgaccccctggtcgagtatcacttcgccacaccacctgaccacattcggtcgttcactctaccacgttactcgaccccctggtcgagtatcatcactcaccaccaacaccatcactcgaccggacactcgatcacatcttcatggtctactcaaatccacactcaaccagacaagttgagcacaaggaagagaagaggagaagacgaagtgtttggaagcagcctggacctccatcagatcacgaagcccatctcggcccattatcactctatgggccaggtgattaggttattggcccgtctactatcattttatttcgttttgtataaatagatgtcttagagttctgtcctgagacatctagtcgacattgagtttttgcttcagttttattttctgttttactctgctgcaccgcttttgcttctgcaacctgtaattcgagatttttccaagttatttagattccgcatttgatttcatctttcatcttgtttctctactctttatctctttacttatgcaatattatcatttatctgcgtttatgtctttgagcatgttgtctgagtagtgacttagaattcttaaggatgggatagagtagttgtggaatccgtagtctgtagaatggttaagttttgtaattgattgaatcccttcaggattagttgtgtttactgcttatttctttctgatcaactggaattcgatcccaagcattcccgcacccagaaggtgttcgattgaatgcttgatccactaattcctgagatattcgtctctatcccaagggattggccgtttagagcgtttattgactttatcagtctgttcttattgcctgcatagttagattccgttaatgggaattagtctgggctatcttnnnnnnnnnnnnnnnnnnacgggagtgaattgatctattgttgaacctgttgtctagggatagcttgattgcgcttgttaaccattcgaataggctaggataccactttattcgattaccccatccttaggaatttctcgtctatctgatttctctgttttatcgttatcgcttaatcgttctcattccttgtttctttgtttttgcaattactcgatcaacttactcgaccacacccagtgtctag

SEQ ID NO: 180124 - DNA, 297 bp, Arabidopsis thaliana landsberg
atggacttcgccccggtgcgcctgttcctggcccgggtagcgggcatggtcgacagcccgctgctcagccgcctggacttcgacgcggcctgcgcgcgctgggacgtgcaactggcaaggccccggcgcctggccggcctgtcggcggccgaacgcgagcgcagggtggtgttcgtgcaggacgccttcacccgctagttcgagacggcggtggccatcgactggatcgagctggcctcgcgcctgggctaccgggtgtacctggcgcccttcgccgccaacggcaagccgctgcac

SEQ ID NO: 180125 - DNA, 585 bp, Arabidopsis thaliana landsberg
tgatcgagactgctccaaatgatgcatcatcacaagtgcctcaagaagcagctactgctaattctagtgataccccaattcctgtggagaaggtttcaagtaaagcaaggcggttcagggctcgaaagaaagcgaaacaagaaaagtcacaacaagctccatgttctccttgtaatcaaaacttctctgtttttcctcagtttctcatcctgtgtttgttttgctaacaacatttattgtctttgtctccttttagcaagagggacttctgcggatgttgagagagctgaggtacctattgctgatgctgagataattttgaagcagatttcaactagaatgcgactgcttgagagtatcatagaacaagtacacaaactacttagtaatgtacttggaccacctccttctgctgcgaaagccctcaagaaacagagatcatggaaacaagtgagaggtgattatgaacaagcagagatgcttcatgatctgaatcaacaagtccaacaagaaatgccgagaatggacatcccggggaatcaagctagcgacaactccaacgaagaagatacactatatgattga

SEQ ID NO: 180126 - DNA, 157 bp, Arabidopsis thaliana landsberg
atggttaaccgcaacgtacacaaaaactccacacgcaagccccatagagatcgcgtaggtccagtcaccaccagctccttggctagtggcattgattccaatgccaatcccgacacctatgggactcgatatcccaaaggcgaaggagtagacgaca

SEQ ID NO: 180127 - DNA, 387 bp, Arabidopsis thaliana landsberg
gccgtcgaccattccatcgaactgcccaagaacccgcaaaccggactgccttcgggcaagcgccagcacctgggcatcaccctggtgaaggaaatcgacaagtcgtctcccaagctgtatcaggcgctgtgctcgggcgagcagctgaagtcggtgctgctggagttctaccgtatcagccccaagggtacggaagaaaagtactacaccatcaagctcgaaaaggcggtgatcgtggccacgcacctgtgggtgcccaactgcctgcagcccgacaatcgccagctgggccacatggaagacatcggcatgacctacgagaagatcgtatggacgtgggagccggacggcatcgaatcggaagattcgtggctggcgccgaagtaa

SEQ ID NO: 180128 - DNA, 690 bp, Arabidopsis thaliana landsberg
atggattccgagcatcggaggttgaaggccataactgcgaaagaaaagagcggtattgttagtaaggaatgaaaagaaccctagagaggaaatttatagggaggtctcttagctttcagagatgcgactccatttaaagccggagtgattcgcggaagcattcacgtcgctttggtcgccctgcattcaaagagtatctccaaaacgaatatttgatgaatcaaggaaatttggaaagtctccttaaataaaaacggccaaagcccaaaagaaaagtccatacaaaaataaaaaaaaagggtttcaagtttcggggaacatttaagaaaggggttcaggaacaggttccttcatcgccggttcggcgttcgagatggatgcctcgttcttaacatccacatcgggctcgttcttcacacgcttccaagggttgctgtcttcttcttcatcgtcaccctcttcgctgtcagacgggatcacttggatcagagcgtttacgagaccggggacttgacctcgagcacggaggtacatccgaagcatgtgcgggatcttcgccacacagtcgaagttcctccactcccattgaaagggatctctctccatagccctcaccttcctctcgataccggcaatttaggccttgagcgtttgcctcttgaggcccaaccgctgcctctcatcgcatag

SEQ ID NO: 180129 - DNA, 460 bp, Arabidopsis thaliana landsberg
ttttctaaactacttaagcctggctgaccagggtggccttgaatttagagatcggcaagcttctgccttctgccttgtgggattaaaggtgtgtaccaccaccactcatagacctaaaccactctttagttgggtgaggtcttgctctgaggtcaccacttctcttattccatttaatatcaggctttcctttaatggattcatctccttgaacacaggatttagctccattctatttcctggtgcccctttctccttgaactgtgtatattgtattttttttccttgctcagtttgtctcttttcattatagatcttattcataacagtgaacgctaataaccacacaacagtcgataccaggctgtattggactttcctctgccaagcaactaatccaaaacttccatttactcaggcagacttattagaccagccccgaaagcagccacattcttag

SEQ ID NO: 180130 - DNA, 415 bp, Arabidopsis thaliana landsberg
atgaagtcaaatctcacatggatgtttcaagttgacactaatttcacctatatcatgaggctccacttctgtgaattccagcttgctaaaatcaaccagaaagtattcaacattttcatcaacaacagaaccgcgcaaggggatacaaaccccgcagatatactcgggtggacaggtgggaaaggtatccctacttacaaagattacgcgatatatgttgatgctaataccggaggaggaggggaagagatatcgcttcaaatgacgccttcgacatttggtcaaccggaatattacgattcacagcttaatgggctagagattttcaagattgacacaatgaagaaccttgccggtccaaaccctaagccatcacctatgcaagctaatgaagatgttaaaaaggactttcaag

SEQ ID NO: 180131 - DNA, 771 bp, Arabidopsis thaliana landsberg
atggcgggagactcaggtcggaggaagatcaaacttttctgtccctcggtatcgaagattgtggagtgggttgcttggaacgacgagaaactagactttagagccatagccgcagcgtttgggctcgaaccatcaacggtgaagctcaatggtcacttcataagcagaggttttgatctagttgccacttgtgtgacgtggcagtctttgctcactttcttctctgctagaggcttgtctactggaaaacacgaagccgatgctctgctagttcacggcaagctctctaaactcggtactaaaagtgagtctcttccttgtttagttttctccagaaagaataagaaaaattcaattttaaacttttctgataattattttatctcatgtttccaggagcacgctcggatcctctggaggacttcgcctgcaatgatcttggtctaatcaaaacgaagaagttgaaagataagtgctcaggtatgagaatattttgtcacaccaattggttttataaatttgtgtcttgagtttgaatctgacttttcaatttcatcagttggagaatcactgatctctggatgcaacaagagaaagctgttgtctgaagattcacacccactcaagaaactaaaactcaacatggatgatagtttcggagggagcggatctaaaacgccattgaaatgcagtttcatgagtgataatggtctgaagaggacaagagaagatgatatgattgcttctgcatcttgtaagaagataagatga

SEQ ID NO: 180132 - DNA, 752 bp, Arabidopsis thaliana landsberg
atggtggaatcatctgctagtgaagcaatggcaaatctgtctctcgagttgttcagagcattcaagagcaagcagcacctacaaggtaaatttttcagctcttcatagtagtatagatgttcccaaggaacaatgcttagccacacttttgaattttcatcaggagaagtgagtttttcagctgcagcaactgatgaaaaggtatcttttgttctggaagttctaatggtgtttttctaatcaacagttcttaacactgctgcaattgtctgttcttactctggtggaaaatctcgtttgtattgtgaccaggataagagggatgctacctataaccaactggaacgatactctagaaagctagatgttatggctccatcaacaaataaccggcaagactctcccggttagtcctgtttgctgtttacccacatttagtaaattatctccaattccttcttcccctgaaaatctcatatggaaagaataatcttcaacatcaccgttttctccctcgttctttttgttttgtttcagccaaccaatctgcccgagaagctaacacaaaaaaccctgtgaaacgagtacctgctcaccgaaggtagtatatacatgtcatctcctctctaaacatcatatgcaacatccatattaatatcggtaattatttgtctgaaaactttgctatggatttttgcagaacccgtaaacggggtgctcttctgcaggattcagaagaagaggatggctga

SEQ ID NO: 180133 - DNA, 169 bp, Arabidopsis thaliana landsberg
atggctagaaataaaggtgggattcggtctgggccttcagaaatatcaaaacagagaaaacagttgaaggcaattatagagtctcttcttccggcatgcatagagcctgatttggaaactgctacgtctttcagagctcaagcgataattgcaaatcctcctgcatatg

SEQ ID NO: 180134 - DNA, 340 bp, Arabidopsis thaliana landsberg
atgcaccgggtcgatgttcttcttggcttaataaagattgttatcgccggagattctggaagagaaccttatatcgttgcacataaccagcttcttgctcatgccaaagtcgtccatctttaccggaaaaaatataaggtgagttctctggttgaaaaaaatataatctgacatctgattccaaataattttatgtaaccatatgcaatgtttcctcacaacagccaaaacaaagaggagagattggagttgtgatgattactagatggtttgttccatatgatagcactcaagccaacatagatgcgactgagaggaacaaagaattcttcttgggatg

SEQ ID NO: 180135 - DNA, 54 bp, Arabidopsis thaliana landsberg
ctgtggcagccagaaaacgacaccgttcttattcccgtcactcgtaattattag

SEQ ID NO: 180136 - DNA, 426 bp, Arabidopsis thaliana landsberg
gtaaaagttaatcttcatgaattttttactggatacacgtatggcccatatgatcgaatgggttggccactagttctgaaactgaaagattggcctccagctaaagtcttcaaagataacttgccacgtcatgctgaggagttcttatgtagtttgcctttgaagcattacactcatccggttaatggacctttgaatctcgctgtcaagcttccccaaaattgcttgaagccagacatgggaccaaagacgtacgttgcttctggatttgctcaagaattaggccgtggagattctgttactaagctccactgcgacatgtctgatgcggatagtacccatatgatttgtcttttctcgttttcatatccatttctttcttctaagtctgtccattcttattgtttttctgttgcacatctataa

SEQ ID NO: 180137 - DNA, 183 bp, Arabidopsis thaliana landsberg
atgggaaacggaaactcaagggaggctaaggaatcgagacggtcaaggctacgacataagctacaaaagtttcgcattcaccgtcgtcatcttcgtagttctcgaaactcggcaggaatggtgatacaacgaactgtttccgccgaggatttctccggcattgcgcttctcactctcattggc

SEQ ID NO: 180138 - DNA, 399 bp, Arabidopsis thaliana landsberg
ctcccaaaatattccaaagtttccgtattttcttcaaattctggagcttcataaactcttccatggccccaaggtatgaggcaaatgggcagcccccaaaactagagggctgcacaaaaagtcccacagctcagatttcgagtcactgattcaagtggtcttcttctattatattgtctagctaattctaacacatgctaattaatgaagttaacagggtttccttcaggtcgtgatctgggagcaactgcattaggagttcgtccaagcatgctagccatctacgtataaatagagtattctagaaggccctctatagaactctctcgtactagcctaatcattacttcaaataccgacggaaatttcgagctcaaaaattcgtagaagattgtccag

SEQ ID NO: 180139 - DNA, 270 bp, Arabidopsis thaliana landsberg
tctacggaagggatgagatcttctaagttttgtctgcatccagctggagacactccatcttcatgccggttatttgatgccattgtcagtcactgcattccggtcatcataagcgacaaaatcgagctgccctttgaagatgaaatagactactcggaattctcactgtttttctcaataaaagagtcgcttgaaccgggctacatcctcaacaacctccgacaatttcccaaggagaaatggctggaaatgtggaaacgactgatgaac

SEQ ID NO: 180140 - DNA, 403 bp, Arabidopsis thaliana landsberg
cgtggggcttgcgcggctagactacacgttctacgacaatctgctgacaacggccacgggccggcccgccgaccccgacattgtcatcgtggccatcgacgatgccagcataaagcagcttggctactggccctggcgccgacagacccatgcggcgctgctcgggcgcctgcgatcggccaaagccgttggcctggacattgcctttaccgaccgcaacccggcctatcccggcgacgaccaaaaactggcccgggccatcacccggcagggccacgttgtcctgcccttgctcattggaccgaacaaccgagtaatacggcccattgcaccactggacaccgctgcgcgcgggctgggctatatcaacaccccccccgacagtgacggcgtcatccgctct

SEQ ID NO: 180141 - DNA, 749 bp, Arabidopsis thaliana landsberg
gcgaggagataccgaatttgtgatagagaaagaaccagaagctgtatgtgatgatatcgaaagcaacaaagtagatgcaaccaaggagtcggaagtttccgacatttttgaaagacgagaaaaagctgctttaaaaaggagatatgaaattaaagtatgctctcataatgatacttgtattgtatggttgtgttaaggaaaatggtattacaaattaacttaagaatttaaattgcaggccaaaaaagttgccgctctactgagccatcctggagctagaggaaaagctacgacgaggttgcaaaatcggtacttaaaaggaagtatgagtggtgcgaaggaacctaatgttcactcggagacagtagttgcgttgaaggctaagaatgtaggtaatgaaatgagcccttgtaaggataactattcgaatggagagaaaggtggtttcgaggtgaaatctgaaatctacactaacaattatatattctcaattcaatcttcaagtatcctttatcacccttttgtaaatgcaggttgcgtctgacccaaaggaacttaaagaaagaggtctccagaggaagaaagctgttcctgacagacttaatagcattcataagcttaattcaactcctgcttctgctcataactctaatccaaatcttgaggagctacagacgtctcttctttctaaagcaacatcactatccgaaactgcattgaaagttcttctttgcaaacgagataaactg

SEQ ID NO: 180142 - DNA, 46 bp, Arabidopsis thaliana landsberg
atgtacggcctcacatgccgtcttgtaactggagataatcaaaaag

SEQ ID NO: 180143 - DNA, 1015 bp, Arabidopsis thaliana landsberg
acactatctctgcaacctgatcatcctgagaatggcgccatttccttcttatggagttggtcatactggagtacgtttctactcacctggtatgaactggtcaagcttttcagtgctttttacctgacacgtcttcccccatattttcagaatattgtgtctgtcttttgatcaaatccaatattaggtggtgaaaccagattacttttgaaaatattacctagttaacatgacaggacgtgtccagtgtaggtcaaataagttcatctacatggttgttatctttaaggcgtaaattttgttttgtttggcagtatttaaaatgcactcacacaatccatctacattgtttttgtagcttatagatgtacattacctcatatattaaactatgttacctctaaacagggctgtggtgccccttattcagggtttcgaagatgctggagactttaccgtgtctgagcgattgaagactagcgtgcatgtcaacttagttttctatctagtactgggattcattggtcttctcggtcttatccttctcatcatgatgcacagaaactggtaagttgtcccttatgatcggatatgcttatatattggctttgcatatcataccttgttattagctcttctattaaaaaatgcatgatccaactgctaagtattgcaactcaattgctcatctgacttgctgggtttagaaaatctgctgccaaatctttctcaattttttctcgggtggaagttacattcgttcctggactatttgactgagacattcttgtacgctaacaggacaggaagcattttgggttatgctatggcatgctcaaatacttttgggctggtcactggtgcatttctccttggctttggcttgagcgaaatacctaagaccctctggaagaatgcagactggaccacacgccaaaaagttctctcgcacaaaattgctaaaattgctgtgaaacttgataatgcccatcaagaactttcaaatgcgattgta

SEQ ID NO: 180144 - DNA, 52 bp, Arabidopsis thaliana landsberg
atggcgagaatcgtacctgaagtctttgctacaagtcgcagagaaagaaaaa

SEQ ID NO: 180145 - DNA, 1880 bp, Arabidopsis thaliana landsberg
gaaactcttcaacatggaagacgattgcgaggagcttcaggttcccgtgggaactctaacctcgataggttttagcatttcaaacaacaatgatcgagtaagtgttgtccttatttattcttcttgatttgtttatgagtagatggagcaaatatttaatgtaatggtactttattataggataaaatgtctgtgctagaggttgaagcaccgaatcaggtgactgattctcggctaggattaccgaatccggattctgtctgcagaacctgtggcagcaaagatcgaaaagtttgcgaaggtatcataaagaatctggtttttgcaaatattgttccaatcttttagctcattttatgattagttccctgagtttgctacttttctctctgttttagggcatttcggggttataaacttcgcgtactcgataataaacccgtatttcctcaaggaggtagctgcgttgttaaacaaaatctgtccggggtgtaaatacattcgaaaaaagcagtttcaggttcacgagtctttccaaatcctttgttggtttgtgtgttttggaactacatatactaatgtcatttttgcttgatatagattaccgaagaccagcctgagagatgtagatactgcactgtaagaatatatgattgcaactaattttctcagtttaaaactttgttccaacactaattttcggtttttgttgttgttgtatatcagtccaatactggttatcctctaatgaagtttagggtaactactaaagaagtcttcaggcgatccggaatcattgttgaagtaaacgaagagagtctgatgaaactcaagaaacggggagtgttaacattgcctcctgactattggagttttttgccacaagactctaatatcgacgagagctgtttgaaaccaacaaggcgaataataacgcatgcacaggtatagaagagtgaaatgtaccatctccatgacttcttactatatacagttttctgaaaatttcaccttttttgcaggtttatgctctgttattagggattgatcagaggctcatcaagaaggatatccctatgttcaactctcttggtctgacatcttttcctgttacaccaaatggttaccgtgtaaccgaaatagttcatcagttcaacggagctcgactaatatttgtaagctaaaaacgcttgtttatataatttgttatcatatactatggtatttctcttatcttttcgagtttctgtcacatttattgaaggatgaacggactcggatctacaagaaactagtcggctttgagggaaacacacttgaattgagttctcgtgtgatggaatgcatgcaatattccagagtaagcagtagtttctgatagatttaaactcttctttctgttcatttgtgaaggttagtagtaattcttgttttttgcacagctcttttcggaaactgtgtcttcgagcaaagattccgcaaatccgtaccagaagaagtctgatacaccaaaactttgcggtctaaggttcatgaaagacgtgctgctcggtaaaagaagtgatcatacattccggacagtagttgttggtgatccgtccttgaagctcaacgagattggcatacccgagggtatcgcaaaaaggcttcaagtatcagagcatctcaaccagtgcaataaagaaaggcttgtcacttcctttgtccccacactgttggacaataaagagatgcatgtgagaagaggagatagattggtggctattcaagtcaatgacctccaaaccggagacaaaatattccggagtttaatggatggagacactgtgctgatgaacagaccgccttcgattcatcagcattcgcttattgcaatgaca

SEQ ID NO: 180146 - DNA, 738 bp, Arabidopsis thaliana landsberg
atggcggctgccgccggtaaaggcagcgaactcgaccacatcaagaatgaatccgttgatctggtatatatatttacgtcttcttagttttctattatctatatgttttaaaaaatctttggccctactaattttaaattttctgttacataaaagatacatatatgtatagtacgtaactagtaactacctttgatctaatcagttaatatatttgtcccatgcgatttactcatgtttccattagaaatgattagtcaaaattatataaatgatgggtctaggtacgaatacccatggaggaagtgttcgaggagctgaaatgtacaaaacaaggtcttacggcaaatgaagcttctcaccgtcttgacgtttttggtcctaacaagcttgaagagaagaaggtttcttctttatttttgtcttttttttctttgtaaacaatcattgatgaaactcctttaatgttgtgattggggtaacacgcaggaaagcaagttacttaagtttttagggttcatgtggaacccattgtcgtgggtgatggaggtggctgcactaatggcaatcgctttggccaacggaggaggacggccaccggattggcaagactttgtggggatagtgtgtttactattaatcaactcaaccattagtttcattgaggaaaataacgccggtaatgctgcagccgctctcatggccggtctagcccctaagacaaaggttaaccaatag

SEQ ID NO: 180147 - DNA, 1913 bp, Arabidopsis thaliana landsberg
atgcaagggaaccacgacggttcgtggtctctacacccctccaccaacaatggaagcggaagaggcaacggaaacatcaacatcaacaccgttcccggtggaggataccttcctcaggcaaatcctgtctttcccaatttcaatcaacccattagatacccaattcctcagtttccggcgaatttttaccgccctaatttccctgacttctctctcggaaaccctaatttccaaccccatcaaaatctcaacttccttcatcaacaaatccctcaccaatatggctccgctgctaatcacttccttcaaaaccataaccaaaacagcttctctttcacacctcaatctatacctaataatgatatcagtatctgtcagaatcacggagctttcgaaaactcttcattgaaacgaagacgacaagaggaggttgtacaagtgactgatgtggttccaaaatctaattttgcttccggtgagagtgctaataactccttcagtgtatctctaccgatccctatagcaactgatgatagtggtgtgtctcgagtccatggagagaagtcatctggaaaacccaagcgcaaagttgaagtcttgcggattgataaggctgttaacaagacgcgtaaatcatttgttgctgctggagagagtgtttcttcgactagagtgtcgagagctgttttagaagagcttcaagctgattcttggcgttccttgggtgtgcaaatgcaagatgttccttctcttcgtcaacttatggccattgaaggcaaggtaagcgttgaaattatgtctatattctgcagagcttctatgttcactgtcaatagcgtatagatgtatcttttgatgtcttgtagatcaatgcatttattcactgcttcgttggggctagaagaattgtgaccctgcatgatttggaagtggcaatatgccggaacgagtttgttgattctttcgatgatctggaattgggacctttgctgcagcatccactggttttgctgtactttccatcgatatccagttctactggaccagttaagatcactagtgaggagataatatcatttcttgatagctatctgcacacttatatgacagaagatgttaagctcgatgaatttctgaattttgttgcaagtcaaaagtcagttacaagcaaggaaaagcttggtgtgcgtattcagagcttgcggtatgatattgttcttttttggattatctaaacttggttatgagttaagtaattttgatattacagtaaggttggtattaatgttggatctggttgctcttagtatgaactgcattagctgattttatgtgatttcatgcatttttataggatgtatgtatctttcattctagacgcgaagagacaagaaggtgaaacactgaaagtcttactgactgagctgcatcagaagtatcacatcccctcatcaaagaaacaacagcgagataaatctctaactgtctctgagcgtgctgactcatttgctttacatcataaggattattgtggcaagcatataagatttgattcttcaagctcagatgaaaatgataatgtttatgaggttagaaatcttaatagttctgaccatatcaatagttgtccatatccatctgttgcggaagagatgaagcgtcttgggggctccaataagaaaaggaagggtgaaagacgtaatcatgaaaaatctgattcctccaagctgcttagaaaatccccctctaaattacaaggacatgcgaaacaagagatacctaaattggctgatgattctgaagctaagaaggttttcagtgtcgatgaggctgattttacactttctgaaggagatttaagattgttcatttcaacttggaaggacacatgtaaagagctaagcatttcaacg

SEQ ID NO: 180148 - DNA, 78 bp, Arabidopsis thaliana landsberg
atggaccagaccagcaaacgcatgctgcgtcaaatcaagccgcaggaaacaatccagggggagcccagacgcaaacgc

SEQ ID NO: 180149 - DNA, 719 bp, Arabidopsis thaliana landsberg
atggcagacgatagagagaactcagagaagaaacgaagattcgtaagaaaagtaaattagcaatacatattatgagtaagagagtaagagagaaagagaggagaaacttggtcttcctttcctcgaagacttggtctcccacttgatagaagacttactaaacaaatatttttttaagtgactaaaatcaaaccacctaacaagacaattgagacgaactaaactaatatgatacagaggtttactatacaccggtattttaaaagattgattttgtggttgtcaactgtcactgaattatgactaagtcattgtaaaagacagaaataagattataatttatcataatttcgaggcaaatagacaaaaacttcaagtttgtttcctctacaaaagatattttgaagactcaaactatctaatttgctaaaatactctttttagttttccaaagttgagtggtgtggacagtggagtgaagattgttaaatatatttttcttatttacttttacaattgtaatattagtttagagtttggcttaatgcgtcagcaaccattgtgggttgctgtttaaggagcatttggtttctaagggtttcatgtactggatggaagaagtagtgcttgagagcatcctctgcgctgattcgtcgcctcgggttaactatcaaacatctatcaacgagttcaagaagcggccgtggaattgcgtctag

SEQ ID NO: 180150 - DNA, 393 bp, Arabidopsis thaliana landsberg
  unsure (1)..(393): unsure at all n locations
atgatgctccaccctgcggaagnnnnnnnnnnnnnnnnnnnnnnnnnnnnnnnnnagcgctccaacaacatcctggtcttcgatcccgccaaggactacgccgtcgtcaaggacatcaagacctcgcgccgtccgcgcgacatgcacttcaaccacgaccacacgctgctctacgtcgcctgcggcgaggacgacgtcatcgacatcatcgacgtcgcaacgctcgaagtcaccgaccacatcccgacggcccgcagccccgaaatgttcgtcttcaacaaggacgagaccgagctctacgtctccaacgaagagaactcgacggtccagatcatcagcatcaaggacaagatcatcgacaacgagatcccgaccggcgccgagccggaaggc

SEQ ID NO: 180151 - DNA, 143 bp, Arabidopsis thaliana landsberg
actctcacggtagtggatgggtctggcacaacgtcacagtgatcctccacacggaagctatagcttcatctgcatttgacgtctccaactcatcgaccaatgacattccctcgtgttgttgcagccgccatttgattatttga

SEQ ID NO: 180152 - DNA, 1178 bp, Arabidopsis thaliana landsberg
atgaaggacgtgttgcttgcaatatcaaatgaactccttgacgatgctactgacctgagtcctgatcgtgttggacagctccgtcaagagaggtctatatcccaatcagttttgttcccgttttctttgctgttaaagttggctcttttctataagagtaataatttggcttccttccggaggctagtggtatattattttagcaaaatttattgggaataatatagtgaaaattgattaggcttaaagaaataatagacaatgcatatgtttcttgagtttgagtatttgagggtatcacaactgtgagtatgtcttgacttttggtcagtttctaatgtaccacaactgtctgttgttgctaggttacggctgaagaaacaaattcagcagctcgagaaccatatccgagataaagaaagccaaaaatctcagtttttgtcatcgacagctactcgtattttccagtatgaaacacctaaatcaacaaattataaaatggatcaaccacaaactgattttcgagcacatgtaagtgaccaaggcagatatgcctgtgatagctggaacacgccaagagattcttccttttctgtagatagatatggtctttcatctgctcctgtagagagggaacaatatgttccaaagattattgacgtaacctacactgaaggttcaaacgacaaaaaatggagcagtcgtgaatttccctggacaaggaaattggaggtgatttgctgagtttctcttttctttgttcatttacgttcaatgtgctcatgtgtttccttgcaaagttcaggttaataacaaaaaagtgtttggaaatcattcgtttcgacctaaccagagagaaattatcaatgcaacaatgagtggctctgatgtttttgttttgatgccaactggaggagggaagagtttgacatatcaggtcactagacttaaacctgtacattataatttcactttgattcttcaatctaattcttgtttttcactgagatatttgtataatcctacatcaaaaatgatgaaagtttcaagttattttctcgaaactgttttataacatctttctttggcagctccccgctctgatctgtggaggaataacattagtaatttctccacttgtgtctcttattcaagaccagataatgaacctattgcag

SEQ ID NO: 180153 - DNA, 156 bp, Arabidopsis thaliana landsberg
atggtaaagatcaaggtcggggatgacatcagggtgacaaggcaagagggaagctttccggtggaggaagtgaacgacgagctcttcatcggtcggaaaaaactaaatcccggtggtagattcattgctaacgatattgatctcactacttcacat

SEQ ID NO: 180154 - DNA, 150 bp, Arabidopsis thaliana landsberg
aagatgaacgaagaagacgatgacgacggcaaagttccgagtggcaaattcgttattacagttgcacaagaaaaggccaaaatcctaaaaggcttatttgtttccttttgggcccaactaacattattgggctccaaattacaatcttga

SEQ ID NO: 180155 - DNA, 1652 bp, Arabidopsis thaliana landsberg
atgtttggtcgagtgagagacgtgagggagagtgtgtatgcaaggtcgagtgaatggagaggaagagagatgatgtcggtggaaaaggatagggtgagatcgagtggtggagaagcagtcttgggatttcgttatctctaaaaacgcgtgggggaacaaaggtgagaggtggtgggccacgctctgtctgtttgtcctgaagcactgttctctgttgactaggaatgtctcagaaccttctgtaatcctctgtaaacttgataaactctctgtaagtctttgtagcttctgttggtcgagtataaatatgatttcaaaattttgagtttttaaaatcatcactaatactcgacccaactactcgatctcatggtctctgagtgcaacagaacttttttcaaattcttgaatttctgacatactcgatctcatgttgctctgtagagtaaaatttttaaatttttactctacctccacgctgcttctctgttcctgagaatcacaaacacagccaaaaacaaatcaaaaataacaagaaaataaaagttttatttatagaaacagtcttgggaattcctcccaagtgagcttgtttaaagtctctagcttgactcttcacactcattaagaagaaaatgggtgatagagaggatctgcatagtcctctctgatctcatcatcatattcagcatcctctcttgagagatgagtagcagaatactcaattcttctttcctcgaaataggcctctttctcttctggtggataatctatcttctcagaccatcttgaagtaatcttttttctcgggatagtgataaactcctggacgtggatgtatgctccaaggactcactttgttggttttgaattggaaatgatgtacttgatgatgaataatggattgatttgaaacaaagcggcggaaagacgataaaccgggatgatgacaagatcgagtggatgcagcggaatgataggggaacgaattgtacttccaagagtgatgaaagactcttagactactagcttgaatccaagttagatattacacactaagaagaaaacaagttgaaaagatattacacacttttcggatcaaacaagtaaaagagaaggtttttgattaaaatgtttgatgattgcaaatgagaaatacaatgagtttatataggagaggagggagaaggggaagaggtgagagaataaagacatgcaagagcatgcacaagtccacactcatgcaagctcatgcaaagagttttggaaataacaaaagcaataaatgcaaagtttgaatagaaaagagagaatgggccaaggcattgtgagtgggccttggaccacgaattgggctgataaagggaggattgaaagtgttacttagggctcattaaaaaccttgtcaagaaaacccattgggacaaaacttgacaagggaaaaagagtacaaatgagacacatgcccatttgatgatcatgtatcaaaaccaatgaggttaagataacatcttttacatactctttctcactacaagaaaacaggcgacttgcgacggaagatttcgtcggtaatccctcgcaaatcgttaatcgcgagagatttgcgaggaacaccagttcctcgcaaaacgcgtctcgcaaatggttaa

SEQ ID NO: 180156 - DNA, 871 bp, Arabidopsis thaliana landsberg
atggcgacggctacgacgactgctacggcggcgtttagtggtgtagtcagtgtaggaacggagactcgaaggatttcttcgttttctcatcttcaacccttctgcggcttttccggcgaagcctagttccttcaaatctctcaaattaaagcagagcgcgaggctcacacggcggcttgatcatcggccgttcgttgtccgatgtgaagcttcttcttctaatggaagggtaaagtctgaaactttaggatttttaagtaatcacaaatctggaattgacactggaaggattttactgtactggattgctaatttgggtttgatgtttgtatagcttacacagcaagaattcacagaaatggcgtggcaatcgatagtttcgtcaccagatgttgcaaaagagaataagcaacagattgtggagacagagcatctaatgaaagctcttttggagcagaagaatggtttagctcgtaggattttctctaagatcggtgtggataacacaaaggttctagaagcaacagagaagttcattcaacgccaaccaaaggtaatgtaatgtctttaagggtttgatatttgttgtttctttgtttgtgaggctaatgaaaattaagtttgtgatttcaggtgtatggagatgctgctggttcgatgttggggcgtgatttggaagctctgttccagagagcaagacagtttaagaaagatttaaaggactcttatgtgtcagtggagcatttggttcttgcttttgctgatgataagcggtttgggaaacagttgtttaaggattttcagatatcagagaggagcttgaaatctgcaattgaatccattagagggaaacaatcagtcattgaccaag

SEQ ID NO: 180157 - DNA, 616 bp, Arabidopsis thaliana landsberg
atgaccgcaactgccactacaatgactcttcaggctgtcatgtcttcactagagataccgtcaaccaatcgtattcagaagtcacaactcagagacaattttgagttgtctgtctcattgagtggagctaataggtaagtgtcttgttaatatttttactcttttgctcgtcctcgagttgtaactgactgaaatctgaaaatataacagaatgaaagatctattgattttgatggagtctcctccatataaggagattcgaagcatcattgtgtactgcaaatttcaggtgagagtacttacttatcttcggctttttttcacgctctacaatatactttttatttatttcttactgtatcatgcatgatgctaacttaagcaactttgggctgtgtttgcgcagtatgagactgacatgataagcaagtatttacgcgataacaacatcaatgcaaaggttgtttccatattgaaatctccgacatacctgtatctatagctaattacactctaatcaagcttaacttgatctatccagggttatcacagtggtcttcctgcgaaggaccgtgttcgcatacaggagtcattttgttccaacaagattagagtg

SEQ ID NO: 180158 - DNA, 828 bp, Arabidopsis thaliana landsberg
gtttccgaaatgaattcgttcgcccgagtcgtccaaccgtaagagtccagcctctcgcccctggcctaaggcttttcaacccgtactgcggacgcgagttgtgtaagtaggacaagactaatatcagtcagtataaccatataaattttagaaatccaagtcttatacatatatatatatatatatatatatatatatatcatacgagaaatgcttaccaaaacgtatatagttttcggatcctttttgaaaaccatacataatatacttagtaagaatttacaaaaagccgtaaaacctacattggttcgtcctaagtcatgagcatcctctacaaggttggcaactatggtatcctgaaaagaataagtagcatcataagtaatatacaattacatagtgaaccccagatctagacagtgttatcctaatacccttccttaccccctaagcagcaaacaacacgtaacaataatacaacctaacaagcaagatataaaaaagataacacgcaacacacaacacaagcaaaatataatgcacaatgcaaaatgcatgcaaattcgaatttcttaatatgtagaggataactaatgcaagcatgcttctatcaacctaggtaaggccctctacgaatccatgatctcccaaggacatgcctccatactcttagacacaaagtctataagagacatagcattcctttatacttcatcgtcatgtagcgcccaatcggtagcgatccagccccgagccttcgtatgccataacggaacaaagttacacgcaacgcacaacatacggacgggatcctcatggttcggctaa

SEQ ID NO: 180159 - DNA, 534 bp, Arabidopsis thaliana landsberg
aagacgatgaaccctttaagagacgtcatgaagatcgaatggaatctgctgttgagatcgctagacgggtacaataacccatatatatgaattgattcatgtgttactcgtacttgtttgaatatgtttggagcaagtttgatacttttggatgatgatatcgcaaattcgttatctttttggcgttataggagcgtgaagaacgaaagaaacgaatgagatttgataggccaacacgagtctctcagccggcttttcgtgatcagtatagagatactagagtttatgatcaaagcaagcttcctcagggtaaattatatactttgccacttcctcaaaagatcatgttaggttcattggtatgtggtttttttcttaacaggttggctagattgtcctggttttggtctggagataggatgtattattccttctaaggttccacttagtgaatcttacaacgaacatgttcctcctggtaaaagatacactttcaaacaggtggttcgtaaccagagaattaatggaagaaga

SEQ ID NO: 180160 - DNA, 128 bp, Arabidopsis thaliana landsberg
atttcttggaacttctggtcagaacatcgatgaccttggcaagtactcagaggctaagagcaagcttgattttgtggaaagaacgctgaggtggagacatcttgccccaactgcacctaatacactcg

SEQ ID NO: 180161 - DNA, 1895 bp, Arabidopsis thaliana landsberg
  unsure (1)..(1895): unsure at all n locations
atggttgattcaacagtttcaacagaggatggaccaatggatgtgcctcccaataaaccagaggcatcgaacctagagactgaaactgatgaaactcaacaaatgcacagcccgaagtcaaataatgtggttgatgatctgtctagcggcagtgatgattcttctgatggcgaagagcaaactgcaacagatgaagttgattttaaggtttccacatttatttcnnnnnnnnnnnnnnnnnnnnnnnnnnnnnnnnnnnnnnngttgcttaagttttacaaaagcaatccaaaacagacgaatcaccacgtaataagcattttacgaaggattacagaagacttggagctcgctcccatgttgtatcaggttagggtttaaataatctcccagattgatacatttatttcttattgttttgcatcttccttaatacataattgggttaattttgcagctgtcacttctaataacattccataagatccttgatgagcagaaagtttgtccctgcaaagactatgagaacatagttaccttcctgacagatctggttagaaatatgttgaagaaaatgaagtcacagcctcttctctttgtggaaattctcttctcaaagactcgcaaagaatgccattacataaatgctgaatatatgttgcatgagcttggccatctaagaaaacaaatgggtaatcaagaaaagttctcaggaactgaggaatttggtacatcatcagacaaaggatgggctcacagaagcttagcagatgctctaggtgatgatgaagctgatgtcgtaatttcttatgatcaaggatttcaaaagtaagaaatggtttcacttgatagaatagaatctcccctttatgatacttgtgtttataccttatgtcagctggagatacttttcatttttatttgctaacgcttgtggctttttcatgctgcagtgaggatgatgacatggtggaagataaatctgcaggaccatctaaaagaaagcgaagacttgttcttgatggcgatatggatataaaaattaaagacctatatgacaggtatgttttgtttgatgcgcgaagtagttggtgaaagaaatataacacaattcattctctataaagtgcactatttcttaatttagtagtataagcattgattttatgagcattggaagttgtaaactccagattgctgcatatgagctatgatatgctatagtttggttcaattggttgcttataatgaatatttttttgtaggtacaaagatgataaaaattgcagccggcttattgctgaaaatttggttcctgatggtggaatttctgctgcacaagtaaccaacaagcttaaacagctaggtctagaaacaaggaaaaggcttcggcgtggagatactgatcacctggatgcaacatcgttagcacaaccttcgtgagtgtctcttagagtttacagaatttccaaacttcactcatttagttttggattttaacggctctcctctactgcttttgaaacagaaacaccagaaagagagtgagctcctttagcaaagaacaagaaacgcttataaaggaattatacaagaagtgagtgtcaaatttcatctccttttcttctgtgcacgagttttattgactccattgtttttctactgttgtgtatgtgcaggttcaaggacgaaaagcgctgttgttatttgattgccagtgaattgggctctgaaaatacatatactactgcccaggtttcacgtaaattaaagcaacttggtctccgtcttccccgtggtaagaagtctgaagctggcatgatgctgaaagatgaccatgatgattcttcagcagatgaatccgaggatgaaacattactagccttcaagaacag

SEQ ID NO: 180162 - DNA, 285 bp, Arabidopsis thaliana landsberg
atgctggtgaatgaaaatggaggcggcttttttaatttaatatacgcggcaatcaagagcattgcattagcaaacaagaaccgggtgatcataaagacggcttctggtctataccatgagaaagataccggcgacgtaagccgaccatacgttacattgatgggcaaacctgaggcggaaaccaacttgacttatgccggaacagccgctaaataccgcaccgtggagagtgccacgcttatcgactgggccacaaattttttggcagccaacctaaacattata

SEQ ID NO: 180163 - DNA, 78 bp, Arabidopsis thaliana landsberg
gcatttgaagcagcatcaaaagttgtgaaggatgaagaagcaacaaaacagagtctttgcgaagatttaaacagtctg

SEQ ID NO: 180164 - DNA, 483 bp, Arabidopsis thaliana landsberg
atgtatcatttatacaaagctacaaagagcagtcttagaagcatcacaccgaaagagatcaaacttttaaagtacttactcaacataacagaccccgaagaacgattctctgccctagctacagcattctctcctggtgatgaccacgaagctaaggaccctaaagcattatacacgtaagtaacataaagatgcacactttagtgtttcatctttaaccacaaccatttattctaaccaagctgatgacacaggacgccaaaggagctgcataagtggataaagataatgcttgatgcttaccatctcaacaaagaagaaacagacattaaagaagctaaacagatgagccaacctatcgttattcagcggcttttcattctcaaggacactatcgaagacgagtatttagacaagaaaacaatcgtggctgatgaaactccaaagaagaagaagaagatacgactattgaagattttttga

SEQ ID NO: 180165 - DNA, 117 bp, Arabidopsis thaliana landsberg
  unsure (1)..(117): unsure at all n locations
gttggaccaattgctgaagctgatgaaccacatgtgacatccttggacgcattgatggcacattctgagtacaagaataaaccaagtcaacaactttctgaaccacacatgcttncg

SEQ ID NO: 180166 - DNA, 45 bp, Arabidopsis thaliana landsberg
agcatggcatatgaagaagaagaagaagaatatgatgaagattga

SEQ ID NO: 180167 - DNA, 1262 bp, Arabidopsis thaliana landsberg
atgggaatgggaaaaacaatacaagccatctctcttgttcttgccagacgagaagttgacagggcacagcttggggaagctgcgggttgtactctggttctttgtcctcttgttgctgtttctcagtggttaaatgagattgctcggtttacatccccgggaagcactaaggtccttgtataccatggggcaaagagagcgaagaatattaaagagtttatgaactacgactttgctttgacaacatattccactgttgagagtgaatataggagaaacataatgccgtcgaaggtgcaatgtgcatattgcagcaagtcattttacccgaagaagcttgtgatccacctgcgatatttttgtggaccttcggctgtcaaaacggcaaacaatctaagcagaaaagaaagaagacttcagattcatcctcacagcaaggcaaggaggctgatgcaggagaggataagaaattaaagaaatctaagaagaagaccaaacaaacagtagaaaaagatcagttaggttcagatgacaaagagaagtctcttttgcactctgttaagtggaatcggatcatcttggatgaggtcagaaccaaaacttactgtctgttgttggtgttaacctttttcacaattttcgttgaaattcaagcatgtgagatacatataggaaaccatagtaaacttattgtcaccaaccatagaataactttaagggcgtcttttctttcatattgttttgggagactagatttatggatctgacattgattactagagctcaatttacatttcttcataccaggctcattacatcaaagaaagacgtagcaatactgcaagagctgtttttgctttggaggctacctatagatgggctttgagtggcactcctctccaaaatcgtgttggagagctttactcactggtttgttaacttttcctgaattttgtatatagcacttgaacattactatcgacatggctgatgtgcatatttttttttccccagatccgcttcttgcaaattcgcccatactcgtattacttttgcaaggattgtgactgtagaattcttgattacgtgtaaatttttatcacacttaattttccagtcatttttcgtatttctcatagttttgtttaatagttaataacaatttatgcggttctgttttctctggtggtgtttgcagtgctcatcaaagctgccctcactgtcctcataatgcagttcgacatttctgttggtggaacaag

SEQ ID NO: 180168 - DNA, 408 bp, Arabidopsis thaliana landsberg
atggatgatttcctaaggctagctcggtcaaacacagaacggaatttagatacttgtggagtacttgctggttctctggtgagtagatggaacctttgcatttataatttttgattccaatatcatgatcagctcgccattacttatattctgtctatttgccatgtttacagaaaaacagggtttttcatatcactactctcataatcccaaagcaggagtctacctcagattctgtatgttctttagttttcttaaccatttacatcaatgacaatctttttaattctccctggtatgcttctcacacttagttcatttgttaatgtacagtgccaaacactaaacgaagaagaaatattcgaagtacaggacagactctctctatttcccttgggttggattcat

SEQ ID NO: 180169 - DNA, 164 bp, Arabidopsis thaliana landsberg
atgcaggccgagaaattcgtcccagtatcatgtgttgtgggagagcatgtccatcggatgtcgtacatgcataaccatccatcgtggatccaaggttcaggagaaaactacatcgtagaatcgttgtttgtggaagctattcatcgtaactgcatatattgcag

SEQ ID NO: 180170 - DNA, 255 bp, Arabidopsis thaliana landsberg
  unsure (1)..(255): unsure at all n locations
atggcgcccgcgttcgcctcgccaggtacgccgctggaccggctccgcgcggtagcccgtgcgtacgttgcctttgcgcaagnnnnnnnnnnnnnnnnnnnnnnnnnnnnnnnnnnnnnngatgagcccgacgcgctggaacgtatcgcagtgaaggtggacgagcaggtcggccaacttcgtgacgtcttggctgctggggtggctgatggaaccttcgattcggcgttggacccttcgtcgcggcgacgcgtt

SEQ ID NO: 180171 - DNA, 37 bp, Arabidopsis thaliana landsberg
atgaatgggttggagaaacagattggattcgatgcat

SEQ ID NO: 180172 - DNA, 484 bp, Arabidopsis thaliana landsberg
tctattgataatgtcgtgggcttgtgtttgatgcacaatgctcctacgcagtcattgctaagcgtcttgaatggaattctagatgaaagtatcgaaagaaagaatggtgaaatccctcaggtacttgaatgccaacaattattaagatcatcacgtctataagataccttcctttgtgcttttacttcttgggaaatgttttgacaaaagctacaatgaacagcgtgtggcatgcctgttaagaaaagtcgtgcaggagattgagcggcgtatatcaactcaagctgaacatctaagaacggtatgattttgtttacttaggaaaaatgcttcctagcaatgttcaagttctggtttttgtgaataatttcgtttttttgtttatgtgcagcaaaacaatattttcaaaactcgcgaggaaaaataccagtcaaggatcaatgtccttgaagccttagcatcaggaactggtgtagaacacgag

SEQ ID NO: 180173 - DNA, 1931 bp, Arabidopsis thaliana landsberg
  unsure (1)..(1931): unsure at all n locations
atgaaagcccattacatcgaatttgggctttatgttaattcttctattaaaacatattgggcttttagtaaattttacgtcgacgttggggatagtattgctcttgtgaccaaacacttggaaactcgaacaagcagtttatgccccaatcttcttcccgcgtctttcacacacttcaatctctccgccggcgaaatcattgcttcttccctcaggcctcagtcaattcagatgccttttccacgtctcctcgccgggttttaacctcattagattcgtcaatcactcaattttgtcttcttcttcatgtgagcttcgatttcatgtgattttcaatcgaatttatagcttttaagatctctttttagggttttgattttgcgaagtaaatcctgaatgtacgacctgattttgttgtaattgagtggatattgaagctgggaagaagcttagattgttgttttgagctctgaagaagtgaaattatgagcagcagctctagagagggatctccagattggcttcgctcttacgaggttccagattcaatctgatttctgtttctattttatatatttgtttgaaatatatagaaattaacaattgaaagtggatggttttgttacgcaggcacccatgactacttcattgttgtcgctatcatcttcagatgatgatagtccttatagggaatctgaagtcatttcgtctcttcctttgcctgatgatgacggtgacgacattgtggttcttgagacagaatctgtggagttactgactaggaagaattccgaaacgaaggttgtgacgaagcaagtgagtatcgagcaggtgttttctagaaagaagaaagcagatgctagtctcaaccttgaaggtatggaagattttctgtgttgttttgctttgagattagaggaacaaacatttatgggtcatttccttcttggagggcgagggagagaatatcaatttatgaatttaggggagtattgttcaactgttgagctcttaaaagcatgtatttgactcgggcagattcgtgtgcagggaaggagaatggaaacaacgttgactgtgaaatactctctagcaagcataaggatgctcaagtaagaaccttttggacactgtctccatcgtactccttagtgtttctgttgcctctacttgctttagtgggtcgatattgtgattcaagtgtttcttgtnnnnnnnnnnnnnnnnnnnnnnnggattgtattgtcaagatagtggtatactagttataaactaactctaggacagctttggacttctatgagatatgatgaaattagttggtgatctatcgccagcactcttatctgtcttagttttttatttcaaggttttgtgtctgcatggatcagtttaatttatggaatataatatcgcaggggtgtaaaactactaactcttaatttggtatagtgtcgagaagatatgttaacaatatttaaatgtatcattagcagggaggagctgattctgtatggtctgtctcatctgattctgagccatcctctcctataaagcaggaagtgactgtgtcaactgaaaaggatgcggattttgttcttgaagctacagaggaagaaccagcagttaagacagttcgaaaggaaaaatctccaaaaacaaagtcaaaaagcagtcgcaagacacccaaggaaggaaatagtgcacaggaaattttaaaaactgaaggtaagaattgtatcaatgtttttttttttttaatttaggatttttcttaagtaatgtaacggttcctctatcatgcagataaagatacagataccactatagccgagcaagtaacaccggaaaaatctccaaaaacaaagtcaaaaagcagtcgcaagacacccaaggaagaaaattgtgcacaagaaattttaaaaacttga

SEQ ID NO: 180174 - DNA, 1190 bp, Arabidopsis thaliana landsberg
atgtattttcgccgggtgaagtggcaatatatggtgctagatgaggcccaagcaatcaagagttcctccaggttcgtacttttctcttgagtctgttgaatttccagtgtttgatggtgccatgcaagagaatgttactttttgtaatttccttgtagatcacttgaaatgctgaattctcatgcaagtcccatttcctttttttgacagtataagatggaaaacccttcttagttttaactgtcggaaccgattgcttctgactggtactccaattcagaacaacatggcagagttatgggccctgctgcatttcatcatgccaatgttgtttgacaaccatgatcaatttaatgaatggttctcaaaagggttagtactatttttctgctttaattgccatgtaaaagtatgtaatcaataatctaggaagttgtttctgatacatgatccatattgattaacagaattgagaatcatgctgaacacggaggcactttaaatgagcaccagcttaacagactggtgagatttcattttctgattgcagcattattgtggcgactcttcaagttcttttagtttctgtctgcttctgtcttttagtttgctagcctccttaattagggtctcgcattactttccattttcactgcatgattccgtcttgagacttttagaaaacgacattgatttttatataactacattcatgtatatgcatatgtcatggacgagaatctcccaagttaatcaacaatggtcactcctagtcctggggttctcgtttttgttttgtttataacagccaatcttctgtcctttcctttgctgttagaaggacttgttaattccatttagccatttctccaggaactcttcaaatttctactgcatatgcatcttcttacgagttaaagttgtttagtcactcacattttgtttcttttctcaaacagcatgcgatcttgaaaccgttcatgcttcgacgggtaaaaaaggatgtggtttctgagctaactacaaagacggaagttacagtacactgcaagctcagttctcgacaacaagctttttatcaggctattaagaacaaaatttctctggctgagttgtttgatagcaaccgcggacaatttactgataagaaagtattgaatttaatgaatattgtcattcaactaaggaag

SEQ ID NO: 180175 - DNA, 1212 bp, Arabidopsis thaliana landsberg
gaaactcgaaaatcgctttatctctccaaattggggttttttgctacttatggtataagtttcgtcttgctcgatggaacactttgcctgggctgtttagggtaatttccgggtcggatcctcagcggatacccaacccccaatcacccgagccccctgccgtcttctttttataaatcaaccattaaaaccgacaaaaagattttcaaaattttaaatctatagttttatgggtgaatttgcggtataatcaaagtctaaatgtaaaattaaaaatataacattttattgaaaaatattaagaaagtaattagattagtgaaaagataaaattgtacagtgaaagacacgcacaatacaaaaagaaagaggttttgaatgttttatacattttgtaagagtttttggtttttgttttttaaaaacttatttttataccaatcaagattttaaaattttggtttttttacaatttagtaaatttattttattgtagttttccattcatattatagttttttagttttcctaaaatttaggaaatctagtttttactaaatcaacgttatttttctcaaaaaccaaaaccaatttttttggagattttaaaacaaaaatataatatcaaaaatctaaaactaaaatctaaaatctataaactaaaatctaaactcaaaaactgaataaaaaatcagcatccattcagagctagagtatgtgatgatatatgtaaaaaagtagagagaatcataaagaggaattgcaaaactaacacattttcactaaaatattaagaatataatattatatatgtatcagttaactaactaacctaaatggtagattaaatgatcataggtggtggtttggatccggcgacggcggtggctccggcggcggcggtggctccagcgacagcggtggctccagtgacagcgatggttccagtgacagttctggtggtggctccggcgatagcggtagcttcggcgataattccgacaataacagtgtctccagcgatagttccggcggtggttccggggacggtggaggctccggtgactgggaacaccgacgatgggtggttgctctggtgatgtcattcgttctggtaagggggtagctccggcggcgacggtggtgttgatgacggtggttgtgacgccggtagtggtggtagtgatgattgttgtgagggcgaaattgtaa

SEQ ID NO: 180176 - DNA, 51 bp, Arabidopsis thaliana landsberg
atggggaaagataaacaatacgagtttggtgtagaagatgccatgattaag

SEQ ID NO: 180177 - DNA, 198 bp, Arabidopsis thaliana landsberg
ctctggcacaattcctgtcgctacaagagaaatgccacacccacacggcacaaagaagaagagaatgcagaggaaaggaagacacttctgacacagagagagagtcaccttttaagttccacatttgaaccaaaccgaaaatcaaaccaaatcgaaatcttaaatcaagtcacaaaaccgggggataccccaagttaa

SEQ ID NO: 180178 - DNA, 922 bp, Arabidopsis thaliana landsberg
atgaactgtggactaccaacgttcgccacaaaccaaggtggaccagccgagataatcgttgatggtgtctctggtttccacattgatcccaacaatggtgatgaatctgttacaaaaattggagatttcttcagcaaatgccgttcagatggtttgtattgggataatatctctaagggtggtctcaaacgcatctatgagtggtaagtaaagataatcttgaaacaaaaatcttatcagttatcagattacattgcttatttgtggattttgtattgtctgtgcagttacacatggaagatttatgcagagaagttgcttaaaatgggaagcctttatggattttggagacaggtgaacgaagatcaaaagaaagcgaagaagcgatatattgaaatgctttacaatctccagttcaaacaattggtgagttttgttatctgaagattactattgatgaaagctacaaaactaacctttacatccttatggtttcttgtagaccaagaaagtgacaatcccggaagataaacctctgcctctgagactggcttcactccgtaaccttcttcccaaaaaaacaacaaatcttggagcaggaagtaagcaaaaggaagttacagaaacggaaaagacgaaacagaaaagtaaagatggtcaagaacaacatgatgtaaaggtcggagaaagagaggtaagagaaggcttgcttgcagctgacgcatcagagagagtgaagaaagttttagaatcttcggaagagaaacagaagctagagaagatgaagattgcgtatggacaacaacatagccaaggagcttcgccggttcgaaacttgttttggtcagtcgttgtttgtctctatatctgctacattttgaagcagaggttctttggtgctaactcggctcaagagtattaa

SEQ ID NO: 180179 - DNA, 828 bp, Arabidopsis thaliana landsberg
atgaggttgcagagagtaaaagctgtgaggagaaaaagtgttaagctggccccagatgggagttcattgattaaacttgatgaaatgaccactgacttttccagtaattggagacaacgggctgagctgcatgatgaagggttgtctgccttcacaaggaatctatgatcctatggcaccgggtgatccggccaaattacagaaacttaaggattatttgccaagtcctgacaggtaaggccctttataccttaataagttgttaagtacgacatgcttacactatctgtgtatattaactttcttttattatttggtagcaaaaaattgttggacaatggaatagacgaggttgatttctacggagttatcatgaccgcaagaaagtcctggccagattcaaaatatggatggctgggtgatgaagtaagttattgttatattgtgtttgagtttgtctactttatggctgagttatcgtgttgttcaggctgagttaaatgaattatagctggtttattttggtgtgcaaacagagttgtagttgattatgtctaagttagggtattgttctgcctgagttaaactagataatggctgatttatttaggtgttgcggctgagttttacttggttacgcctgaattaatgttgtgttgtgtctgggttggttttatttttgtacagcaaattggtgcgtatatgaaagtcctcgccctgaggctccagcgagatccatgcccataccacaacgaacacgtcatgattcagacctgtggatcacgacctattgggttacagattacaataagttcaagatcaaactga

SEQ ID NO: 180180 - DNA, 220 bp, Arabidopsis thaliana landsberg
atggccggttctaaagatcacaccgatatctccccggacaatatcctgaagccggctgttgaaagtctgacggccgatgagcaacagcaatacgaggactacatgcgtcaagcgagggagaaattcttatcacaatacacggtggatcgccaccagaaagttgtcaaacatggagagacccgacgtcgcatctcttctatcttcgcttcaagtccccaac

SEQ ID NO: 180181 - DNA, 316 bp, Arabidopsis thaliana landsberg
atggcacaagtggtattgaagtttcttgaaggaagaaaggaaaacgaagtagggtacaaaggctctactaatgctcttggggtaaaactaaaaaccttaaacactaaaccataattagagaatgtgtttggtgttgaaactgagtttgtgatcacttgtgcagataattgaggacacgttcgcatcagaaatgcagaggctacaagggaactcactacaagagaaggatatggaagctcctcgttcggtcattgaggcacgttccattctctccagagacaacaacgccaatcactcttcttacttctatgtctaa

SEQ ID NO: 180182 - DNA, 2771 bp, Arabidopsis thaliana landsberg
ttattgaaactaactataatattttatgcacgaaggaatgtccgcacactttcaagtggcgatgctgaaagaatgttaaggagttctttgaaaaactccagttataggcttccaggttagttatttttccatcatcatttggattgataaattatcctacttgtctacgattttgatggaactagttctagatgtttgttgacctcttcttgctttgtactgttagaatactgtatagattgagagtttttttaactcaattttcaatgcatccactccaaaaagaaacctagtgtagtctagtgctactgctacctagcttcatcaagcaaagatttaacacctcatttttttgcatgtcacaagagcttttcgtaaatgtttgggattggccaagagtgaggataatagattatgctacatgtaattctatgaagccaaactttttgaattgatacctgaaatgaaatccgccttctacacatgcttaaagaaagataagagctttttatttgatagaaacacttctcacaggcctatgttattcccaccagttattgtttctcctcatggaatgcggggcagccttactggattctgtcccaatgaccttgtcaagcaagtctacttcaggtacatttcatacctttgctttcgaatgccaagtcaacattttttgtgagtgcgtagccgttaatctgattaatccaattttctcaactaatacttttttctcacacagttctggaaacttaaaaacttcgactggatatgttggtctcccttctcatattggtcgtgggtcccgtctgataaatggcaatcattgctacgtggaagttacacttggttgctgccaaaatagaaatgacaacacaagtcaagctaattcgacctttgcagttaacttgccccataaccagtgtcctgaaccttcagttgggagtaaagatcaccgtaaaggacaatcagatctttcatcagtttgtgaaaaaaagttcatctatccagctgaggcagtgcttgtaccaatcttacagtcggcatttgcgaaattttctttgaaaaggtaaattgactaggtgaggtggttatttagaattcattgagtacttaacggtaagatccagattggctatacataaaatttatttcgtttctgttgaattccatgtatgtattaaaacaaattgactctgtgtgatcgtagtggaagttttagtaattgtttcagacctatgttaaatagatgtaatagttgtgatctttcctcagcttggagctgatgcaaggtgaaatcatacttgcagattttggcttcaaaactggataggcccgtcactagcaggctcatctttgtttatgcactggtgagtctttttcatctatctcgtcgacatttgaagatcaaaagaaatccacaaaacagaggtcttgaaatgcccaaactgttctgagaaaccgaatgttttgtaatcttcattatttgaagcaccataggagtgagagctgtggcatttccgagttttgttccaatgttatacgtaacgattttgtttttcattataacagtctgtccatgatccctgtatatgtgaactttattttatgcagggctggtgattttgactgccttggtgcgtctgaaaataagagtgatgggttttatgaaaaaaatggttacaatagcagtggtagtagccgtaatagcagcattagttcaacaagtagcgcttccagcgggagcggctggaggatgacgtcaagaactggtgaccttgacgctgatgcagattctttgacgtgtaggcaatctggtcttacttgtaatgatgatcgcctaaaaatggtacgacttttatctatggaagggatggagtttgcatggtactgatgaggaaattgaattgtcgattgtagcactaacatgcttaatcaacatcatataatgtagttttccttattttataataattcacgaagctaaccaataagtaacataacattctttacagggttccaagcggccgcgaacagggatggcagagtcattcggtcaagtaggtactgtcactgatgcacctattcaagaagcatatatgtcaggatttgtttccactaaaactaataaactggtgttccaggcattgaaaatgatcaaattggttgggattgggatgctgatgatgatgatgatgacagagaagttggcatggatatcaaggcacttctttcagagtttggagactttggtgacttctttgagaacgatgctttacctttcggggaggtaattttcccgcttctgttactgatcataataataatcaagaaactattatctgcattccctatgctggtgaatgatctgtaggtcctgtattagctcagatatctagactgtatctcagagatgtttggtaggaagggttttctgcttccctttccccatttctgtcatgccttttattttgattcactcatattgctttcggtgtcaattcttatgtcatttattatgtttgtgtagccaccgggaactgcagagtcgcatgtgctcgtttttcctccagattctgctgatgtaggttccagtcccgtggatatgatggatgtatcagaccaaatcgttttgcctgttgggttttcctcttttgagagctttaatcctgttcccccaatcattgatgagtgccttattaaaagtcaagaagttctccacagcagtatcacttcagttccttcaaatcaaatgtcgatctcttcgactg

SEQ ID NO: 180183 - DNA, 534 bp, Arabidopsis thaliana landsberg
gcggaagctagcggtttgctacatgtgcttcaagttacttgggctcagggaataagatgtgtctgctttgaaggagacaaccaccacttaatctctgttattaataatggtgaagatcattcagaaataggagctctcctttccgatatacgtcattggatgggtaagctgtccatatcctccctactccatgtcaatcgtgaaagaaatagtgcagccgataagatggttcgttatgctttgtcttttacttctttgtatcatttatttaatgttcctccaccgtgtttacttccttatttgtatcaaccttatacagtataataaagttttagttgttaaaaaaaaaaaaagaacatcattacacaaagcccattacaaaattggcccataagcccaatctaacaacggcagagattcagagtcagttccgacggcgctgaccaaagaaacgcgtctctctgagaaaatttcctcacagagaaagaagaaaaagacgagagacgtgaagaagaaatcaaaattcagaattga

SEQ ID NO: 180184 - DNA, 190 bp, Arabidopsis thaliana landsberg
gtgccaaaggttcatctacaactatactaattcgactgtccggaataccgtagattattccggacaggagaagctttttggaaaaacaggccaagcgcggaccgtccgggctcttgcggcggaccgtccgcgacatcgggatacccctcggacagaaccaatgcaagaacacaagtttccactacagact

SEQ ID NO: 180185 - DNA, 180 bp, Arabidopsis thaliana landsberg
gatgaatcacagaagccacatgaccagatccagaaaaagaacaattcgccaactagaacgcacaacaagatccaaccaaaaccagcaaggaaaggcgcccactttcgccccggaatctttggattccacgggaagattcaacatcaaggacccgaattagacgacgggaaagaggggtga

SEQ ID NO: 180186 - DNA, 1620 bp, Arabidopsis thaliana landsberg
aacaaatcatgatgggatcagtgatcaacactatcgttggaaacttgaagctgtcaatttcaaatattcacataagatatgaggatctagagaggtaactagattataacagaatctttgttcttgattgtctacccatttgtataattaacagcctatgttataagtgcagcaatcccggccacccgttctcagctggtgttactctagagaaactctcagctgtaaccattgatgagagtggaaaggaaacttttattactggcgggactctggactccatccaaaaggtatagatttgttcatgaatatctgaatgacacaagcttttctggtcatatgcctcagtttcctagtttcgtttctcttatgagggttttatgttaagatcccttgcacagttgcacttcttcttgcttgtaggtagtagcttggtagtttatgattttaatctagttcaatcagttaagtttaggtgcctatagtaagaagcacggaaattgaattgggctgctctctagaagggttagtgttctgtaacagatctttgtatgaaactaatatctggatgactgcattgggaaaggaatacccatgccaagaaacaaaagcaggggtactttacatttatcttttcttgctaaaattgtttgcttttgcctttttttttgcagtctgttgaacttgatcggcttgcattctatcttgattctgacatgtctccgtggcatattgacaaaccatgggaggttttaactccttttgagtgggatcaggtagtgacaagctaagtcatgtatatatagtggaaccagaattatccattgtctcttacccaaaatctaattttcggtgtatgcaaatatctagatttttagatatggaacaaaggatggtaagccagctgactgcctcacgagaaagcatttctatattctgcaacctgtctcagggaatgcgaagtactctaagtcccaagcaaatgaatcttcaaatgctgttcaacctttgcagaaggcatatgtaaacttagacgatgtgacactttgtttatcaaaggtgaaacaaaacatttaaggcgtctactctttttctatttggctgtacccggtgatcttgattgtgtgtctttttttgtactcagggaggatacagggatgtcatgaaacttgctgataattttgctgcatttaatcagcgtttgaaatatgcacattaccgtccatctgttccagttaaaatcgacgcaaaatcttggtggaaatatgcttacagagttgtttcagaacaaattaagatagcaaggtatctaaatgtaaacctttatcttttttttttaactgatgccggctttttgcgtaatttgcatcggttgtggaaacatcttcctttgcagttccttacgtaaggttttgtttacattttctgagattgttacttttatgacagcgggagaatgtcatgggagcacgttttaaagtacactagtctacgcaagagatacatcacacaatatgcttcgttgctgaaatctgatatcagtaggatagttgttgatgatgatgaagaaattgaggcccttgatcgggaacttgataccgatgtcattttgcaatggag

SEQ ID NO: 180187 - DNA, 375 bp, Arabidopsis thaliana landsberg
atggacccgccccgcgccgtggattggggggctgcgctacccgattgccggtgagtaccctacacccgtgttcgcaataacataagcatcgtgtagacctatccaatttggttttgtcgctcggagttggccaatagccgtcgcactcgcgtgctccaccttgtgagcttggcggcgacacctctgttcgggattggtagggaagaaagctggtggccgctggatccttgatggggggttgtgatgtgttgtggtgatcggccgttggatcagccacgaacgctcaggatcatacgtgaggatacccttcgccccattaaataccagtcgttgatttctaatcttgcgactcacagcgcgtaccggttcggataa

SEQ ID NO: 180188 - DNA, 284 bp, Arabidopsis thaliana landsberg
acaccaaggcccttgtcgtgacgaaatgggatgagttaaaacatggcaaggctaaagaagctgcgaaagtgattgaaaacgtgaatgcattctggatggatgttgcttgtgcgcggtttgctgaggagtgtgcggagaagttggagaaacggatgaacatacgcacattcgcattccgattgccaattcgtggagaaggcaaaaatcgatcttggcaggctctttatcaaacatgttttggaacgaaggatttgatgttgtatcttatgcaacaaatgaagtaa

SEQ ID NO: 180189 - DNA, 342 bp, Arabidopsis thaliana landsberg
gttacatctctatcttcatcagtcggatttgagctccaatacggagctcaattccttccacaaagtctctttgattcagtaccagtcagaactcattgctacactacacgaaaaaggcggcgtttggagttagaggagtctcttaaggtcaataacaatgccattgatgaacatcttaatgtggaggaagggaatttgtttggagaatgtgatgatgattttggtttcaagtttgaggacattgaaagttttcgcaacactttcccagacattttgctttcccctcatgattatcagacaactatctttggtaatgagattgatgatgaggatgatcgaatg

SEQ ID NO: 180190 - DNA, 288 bp, Arabidopsis thaliana landsberg
gtgatgatggtcgggatttcatcactgttgagttatgtggagatgattttcttgcggcgttagctgattttgaggaaggaactgaggaatgggatgatatacaggctatagagtctgaagctcaaggaaatttggctgaaatgtttgataaatctactaatcctagtgataacggattcgatactgatgatgatgatgatgatgatgattcaagagtcgaagttcatgttattgaggattctcctgagcctaacaaaaagccagagatagtggagttggattattcaa

SEQ ID NO: 180191 - DNA, 200 bp, Arabidopsis thaliana landsberg
atgttcgatcgagttctggagaaagaattttccgaaaacgattcgcctgaaggttaggtttccttcttcttaatcgatctcttttgattgaatgtgagaaaaaagtaaacggaaacattaacaatttattctataatcatgttttcttttgcttaggatctgatggagctagctttaacagcagtgttgctgatcaacaa

SEQ ID NO: 180192 - DNA, 60 bp, Arabidopsis thaliana landsberg
atggtgggtttaaacaacgccgtctcactcgacattgaagagatctgcaatggtggcaag

SEQ ID NO: 180193 - DNA, 296 bp, Arabidopsis thaliana landsberg
caccaccattgttggcttgtaatgtcaatgcaactgatgatacaccaagtgtttgtgcacgattccacataggtggagcattaggtgaacgtggtgatgtggcagcactacgtggcgatggcggccatgcattgttagtcgagttaccacctcgaggactgactggtgtcacaaaatatgatgatttaccagacttcaatggtggtggcatcacttgtgattgtaccatcactacagtttgtcgaccattaccaccatcttgtactttaccacgtcccatcaaatacaagatttga

SEQ ID NO: 180194 - DNA, 547 bp, Arabidopsis thaliana landsberg
atgcagatccaaaaaggaggtcgaagagaggacctccgtgttcatgtctctaatatatatcgaacagtgtctgagaatgtctggcctggaatgcttgctcgtaaaccagttttccgcctccattatctgcggttcattgaagattcaacaagacaaatatcgttggcacctcatgaaagctttcaggacatgcagcctctgcgatatgcacttgcgtctgttttaagattccttgcccctgaatttgttgaatcaaaatcagagaagtttgatgttagaagtaggaaacgtctattcgatctgcttctttcctggtccgatgacactggaaatacgtggggacaggatggtgttagtgattatcgccgtgaagtagagcgctataagacctcacagcataaccggtccaaagattctgtagacaagatttcttttgacaaggaactgaatgagcaaattgaagccatccagtgggcctcattgaatgcaatggcttcccttctttatggaccgtgttttgatgacaatgcaagaaaaatgagcggcc

SEQ ID NO: 180195 - DNA, 569 bp, Arabidopsis thaliana landsberg
gttatcaatcaacaacggatgcccaaagaacttcttcagagtagcctcagacctatactagttaatctggcacagacaaagaatctcaatatgcctttactccaaggtctggcacgtcttcttgaacttctatcaaattggtttaatgtgacattaggatgtaagttgctggagcaccttaaaaagtggttagagccagagaaacttgcacagtcgccagaaatcatggaaagctggtgaagagccgaaaattgcagctggtaatcacgttcttggaaatatataaaaacagatgcctggtcatgtgattatatattaacacatttttttgttctttctgtggcagctattatcgagctcttccacttacttccacttgctgcatcaaaatttctagatgaacttgtaacattaactatcgacttagaagcagctcttcctccaggacaagtgtacagtgaaattaacagcccataccgtctcccgcttaccaagtttttgaatcgatatgcaactctagctgtcgattattttctttccagattaagtgaaccgaaatatttccagag

SEQ ID NO: 180196 - DNA, 930 bp, Arabidopsis thaliana landsberg
gaatggaaggagatccgcaccggacatgctacagtggttgtccggtggtgcacgactgtctggtgcgccacccgacagaaggcaagaattgccttccttgttgggttccaacggctcctagctgccttgaggctataaaagggacccctaggcgcatggaggagtatcctaagcattccttgatcattcctaagcaccaagactccattctcgcgcattcgattctttgagatagtgacttgagccccatttgagtagagaactcctcgagttgtgttgtgagctcaagttgtggctttgtgtgcgtgattgtgctcttgttttgagtcttgtgtgtgttgctctccctctcttacttctgtgcttctttgtgatcatcaattgtaagggcgagaggctctaagttgtggagatcctcgcaaacgggagaaggtataagaaaggaaaacaccgtggtattcaagttgatcattggatcacttgaaaggggttgagtgcaaccctcgtccgttgggacgccacaacgtggagtaggcaagcgttggtcttggctgaaccacgggataaccaccgtgccatctctgtgattgatccttgttggttattgtgttttgttgaggattcctctttagccacttggcaattattgtgctaacgattaatcaagttttgtggcttaagtttttaagtttcacaggatcacctattcaccccccctctaggtgctctcaattggtatcagagccgttctcttcacaaagggacaaaccgcccgaagagatggatcctaaggggaagggtatcatgatcaacgacaaagagaaggaatccttcgtcaacgagccaaaggacgacaagcctaccgactccggctcgggccatagacggaaggaagggaagaagaagaagacgaggcgcatcaaggagatc

SEQ ID NO: 180197 - DNA, 778 bp, Arabidopsis thaliana landsberg
atgaaggcccgtgtgacaaattttcagtggcatgagttctttcctcgtggtaatgcactttcacatacactacatgattgctggaatgaaaatttatcatttattctcacaccatctctacttgatttgtgcagccaaaaacaatattggtgtcgttatcgccctctgggcccccattattctggtaagcatggtcaagtcgaacatgtctgcacgtcttcccctgctttgtgctgttgctaatttgatctcggctacatcttgctgcaggtatatcttatggatagacagatttggtatgctatattttccacattatttggaggtatctacggtgcattcccccgccttggagaggtatgcatttttaagatattctgattgaagctaagttatttgttgaacttgaggtttcccttgtaattgttattgatgttctctaaatccttgcgtttttcacttgttacagattcggacactgggaatgctcagatcacggtttgaatcactgcctggagcttttaatgaccgcttaattccagatggaaagaaccagcaaaagaagaagggaataagggcaacgttatctcataactttacggaggataaggtttgttgaacgagtgaactgctatcacgtacaattcttctcattgattgcttgtactgaaaatttacttcaggtacctgtgaacaaagagaaagaagctgcaagatttgcacagttgtggaacacaataattagtagttttagagaggaagatcttataagtgatag

SEQ ID NO: 180198 - DNA, 455 bp, Arabidopsis thaliana landsberg
atgaaaagcacatggaaacttacagagagagaatcaagtgcagagaagtggaagaaaggaggaggtagaagaagaagaataagagtaagattttagaaagagaagagagtagtagggttttgggttttttatcatcttcccttctttctctgattctggggttttacggatattttttttgtttttcactcctctcttaaaatgctaaaaatatctctgttcataacacgacgtagttttcgtcagtaagtaattagggttttttcgggaaaaatcaatctcccggtttaaaacccggttatttcacaactaaaccggaatcttcattggtttcgagttacatatagtattaatttaacctcgcaatctcgtttcttcaaggtctttgtataatcatcatcaatggagaaattggcaaaaacagcttcgacaattccgaaacggacctcaaataa

SEQ ID NO: 180199 - DNA, 405 bp, Arabidopsis thaliana landsberg
atggacggaccttttaaagttctcaagaggatcaacgataatgcctactctatggatttgcaaggtacgtataatgtgagtaatagttttaatcttactgatcttgttccttttattgtagatgaaacagatttgaggtcaaatccttttcaagtgggagaggatgatgtgataatgggaagcttggatcatggagcgtgggcacagcttgaacccgaggagtttggagaaagaacgcagcctgaggatggagagcttggagctaaagaggatgaagcattgcatgttcttgaaggtccaataacaagatcaaagacaaagctactaaatcaagctatcaccacacttctacaaaagattgagggcagccttaaacaagaagcttgtcaaccacgttggttgtga

SEQ ID NO: 180200 - DNA, 180 bp, Arabidopsis thaliana landsberg
acacttctgtggaggcgttctgaccacgccgaatcattacaataccaacggagcgcgtttatgtttgaccgaagctgtattctcgacaatattcgctgctcctggactggcgatgtccatcttcgcagataccttggctctaaaaacacatggagctggggcccgatcgaccctggatga

SEQ ID NO: 180201 - DNA, 605 bp, Arabidopsis thaliana landsberg
atgggcgaggtggctatgctgcgaggtgaaggcaaaggcgaagttaaggacaattcggtttgaacctttttgggccgaaaggcgaagcccacgaaatccagagttaattcaaattcgaacgtttaaacattaaacccgaagactgaaacgaatacatttaagaaagaattattgtgtataattaagattaaatataatattcgagtataagtaataggggccgagagttatgtaggacacacgcaattttctagcaaacttactatagtcatccaaatatcaatttacagctttttacacttagatttttgtcctcaaaaataatctttcttgttagataaataaatatttgattgtgtgaatccaacatctactgtacgtaatagtcttaaagtaacagggcagttaaaataaaattatttatcctatgaaatatctaattgcattgtacaacggtttgtttgtttatttgttttttttttttttgttttttttttaatttagtgtacaacgtttacaatatccttcctaatgatgatcttatattcaccaagaaaaactctaatctcctgcaaattttggaaattcatcgaacagattcgtaa

SEQ ID NO: 180202 - DNA, 130 bp, Arabidopsis thaliana landsberg
atggtcaccgattcttatatcggttacaaagttatatttatttgtgttcgtgtcaccactactatatccttaacaaaggtgattaggattgccgataacattaccctcgtgcttttagaattatgaatga

SEQ ID NO: 180203 - DNA, 301 bp, Arabidopsis thaliana landsberg
gccaaccggttctacgaacaggcgatcgccgcgcacctgaagatcggcgtggccgcctgcgacctgctccgcgccgaaggcaaccggctgcacagccgcaagctgcgcgccttcaacgaaccgccgttccgctaaaagccgggcttcagaataccagctggaggaggatgccccacatcgccgcgcccagcgccgcggcgatcacgatgcccgtggccgggctgcctgcatcgtcgtcggcacgaccgcggaccggcccctgccctgctgcggccgcacgccggatcccggaaccgtgaag

SEQ ID NO: 180204 - DNA, 1160 bp, Arabidopsis thaliana landsberg
atggacaaggcttctgtgttgggagatgcattaaagcatataaagtatctccaagaaagagtgggagagttggaggaacagaagaaagaaagaagattggaatcaatggttcttgtgaagaagtctaagctgatcttggacgataataatcaatcattctcttcttcttgtgaagatggcttctcggacttggatcttcccgagatcgaggtaagattctcggatgaagatgttctaatcaagatcctttgcgagaagcaaaagggtcatcttgccaagattatggccgagattgagaaacttcatatcttgataactaattcaagtgtattgaattttggaccaactcttgatatcaccattatagctaaggtatgcaaatgtatattcaggcatacacttatacatataaatgaagaacttgttcttaattttagagtaacatcgcttgatgtttatttttcagaaggagagtgatttcgacatgacactcatggatgttgtaaagagcttaaggtctgctttgtcgaatttcatatgattgtattaactttcatgcttctcgtcaatttctactgtgggagatcttgttgaacacatggacgaaacataagtggtttgccatgaaaatgttttttttttttataagtttgattggaggttttcttatctgttaattatctataattctatatataaataagattaaattagttgaaaattcacttctctttttttctctatttggttctttccccctttatgtattatattgctgtttccaaagatgtaaagcacttccgtttatgtatttgtattatatggtttatattttgtaagtctgttcaatcttataccaaatcactaaagtttgtagtaataattttttgggaggagttagagcaagttattggtgcacaaaaatttagagcaatttatattgaatttgattgattactgtcattatgagtaagagtaatttgaattcaaagtaacatatggtaaattagcactgtcaaatacaacaaagtacccagtccaagacattctagattcagaaaatcataataaaaaaaaaaattatcacttggataatcaaggcaaggaatgcggcatgacgaccaagtctttccttccgtgttagagaacaacaaggataa

SEQ ID NO: 180205 - DNA, 1499 bp, Arabidopsis thaliana landsberg
atgacaagaacaacagtaccaacaacaagaaagggaagcaaaagagaaccagcaaaaccaaagaaaacgattatggctagcagatccaaagtaaaagcaaaggcgaaagcacaacctgaattacctccacaacaagaactgccaaagaaagaatggggcacaaagatggttaaaggcgtcaactatagagctgcgtgtcaaggagctttagtcgtatccactctctattccgatgatttcactcttgacgcgttgggaatttgcgatgatgtggcctggctcttggggattacgaaagttcattttgttgaagtacggagcttatgagaagcttactaaggagtttcttggaacagtcagaattgcttttgaggatgtcaagtcaccgaaaaccgcgatattatattttcgcattggtgacacagagtactctatcacgattcgagatctttgcaagcctttggtttcagtaataaggacaagattcggttcacacactgcaaaagtacttgctctaaatggacaaaatttgcatatgatacctacgaaggtggttctaaagcggcacaaatcaagcatcatgctttgcgttatgcccttcgaatgttagccaacactatgttttttggcgtagatactatcacaatcaaagaaggtgagttctatatcatgatggcaccattcatcaacgacccgtagaaggtaaaccttggagcacttctcacttgtgagttggtagaatataagcattatgcttacaaaaaaagggacacgtgagctgtttttggcattggtggagctgatctgtaatattggaggcttgtgggattgatctgaaagattgatcttgctttccttgggcgtaagcactacttgggaggatgggttgataaccctttacaacttgcttaccgcttcacagcatcttatgaaaatgagcaaatatctttgttatccagccagcatcttccatcgattaagtcgaacagtacaccatttccgccttcagaaagttccttctatgtagctactagcactagaccgctaagcaaatattacacaaagaagcgaaagtcaatgcaaattgacaccaagtagctctccagtgagaacccttctatctatccaccatttcaccaacctgtaaatgctccactgcgcaccgagacggacaagtggttctactcttctatcagtagggtggagaacaaccaagcacgccttgagaggaaactagcatgtcagggtttgatcatcactaaactgacgcgcgccgtgaagaagtacgctcctccacatattttctagcattcaaccaaggaaaaaatccgcgccaacaccattctgacggggatttaagcgatacgagtctcaaccttgcttctagtctcaagttgcatgaccttgacacaaatgatatcactagtgaaccactagctccagctacgccagcaactcctaatgacgacgagtcggcttcctctgatgacgagttttag

SEQ ID NO: 180206 - DNA, 199 bp, Arabidopsis thaliana landsberg
gttgaggtcaactatattgtgaaaccagctgataatgtttgtcctccatctctttcatgggatgatgaagttgatgatccaagggttgattacattgaggcactgttgatagatgggcaccagtggcaggaggatgaatgggttggaggctatgctagagtaccaaagcaggtgcgcccaccacaacaagaagagatag

SEQ ID NO: 180207 - DNA, 82 bp, Arabidopsis thaliana landsberg
atgatcgggatcgcaggcaaccggcggaggagacagcgaggcgacgacgaggagatctgtttggctttgcttgcgatggggg

SEQ ID NO: 180208 - DNA, 408 bp, Arabidopsis thaliana landsberg
atgaatccggagcaaacacatttggtgccgatcatcgttcctggtatatacacctattacgaagccaagaaggcacgcagtcagggatacagcattgtgctcaacgacatggcgggtaaactgaaaatgaccagccaggtaaaagtggccaacgacaatacgcctacgggcggattgatctccagtgttgagtacatatataatacgactcttccttttaatgaaaacagcatgaataaactcagcagccaggtgcaggccgcaattcccacatcgggtctggaaccacaaattgaaacagctgttctggggcaaaccgtggacattcatcaggaaaggcatgactcgcgctataccgatattggttatgaccagaaaggaaacctcgatatttcctatcggggtctg

SEQ ID NO: 180209 - DNA, 524 bp, Arabidopsis thaliana landsberg
gcttgggagttcacctcaaagagctccgcaagtcggacacccctttcttcggcatcgtgccgacggaaggggaatacccgctgggccacatctacatgccggtcaccttcggaactccggagaactaccgaaccgagttcctgaggttcgaggtggcgaacttcgactgcgggtacaacgccatcatcgggaggccagggctggctaaattcatggccattccgcactatacatacatgatactgaagatgccaggaccgcaaggaatcataactgtgcgcgccgacttccaaggcgccgcagagtgtttccgagtggccatccaagcagccctcaccaccaagccgtcggtggtttcttcgacactggcgaactctaagcctgaagaggacctcgcagtaccggcgaatgaagctcaggccgtgacttctatgcgaccgactgaagaaaccaagaggatcaacctggggttcgctgatgaacgcaagactgccatcatcagctccagcttggacgacaaatag

SEQ ID NO: 180210 - DNA, 107 bp, Arabidopsis thaliana landsberg
gtttaccaaaagaagagagtgttggctttaataatcacgtggaaaacacgacgacaataccatgtgacgtgatcggttattgttggaagtccaccgatggcggatga

SEQ ID NO: 180211 - DNA, 118 bp, Arabidopsis thaliana landsberg
ttggattagtgaagcatactacaacactctctttagggatcggacccctctatgcactgttatgtcggctagtgtccgcacaccctacgcagtattatttattgatacttacatatag

SEQ ID NO: 180212 - DNA, 232 bp, Arabidopsis thaliana landsberg
atggatgttgattcactgaaagtttctcttgcttcaacaggtacaattatgttttttttggcttcttactcccaatgtctcttcgagtcatgctaaactgatactgttctgttttgtttaatcaggggatgccgttactcagtcatcgagcacgaagaaaatgaacggctctggaaatgcgcagaaggttggtgttaagatttcagttcagcccagtacccgagagaattag

SEQ ID NO: 180213 - DNA, 511 bp, Arabidopsis thaliana landsberg
atgtggcgtaagcaattcaacaaagggaaagaaccaaaaaccgttcgtgtgaaagctccaccaagtaaaaacgcggtggagcagcttctcgtactacaagatgcaattagtcagttcgagtcgctaatccaagctgttaacgttggtctcctcaaaataagagcaattacccttgcaattcttcctcaggtataatgttatatcaaaacatgatgatggctaggataaataggtgtccgcagttaatagtaactctcttgtctctctgatatgttttcaggcgacagatacaacggctatatcgcttgtggttgtggcagttatattggcagttgttcctgttaagtacttaataacgattgcgtttgtagagtggttcacgagggaagttgggtggaggaaagcgagtagtgaccggctagagaggcggataagagaatggtggtttagggtaccagcggctcctgttcagctcattagagccgaggatagcaagaagaagaagaaatga

SEQ ID NO: 180214 - DNA, 596 bp, Arabidopsis thaliana landsberg
atgtctatgcttcttcttcttcttctttttgtcccattcattactccatcttcgcaatcttccattcgaaacctcctcgaagctcgcggtttaccaggtggtttgtttccagacaacgtggagagttatagtctagatgataagacaggagagctcgaagttcagctacaaaatccttgtttcgctcggttcgaaaacagagtatattttgatcgtgtgattaaagcaaatttaagctatggtgggcttgttggacttgaaggtttaacacaagaagagctttttctttggttacctgttaaaggcattgcagtgaatgatccttcttctggacttgttctcttcgatatcggtgttgctcataaacaaatctctcgttctctctttgaagatcctcctgtttgttatcctcctggtgagtcaaagtttgttcctcaaaacgttttagtgtttaatgccaagtgttttatttattggtaacatatatatgatcttgaacagaatatttttgtagtaataattgtatgtttttatttgtaggatctataatggaaaagttagaaaaaagcaagatggatattcagctcaagagatga

SEQ ID NO: 180215 - DNA, 583 bp, Arabidopsis thaliana landsberg
atgcagaagaaggacgaagcaacgatgaagaagaatggaccaacgacgaagagggaagaaccaacgaagaagaagacagaagccaaagaagaaggcgcggcggcgtcaaaacacagtcgcgttgtttattcagacaagtctcgttgtttaagcaaaaatggaaaaacaatcatctacttcggcgtgcccgcggctttaattttactcataatctgtgtctttgccttcaactacatagcaatccaaccgcgagttccacggttcatgctcgaggatctctacgttgatcccctctcaaacacaagtgtaattgtaagtgttttcaatttcctttttttcgttttacaaaagtataaagctattttaaaccctaatataattactatttcgatttgctttatctaggtgaaactgtcatcgaccaacccaagctacaagtcaagtgtttactacagaaaaataagtctacacgtcctagtcggagaaaaattcgagacagagagtgtttttttgcaaagcaggcgtcaggagcctcgtacagttaggctttggacagcggtcatagcaaacaataacgacaacg

SEQ ID NO: 180216 - DNA, 133 bp, Arabidopsis thaliana landsberg
atggtggacgattttgaagaagatgaactctcattgactgaaagcgggttgaagagtgaagatggcgttattatcgagatgaatgtctcctggatgcttttattatcatgtttgggaatttaccaagggagag

SEQ ID NO: 180217 - DNA, 1293 bp, Arabidopsis thaliana landsberg
  unsure (1)..(1293): unsure at all n locations
ccagttgactggaagccagttgtgatcaaagcttcagatgctgattcatcaggcttgctggttgttcacccccatgtgaatgctaatgatgaagaagctactgtgagtaatcgttttgaaagccactctgaaggaaatataagtaatggcactgttaaaggagctatagatggtactggtccctctcaatttgattcgtcaatatctcctatgaggtactgaaatataaactaccactcttgcatgtgctgagtgtacttgtaaatcttatggcttagatgaatttccatgaacaaaatgcgtataattttcaagattgatatctgctagaatgcgattggagggagagcatgacgcacacgtcagttcgtctactcatggatctatgccagttggtgaagtaaatcattcaggcaatgcatggacgcaggtctttatcatacttactctacgtcttggttttattggtgtaaatgaaaaactgtttacctgactatgtacctattcaggacctcattcacaaggtccaggagcaggaacaagaaatatcgcagttgagaaaatatcttactgattattctaccaaggtaaatcgctagttntaatctctagtgttttatgcatacttggttgatttacactacattgtctgaataaccttttggcctgtttttttaggaagtccaaatacgcaatgaaaaatatgttttggaaaagcgtattgcgcacatgcgttcggttagcttttctttttatctattacaaaatatgtgtaactttatcttgtgacgaattatagttacttattctgttaaccacttagggggtaatttatctttcttgttgtgacaggcatttgaccaacaacaacaagaccttgttgatgctgcatcaaaagctctttcttacagacaagagatcattgaggaaaatatacgcctaacatatgccttacaggtttatcatctgtatctatgtgactataattttctatcttttggcatgtgtattttaaatcttcgtttctactttatattgtaatcctttatggttggactccagttatcaatctttgtttccatcatttttagtggttcaattggcaaaaaatcggatttgtctttgagacctccctttcattgtatgaatctaaaatggatgatactattttggttctatcaggctgcagagcaagagaggtctctgtttgtatcgatcttgttacctcttctatcagaatattcgctgcatccacagatctcggattctcagtctattgttagcagtgtgaag

SEQ ID NO: 180218 - DNA, 685 bp, Arabidopsis thaliana landsberg
atgaacgttggggttcacggcaagcaacagtcaagggttaacacgtggcacaacgtgttgatgagtatgcagaaacggaccatgactctagttgctactgacgtggcgcatcaaagaggacaaagaccaccgcgccaacatgatctcttatttaaatacgttaatggaagttacatggaatcttctaaggttcatgattattccatttcgttgcttcctttgtattatgattttattatatgaatgtgtttttggtgtgctttagaatattgtaacgcctaattttgaacataaattcaaagtttgtgttcttttgtatcttgcaaaatcaaagttttgaggataagttaaacaccatgatgttagcaagaattattaggactggtccaatgttttcggatacagtgccccaaatctagaaaattgggttcttttatacattatccagattttatttcttatcaagaattttcactataatttttttttaactttttttttgttaaaaaagtccaccaatagtaattagtaaatactaaaatgtcttcggatagtgtcatactgtcaaataactataaatattgacaaagatctaataatccgattttaaatttggagatcttaatatataattttacttgttttgtttttgtcgtaggccgagtctaaaaccatataccatcta

SEQ ID NO: 180219 - DNA, 1716 bp, Arabidopsis thaliana landsberg
ttttataacaaatatagctttaccaggggtgatccttcacatggcaaaagaattgattttgcttcccaactactttgcttggttgaagcattggattcgtctttctcagctcagtttatggaggattttgtgtcaggtctgccgcaaatttgtgtgcttttatttttttcctcatacatcaaacacatgtagaaacttccactatcaaagaatgagttatagcatatgataatttcccttatgttcttagattatcttacagcattagattttcctgacatatccactgtctaatgttttttttttcttttaatctctcacagtggaaaatccaagctccgaaaatttaaagacctcagtggtcatccctcctccgtcagttcttgatcgggtgattaaagatctctttcgtgagggtatacttcgactatattatgtgtgaacatagatgcatgtataaacttgtgttctgtttcacaacattgaatattgattatcattgctggttcaagaattcgagttaccatgtagtattattcactttgaaaccatctaaaatttgatgcatgaattttgcatttgcagctagaaccatttgttagaatccagctatgtggtattgtttcacctttttccaatctctttcagggtctaaactcccagattttacaaaaggcgaacacaggctttctcgagctcttaaggctgcaccgcttgaatctctttttacacaattctgtttgcactcactgtggtttggcaattgcaatatccgtggtatgtgccagtagaccatgccacattggccagccatacatcattatagggaaaatgaattaaactgccagctacggaatgaaaggaattatctgattaatatcttgtgttgtatttttcctttgttttctgcatcccatctctagccattgcctttctctggatagagtttgtccatgaagttcgatggtgttgggaagagacacagccgttgccgaaaatgccaattgacggttctattgatttgtccagttgtttgatcaaccaaaagttacacttggtaatcctctatatatccttaatcggaaatttcaaattacttgtagatactaacaatttcttctttgtgatcagcttgcaatttgcatcgaaaaaaaacgtgaaatgaatgaagagttcctagactgtataggaagtgatgacagttcagacgcttctgtttctatggaggtaattggctaagttttttgtatatcgtacattagttgttatgtgctggcagtatgtgtttcattaaattaaaaaaagccatgtaaatacttaaatataaattcctgatgcgcctgtgttgttggcatgaaacatttctttgaataaattctcaggaacaccacaaggtcgacaagagaagaaatacatcctcggaagaagaactgcggaggaaacgtgacaggtgaacttagcaagtgagagctcttgattgaatgttaaatcttgatagagaggaaatcttgactaagggtgtttaaattccttttccttgcatacagctcaattgcagaagatacatctaagcaactcagatttgagcggaaaactgaacgcacaaattctgtgaaccaaagcccaacagatgccatcaggagaggttcagctggaccagtggggacgatgatgctcctgaagtcacgtcagcaactccatgccccatttacccag

SEQ ID NO: 180220 - DNA, 142 bp, Arabidopsis thaliana landsberg
atgaggttaggatccttacccaacaagccggtgacaaccggtgatgactacgactcacgttacgcggcgatctacttgacgttgccacctctacacaatagaaactgcatccacgaaccaaaccgacgactccgatctaaat

SEQ ID NO: 180221 - DNA, 251 bp, Arabidopsis thaliana landsberg
ctcatgtcctgttcgtggcttattagcaggtagcttagagcgtaagatctgtctgtcttgctttgcctgatgtttgcatgacaacaagtttcccccatccagcatgtggttttatgaccgacattcggttcttatacatctccatctcgggctgcctgcaagactgtgacgctgacgtcccctttagcttcactgaatccctccgactcccgttgtatgaggtcaaatgtcttcactgcgtggacttcccc

SEQ ID NO: 180222 - DNA, 328 bp, Arabidopsis thaliana landsberg
atgattgtggttgatgacaaacaaacaaatgggaatctaaattatgatggaacatacacatatgttgttctctgtctttattatggtaagtagtggtaaaaggcgtggctcaggaggcaatatttttcaaaagattgattaaaaaggagcttttggtttgaccaggtctaatcagtttcagaccaacataactaataaagtattttcgtatctactgcttaagacagtcttttcctttgtctacacaccaaaaacaaattctaaccagaattaatactcagcttttttcttcttttcagctataaataattactactcaactttgtga

SEQ ID NO: 180223 - DNA, 96 bp, Arabidopsis thaliana landsberg
gttttatggaggtttgggaccagcaacctcaagactatgaaaagttcttctgaggcaccaactcgtgttgctgaaactgttctggagttcgactga

SEQ ID NO: 180224 - DNA, 318 bp, Arabidopsis thaliana landsberg
gcaataagtacggaatcaaaaacattccactttctgaccaaaaagaaaaaggaagaaaaaaaaaaatcgtatatctctcagcgcgagggaagaagaagaagatgaagctaaaatgggaatcaatctctaatcttcaacaaaacacatatctcataaaactcgtcgctgcaacacttataacttgtctcgcttttcgtttcttcgtcttccgcttcggccaattttccccagttcaagtgtcggtgaccggaaactccaattcccagatttctccgacgtctgttatcttatcggataacgaagatcaaattcccgtcg

SEQ ID NO: 180225 - DNA, 566 bp, Arabidopsis thaliana landsberg
atgcaaatgattctcagtatccgtttggtaagtcatggtttacaacttggtaagtctcatgttgtttaatactatctaacgttttgttatattcagaaaatcataaaccaaattccaacctaagttcttcagtcacaacaactaatttggaacaaggagagacatcaaacccgtttaaagataaaagattgtttagaaactttaccaatgacattcctcttcagatgaatggcgtcacacattgtggacggggagacagaaccgatgatctcattcttcctgaatttctgcaatcaggaaatcaaaagaatttaggagaatgtgaccttaatggagaatcagatggtaaatattaaacataactaaattatttacatattcttcactgttcaaaaaactataatatgtgatgtataacaaaattctcttcttattttttaggttcagagtatgatatatatgatgatcttgaaaatggttttcaagatgaagttgattatgattcatataccaactacaaacaaaaggtgtcaaggttactgaactggttaaaaacaaaattataa

SEQ ID NO: 180226 - DNA, 2145 bp, Arabidopsis thaliana landsberg
atgcgtgcattatccaacttggttaacttgaagaagctagatcttgagaagtgtcctgggattgacggtgggcttgttcacctgcgaggtacatagctatgtgttttattgtgataattgccagttttctgtaccctacttgtttcacttagtcaatgtcttttcttcatcccatttagcttctctgcacttttctatcttttccagctttaaccaagctagagtccttgaacataaagtggtgtaactgcataactgatgcagacatggagcctctttcaggtaacaaaaatatacgtctccttcacatgttttattactttcccaagtagatgtgcttactcctatttgcttcagtacttacaaatctgaggagcttacagatttgctgcagtaagattaccgatatcggtattagctaccttaaaggtaggggttttgattatcatactccttttatcaccatttgtctcacatcttacgttgtacacgaagcgtgattcacttcttccacttgcttgcttcagggctaaacaagcttaatttattgaacttggaggggtgccgtcatgttactgctgcatgcttggacacactcacaggtttgtatagacatcctcatggtatgttttggactgtacatgtaatgacaccttcgagatgaactcatatgagttttttcttttggttttatagctcttgcagggttgatgtatttgaacctcaatagatgtaatttttcagacagcgggtgtgaaaagttttctggtgagtgttacttgacttcctcgcagttaaatggtagtttttgcttttcgaaaactctccaatctctgctataatttttttcacgctcctttgcagatttaattaatttgaagatactaaacttgggcatgaacaacattacaaattcatgcttggtccacctgaaaggttgtctcactttcactatatcatgtttccactattttttttggaatcctctctttttaccatttcgtgttgtctgctaaattgctaatcaagaaaattttattctcaggtttgacaaagttggaaagcttgaatttggattcttgtagaattggtgacgaaggactggtacatttatcaggtgattgctacttttgttgttatactgttatcatggatattcgtattcgatattcatttatagtcatgtggttgtaggtatgcttgagttgaaatctctggagttgtccgataccgaagtaggaagcaatggtcttcgccatctctctggttaaccattttccctttgtcatttccattttgtatcttgtgatttatttgtttgttgattagtgcgtttatgttactatatataggcctgtcaaacctagagagcataaacttgtcatttactgttgtgaccgatagcggtttaagaaaattatctggtttgacatctcttcgaacattgaatctggatgctcgtcatgttactgatgctggtctttccgcgctcacaagtaagtccttccagtgcaaagttatttgctttggtatgatgtggttaccacctcttgagtaacccactgtctgtttttgttctaggtttgacagggttgacgcaccttgatctcttcggtgctcgtatcacagattctggaacaaatcacctacgaagtaagtttttgatgtttattatctattcttttccgtggagatctgcctcataaactttctttgttggttttcttctgatacagacctgaagaaactgcagtcacttgaaatatgtggtggtggattaaccgatactggtgtcaagaacataaaagatctttcatccctcactctcctcaatctatcacaaaactccaatctcacagacaaaacactggagttgatttctggtaaatatacaattcttgttcaatgagacaaatcatatgtacctgaaacctgaaccataatctcataaaacccgcaggattgaccggattggtctctctgaacgtctcaaactctcgagtatcaagctcaggactacgtcacctgaagccattgaagaacttgagatctctgaccttggagtcctgcaagctctctgctaatgacatcaggaagcttcaggcgactgatctgccaaacttggtcaacttccgtcctgaataa

SEQ ID NO: 180227 - DNA, 249 bp, Arabidopsis thaliana landsberg
atggaagctcgatctatacgcccaaaggattcgggatctcctggttacctcgtacggcaatatgagcttcaaggaaatcgcgcgccatttcggcccggtcggcgcccggcttgccggcatagaaggcctgtacggcttgctgccgaatcagaccatacgctgacgccgtatcacgcccggcgtacggtgatcgatcgcctgatcgatatcggcgacacaagacaggaaagatacgttcctcccgaaccg

SEQ ID NO: 180228 - DNA, 1508 bp, Arabidopsis thaliana landsberg
atggcgaatccggtgggttttagattccgtccgactgacggggagatcgtcgacatttacctccgaccgaaaaatctcgaaagtaacacgagccatgtcgatgaagtcattagcacagttgatatttgtagcttcgacccttgggacttaccttgtaagtctttctaacgcgagtgtttgtttttctttggttcccaactgttgtatcatcccggtaatttctgatcatgttctgtctttcccagcccattctaggatgaaaacaagagatcaggtttggtatttcttcggccgtaagtagaacaaatatggtaaaggtgatcgacagataagaaaaaccaagtctggtttttggaagaaaactggcgttaccatggatataatgcgcaaaacgggagatcgtgagaagatcggtgagaaaagggttttggtgtttaagaatcacggtggttccaagtccgattgggctatgcatgagtatcacgctacgttctcgtctcctaatcaggtcatttttcgattctcttgtttaggcttctttaacttgttgttgttgttttcttaccgtgattttatttctcgtaaacgggaaaaatctgagtttatggtaatcatttatgctgagttgatctgtagataatgacatacacactctgcaaagttaagtttaagggtgaaaggagagaattttcagttgctactggtagtggaattaagcatactcactctttaatccctcctaccaacaattctggagttttgagtgtagagacagaggtgagtcaatctcaaaaactttccctgtttctcttttaaatcttcaaaatcatatctcgtacacatagttttttcatctgtgttacgttgttccttttttcagggatcgttgtttcacagccaagaatcacagaatccaagtcagttttctggctttcttgatgtggatgcactagatagggacttctgcaatattttgagtgatgatttcaaaggcttctttaatgatgacgatgagcagagtaagattgtttctatgcaagatgatcgcaacaaccacacacctcaaaagccattgaccggtgtcttcagtgatcatagcaccgatggtagtgattctgatccgatttctgcaacaactgtaagcaaaattttcctattttacctttactatctcctctgttttcagttttttctcacaaagctatagttttgtttaatacgacagatttccattcaaactttaagcacttgtcctagttttggtagctcaaatcctctataccaaatcactgacttgcaggaatctcctaactcaatcaagttagtgtcattagctcaagaggtgagctttatcatctccttttcttaaagaccaaccattctaaactgctaattaaccaagctactttgtgccagtactcacagcattttgggttctatgatgtgatttaaggtgagcaaaacaccgggaaccggtattgataatgatgcacaagggactgagattg

SEQ ID NO: 180229 - DNA, 222 bp, Arabidopsis thaliana landsberg
atgtccaggggaatccagttcgtcttcacgccgcggggcgcagaccagttctttcagtccgagcgcgtcacgacggcaggagccggcctggtgctgcaacggtacgaggccactccgcgggccaccgctgcggctgtgcagacggtcctggccgaccccctgatccgacaggccgcggccggcatcgccaaggaaatcgcgtccatgcccgatgccacagag

SEQ ID NO: 180230 - DNA, 373 bp, Arabidopsis thaliana landsberg
atgagggagcgtccctggtaccgcgcctggggcgatttgcagaacccggcatggacaccgaccaacggcgagccgcagcgcatcaccgtgccgtggctgaatcgcaccgaggaaaatcccggtggcatcatcaccggaccggatgcgctgaaattcacggcattcaaccccgacgggtccccacgcgcatatcagcacggcttgctcggccgtacaggctcccagcaatcgggtggcgagatggacggccattatgccgacatggcgctgaagtcccggaacgcacgccggtacgcgtacggccggttgtcgttcgacgtaagaaacgcggacaatgtctacgccgcctgcgcgcatacggatagcgaggaat

SEQ ID NO: 180231 - DNA, 124 bp, Arabidopsis thaliana landsberg
aaatttcttaacgatgaagttaaccaaaatggaaatattgatctggaatggcttcgaaatgctccatcacatttagtgaagtatgtttatgttggtttttatgttctcatagatctcattatta

SEQ ID NO: 180232 - DNA, 405 bp, Arabidopsis thaliana landsberg
atgcctaacggtcgccttatggtgaattgtgcgggaatcgaaacagaagtaaagaatggaaaaccacagttggtgttagatgatttggcttggatgttgaattctactgtcaagatcttatcagaagcatttcctggacaagtaagtaacacatttcatcttcatatccttttgttaactacgcgtttaagataaaaagaaaaacatcgcgattatttattgttgcaggttagttggaagagaacaccagattcagaaggtctcaactttgtggcattaacaggaggcttacctgatcttagtgactggtctagtaaggttccagtccgtttaagcgaatcagtgaagctatggaagctttgcgagacggtccctttgcaactcggtgctttgaatgcatcttaa

SEQ ID NO: 180233 - DNA, 462 bp, Arabidopsis thaliana landsberg
atgtggtgtggacttcaaagcaaggatttcgcagcactcaacaagaagtttaacgctctccaactcaacttcaactgttcttcttctactacggcgatgccacatgacatgccttttaggagaagcggatccactcgacatgaacctatgcaatatgatccgccttcgccaccaagacaatcttcatataagccgagagaacaccatgctgcatcttcaccaccgaggtaatcatcctttgaacctagggagaaggagcggaggagtaacataaagaagcgcaaaaggacaacgaaatcggacgttggggcgggccactcttccgcaccactcgaggagccactcgatcaacagcccaagcaaagggtaaagcatccaaccaatccaagttcagcacaacccgctccttggaactacacaaaggagagtacggatgactttgtctccgcctacttcacctga

SEQ ID NO: 180234 - DNA, 1626 bp, Arabidopsis thaliana landsberg
atgggttctcatggtaagggtaagagagatagaagtggaaggcagaagaagcggagagatgaatccgagtctgggtctgagtccgagtcttacacttctgactctgatggctcagatgatttgtcgccgcccaggagttccaggaggaagaaaggtagcagcagtcgtcggactcgacgccgtagctcaagtgatgattccagtgacagtgatggtggacggaagagtaagaagagatcttcatctaaggattactcggaggaaaaagttacggagtatatgtctaaaaaagctcagaagaaggtaaacttattgttgtatgttattttgttttttgtcctttttttgtgtgttttaacccttgtatttgttggagctggttgctaactttatgctacttgttaaattctttgtaggcattacgtgcagcaaagaaactgaagacgcagtcagtgtcagggtactccaatgattcaaacccatttggtgattcaaatctcactgagacgtaagtactaagaaaatatgattattgtttctgagttttagtggtgtataactttgatgataggatgtaggaggattatggagctctcctggttttctacttgtacaaattttgaaatctggtagttaaaaaagttggcttaaattgaatgtgttatcgatttgtacagatgtacttgtgagtaacttggttttaagagtctgcaattctcatggcatgcaattttattaatatcagatttgtgtggcggaagaagattgaaaaagatgttcatcgaggagtaccgctggaagaattttccgttaaagctgagaagagaagacaccgggaaaggatggtatgtacaataagcattactgattaaaaatatcgatgaaattttcatttccttgatgcttgtaactatttgctattttttctggtggaatgagctttctgcttatgtattaactcttaagcactttggtttaacgcgcagacagaggttgaaaaggttaagaagaggagagaagagagagcagtggagaaagctcgacatgaagaagaaatggtaaattctggtatccagaaggatgtatacaattgaaattcttattagccagttacctctctaatttggttaatactgtatagctattgacttaaatcgttctatcctctgcaggcattgttagctacagaacgtgctcgggctgagttccatgattgggagaagaaagaggaagaggtataactgcgttttctttgcttttgcaattaattcttctttacagttgtttggtgtatgttgcttgatatatctgcttgatctacagttccatttcgatcaaagcaaggtgaggtcagagattagattacgtgaaggtcgactgaagccaatcgacgtcctctgcaagcacttggatggttcagatgatttggatatcgagctcagtgaaccgtacatggttttcaaggtatttaaaaagattatattatattgtaaagccataggcgtgttaagttgtggagctttctcactgaggtttatactttcttgggcccagtccagttccataacagtttcagtctatgcaatcagttcgattgtgaccgtagtagacagggaacaagcttga

SEQ ID NO: 180235 - DNA, 86 bp, Arabidopsis thaliana landsberg
atgctctccccaacagctgaaattccaacagagccagaacctgacgctgctaaccccttactagagccaactagatattcaaccag

SEQ ID NO: 180236 - DNA, 143 bp, Arabidopsis thaliana landsberg
actcgatcaggaccagaaataaagacatccaatacgagaaagctaagacccagacaacttcacgagataatagcaaaaattacagaaccatgaatctcagaacagatccgtacctgcttcttatactgggagctctcagctaa

SEQ ID NO: 180237 - DNA, 523 bp, Arabidopsis thaliana landsberg
tatacgattactaaagaagctataggtaaattcatttcatttcaatgtattcctgtgagggatgatgggattgtgggtgagccaagaagttgcatgtcccaggaacgtgttcgtccaggtaatcaatgtcttgttgtttccgtgctataagatgatcttggaattttctgatgcaatgtgaacttgaactagtttggcaaacttttagaatgcgagtttgaagtagatgaataaatcctatatataagtatagactgagaatcacagatactttgaagtcaagtaggcattcaaccaagatgaacatgaattcttctttttcctacaaatgttttctctgtctatttcacagcaattcttgccataaaggtttacttattatacgtggttttgttgttcactaggaaacccaagcacggtatctcttcatgttgttggagctcttgttgaaggaaccatgctatctgcagagaaagaatattggggtggtgaagaaggagcatcagttttccggtggttccgg

SEQ ID NO: 180238 - DNA, 465 bp, Arabidopsis thaliana landsberg
gccggcgacacggtctcgttcgaagccgatgccgatcggcgcgccgccattgcccgctggtccgaggtcgaggcggtggagcgctttgtggtcaccgtccagctgaccaagaccggtccggccagttttcgtgccgctttcgaactggctgcggatgtggtgcaggcctgtgtcgtgaccctggcccccgtgccggcccatatcgcccgcggcttcacgcgcgaactgacatttgtgggccgtcagcgtggcgcagcgcccaccctgcctccgatggaggagaatgcccccgaaacgatcgagagcctgcactacgacctggccggcccggcgctggaggaatattccctggccctggacccctatccccgggcgccgggagccgcgttttcgtcccccgatggaacccaggatgcccgcgacaaccccaaaagccgtgcaggaggccctaaaaagcgcccataa

SEQ ID NO: 180239 - DNA, 712 bp, Arabidopsis thaliana landsberg
atggagactggagtttcattttctgtagaattgctacccatatcatacctgaaaattgacactccaagaaggtgattccaaaatccattagcttgcttgcaaagaatgcttattggatacactttgagacccaatctgagaaacatgttttagttggattcatgtttaagagacaaacagccaacaacaaaatttttgcttgggtattcgatgtttatgccatacgtacatgcttgaatcaataaggagaatgatctcggatgcgatggtaaatctcggagaaaatattatattagcgcctttttcctagtaatcggcagatcttgaaactcttgtcatcatgttaagaaagagagatagaagtaagatgagttgtcaacttgtcatgaatagttggttgatgaggaatacaccatcgacctcaaaacaatagcttgagcaacaatgtaattgttggacagtcccaactcttgtattcaaaaggggccaatgaggtgtccgtagtttataactgcaaagctgttgaagctttattaccaatcaacgttgtgatataatctcaagccaatggagcttctgatcttatgggaaagaattaacaagagaaaaattggtgatttatttcccaaatttccgctttcataggtatcttcagtttaccaagccaccaaaatctaatgttgcatgcgaaatatcatccaaactcgcttga

SEQ ID NO: 180240 - DNA, 418 bp, Arabidopsis thaliana landsberg
gtgttttggagctattggtgctcagaaagaaggaaaacagaacagaaagtcacacttccaccaacatactcgatcaccagtagcagagagggaagcagtcagctcagcagtccatccagacacttctactatatcacagaggagaccagacagtccattctgccaaatatacttgatcacagaggagaccaggcagtccattatgcaattctactctatcgcagaggcgaccaagcagtccactttgccagtccaccagttaaactcgatcgcagaggagaagaaccagtccatcctgacagctgacacacttactcgatcacagaggacaagaagcagcccaaaccattctgtcaaccaacctactcgaccaccacctcgaccctctgatcaatccgcactcaaccaaacaacctga

SEQ ID NO: 180241 - DNA, 358 bp, Arabidopsis thaliana landsberg
atggccgtggatcattttatggccagaacgcccaattcctatctcaacggtaatgcgctggtatatcccttcagcctgcagccgggcaacaggtctgcggtaaagaatacgatacggtttgataacaatatcatttcaacaaaagacctgcagttgctggcgccggatatcatgtcgcggtacagttcatcactcgcaggcattcataccctttaccttaccgcgagggccgaaggcaatgccggcaggacggtggtaacgcaattggcggcaagcaccaaccggaaagatattaccctggatgcatcgaaaacggtgatgaatatgaccacacccaaaaacctccagttcgatgcgc

SEQ ID NO: 180242 - DNA, 295 bp, Arabidopsis thaliana landsberg
gcaattgtcaacgaagatgcgtctggagatgttattgctatgcggcttcaaattcaacaactcaaggtagtgttttagcaaagactgttgctttttctctcatatgaacatgttattaagtgtctgaagtcatattttacagaaagaagtaacccgcttaagaggaatgggtggagtagacaatcaggacatggacactatctcaatgggttgccctgcctctccaatgtctctcaagtgggatgggttcaatggatcattcactcctctgacaactcacaaaaggatgtctaag

SEQ ID NO: 180243 - DNA, 124 bp, Arabidopsis thaliana landsberg
atggggatcaaaggacccggagagtttgggttagctacccaagggccggtgttgtttacacgactgtgtagccaaggtgatgttccggttatatgcctttgtggttataactcgggtgttcacg

SEQ ID NO: 180244 - DNA, 252 bp, Arabidopsis thaliana landsberg
  unsure (1)..(252): unsure at all n locations
aacccgaacccgagtcctatactgatatcatcatcaaaggggtcatactcgtaagttcttattaactgatattatcctccttatatgtggagtcagtttacttattggagatatatattcacaggctttggttcttgcggggacagatannnnnnnnnnnnnnnnnnnnnnggcaatgtcacatttgctgtcccatccacagattcttgagaaagcgagagcgagcatcgttgttaaaatcggttcagaccg

SEQ ID NO: 180245 - DNA, 122 bp, Arabidopsis thaliana landsberg
atgacatgtgaaatattacgaaaccacaagccttatcaagcttcagacctacttcggagcctaagtaagtataggtttttttttcctccttttcttacttcctagggtttttaacaaattga

SEQ ID NO: 180246 - DNA, 504 bp, Arabidopsis thaliana landsberg
tttgttttcgtttatgtgcaaatggacaatgaagattatggagaagcagtttctggattctttggtgttaccggcgctgcccccaaggtaaagtagttggtgtgaaatatctgtgtatcggttttgtttctgtgatgcacatgatacaacaaaccaaactgtgaaccagaagatctaagtttccaatctttccttgcgtatgcaggttcttgtatacactggtaatgaagatatgaggaagtttattctggacggtgaattgaccgtaaataacattaaggtaggcccaacattctattttctgtgaaattttatggtttcagggcgtgttgttggttatcttaacgcaatgactttgtttaaaaatagacacttgcggaagatttcctagcagacaaactgaggcctttctacaagtcagatccactaccggaaaatgtaatgcgtctgacatattttaaaacacatctaacatctgcacacaaaactaattctcttaaatga

SEQ ID NO: 180247 - DNA, 1390 bp, Arabidopsis thaliana landsberg
  unsure (1)..(1390): unsure at all n locations
atgtctcaagattcgaatgcgttagagatgatacaaaacgaagggcctaagtgggacgatggatttgaccatgatgatgtgacaaagatatatttggtaggtggtaaaaccggcatagatttcatcaagattgactatgtcaagtctggaaaaccgaannnnnnnnnnnnnnnnnnnnnnnnnnnnnnnnnnnnnnnnnagatggtatgacatatccctttattattttatgttaatgaggataattaatattgacttttgttttcaccaacttttacacagtttgagattgacaatctcaaaaacgaatatcttgaatccgttgagtattactacaacaacagaagttgcgagttcattggagcaattcaattcaaaaccaacttgagggtttccgaaatcataggatattcatattggggtttaaaaaaatttaaactggcaaaacatggaaataaaatcattgggtttcagggatctgctgagtatcgccttaaagatcttgatgcatatttcactcccatcactcctacaagaatggaagcgcaagggggaaatggaggaacaaagtgggatgatggaggtgaccatgatagtgtaacaaagattcaagtacgtattaataaggaaggcatacaatatatcaaattcaattatgtcgacaaggatggagatccggagaaggagcaactccatggctcagagacgggtagaggatacacgctagaaccggtatgtatgaccgcataaattaaatttaaatttgatgacaagcctcttggttttctactaccgcaatatgcaatgtttatttttgtagtttgagattaaccatagcgacaaggaatatctgctatctattgacggttgctacgacgaagattctggtgtaattcaatcactgcaactcaaaaccaacataaagacttcagaagtaatgggagacgatgaaaagggtactaagttcacacttggatgcaacggccatgagatcattgggtttcatggatctgctcaggataacttaaacgctcttggagcttatatcacaacccttactctaactaaattagaatacataggtgaaggaagtgacatttgggatgatggtactttcgaaggtgtaaaaaaggtgtccttttatcataatgatggtatagtaaggtgtatcgagttcgattacgttaaggacggcaaaatcgaaacccgtgtgcagggggggaagaggggaacgggtgattttacaaaagaagaggttataattcctacaactctgaatattggtcgaagacatatgtttttatctatatatatgcgtgtgtgtgttcttgaacactgcttatatgtaaaatctcattttgtcgcagtttacagtggactatccaaatga

SEQ ID NO: 180248 - DNA, 68 bp, Arabidopsis thaliana landsberg
aatctaaggttcgaagcttgaatggtcggatggatgaaggtagtgatggggatggaagttttgaatga

SEQ ID NO: 180249 - DNA, 7787 bp, Arabidopsis thaliana landsberg
tgaagaggaagtccacaaaaagtgatagaagactagctgaaacgacacatgctagggtggtttgtgtatcggtcaaaagaactaagggggatcacactctcacacataacttaaatgatgtaagttctagatggaacatatgatgttaaagcactcaaatgtagctgaattgagtgaggtttagtaattgaagaggttcttattatggtttccgggattagttaggttgtttgttagagatcataataaccatcttatatagattactatctatattacattacatgcattaagtttagatctgtaatgtgtttcacaaacacaagaaattagaatacaaaaccccaaaataagaccaaaaccttatgccaggtctttcaactaactagttgtagtcagctatagtgttcccgatggtcacaaagcatagttccggtagtaacatgtgacacttacaaatacttcagcatccctaattaagatgtaattatgggctcccgtcatgcaaatgaacacaaagaaagtgtataattaaaaaacgatttttttttttgtttttgtaaagaatgttgcatgaagacccaaattagatgtatattttacaaataaaggctaatcgagaagttatgaaccctatcaaaaagaattgtcacgggatgatctctcttgtcaaatggaagtagattattcataaaaattatccattacacatgaattatgggtaaagactggaattacactttacttctagtaagatcaaacaatatgaagcattagacaagcaactgagaaggtatgggcagttgatgtcccttataatagggtaaagtaacagctgatggtaagaaaccctcatggtttacataaaattttaagtttccaaattaattatggtaaaagatggtatctttgaaatatgtcaagagatagctgaacgtatatcttgtccatgttgttatagattaaatctaactttacttcaatcaatctcaatgaaatgaacaacgtcttcaacacaaacacacacgcaacttgagaatcagaatcaacacggaagtaaatgtaaacaagaggcgagtttgttaacccggttcagctgatcagtgtgatcaagcttacgtctggagccgaatcaatccggcaaattcactatcaagaagtgttttgctcaaaatcagatcttacaatgtcaacaatggtggatcaatctctctctctctgctctctctcacttgaatacaagaacaaagaagaagatacaaagaatgagaatataagcgatgattcacaacagaatcttgttaagtaacagaaaccctccactgcagttagagactctctgatccttcaactttgcttaaccggttttaaccactccactaaccagcaataaccagactcaattctcaaagatccaattgaaccattaaaccaatgagaaattgaatataaccataacaggttttaacaatggcggtcataacgttataagtgatatcataaattaatttagacgaatgtgaagtgatatgggttcatattgttggaggtaactatatgattcacatcaactctggtttttttaaaatagtcgtgcatgtggagatgaataaaataactaatttggtcgcttatatcacgtaaaagaaactatgttttcatcgagataaaacgatttatgatatctacttattaggaagtgatttataatataaaaaaatcacataagtcgatgaaaaaagaattggtctcatagtttgataaagtgagatatggtttttaccgtttgtcttttcaatcgtttttggaccaaacaattgttaatgggagcaaccaaaccgcacagcagttggtttcggtttagttgatgcggttcagttttgaaaaagacaaaaaaaaaaaaactgaaacgaagaaaccgagaaaacgaaaaagagaagagagtaacggagagatttgagagagaatcagaaagcgaaacgaaattcagtatccattgcttcaaaattcgacataacttcgaattgttgggtagttgaattgagccactgaactcccacatccggtgaagtgaaagttactgtttttcccggcgaagccaagagaaagttactgtttttttcggcaaaatttgaacctccggcgagatagcatctttagctatagctgggaataaagctaacgacaaagtcccgaggaagcagcatggtccagggaaggagaagcgggtattaagagtttccccgcggagaaaacgctctgcgacaaaggcaacggaggaactgggttagaatctctaatttaccgtttgttgtctttgggtgtatcagaattgtaaagcttgtttgattaaagggttagaatttgtcggaatttagcatatctttaggatgaaaaattgagaagtagaattggaaatctctgtttccgccaaaaatatgattttgagttataatctggaaaatgtctgtgtacgtacactacttcggtttgcttaacagtatatgacttttaattgcaggtagtccaagtgttgctccgactgaagatcttacagttgaagagttaccaccaagactctttgctctagaccggtacccttccgagacaaagatgaacgcgtactctaaaccggagtacatttctgacatagcaaaagtactaaaggggaaaccagagatgcagtttcttctcgattctccatttggggaactttttaaaatacccaaaaacaaggcatctttcaatgctaagcttgtccttggactaatatgccgtcagttagtgacaaagaaggtgaatgagatgtggattgtattcggcggtcatccaatcagatttggattaagagaatttagtatcctaactgggctggaatgtgggaagtatcccaagaagaaagacgttgatgatgttatcagtgtgaaacctgagtgtgagagtgtttggaagactctgtttgatgagaggtttggggacacggttccaacaattgctgatttggtgagctggctgcaggaggaggaaagcatggaggggtggaagcaactggcactatctcttattattttggttgacggtgtggtagcggcccacagtaaccccaacaggcctacttcgaagactgtcgagatgactaagaacctggagttcttctgcaaatacccatggggaagggtgtcctttacccgtactttggggaggatagcaaatttccaaactccttacgatgctcagaaactaataaggggtatacttgtagggtcttatgcactccatggtttcccattagctctccagcttttagctttcgaaacaatcccatcaattgctaagctaggacctgatgatgtacctaacaggacatttgctgagaggtctatccatcgtcttgcctctctgcgagcaatccggacatctcgcattttggagtgtgaggctgctgatgaggtgtgttaaattgtgtatgtacgtacataataagtaaatgtacattatctatggttaacatacttatttgtgtaggttgaggtcaactatattgtgaaaccagctgataatgtttgtcctccatctctttcatgggatgatgaagttgatgatccaagggttgattacattgaggcactgttgatagatgggcaccagtggcaggaggatgaatgggttggaggctatgctagagtaccaaagcagtcgcgcccaccacacctagaagagacaggtaagtataagtataaatgtttttacaaatttttttggtattgcacccagaagaaaaccaattaatagcagcaactggtctattgtagatgttaagaggaaacgaaatgcaccgggcccgagccctaaagaacctgctatgaaaaaacagaaatctgaaatggactgtgataaagaagagactgctgaggattgttttggagagcctgtgcctgagaggtttattgttgaaatgaggaggtctttcaaggagctggaagaccaaatgtatcaaatgcatgaagatatgaaagactttgtccgtgaccagatacgtgctgcccttgatccaaaaggcaaaaggccagaacaaaccataccttcccatgattcgcgggaaccacctacttctatggataaggcaccggttactgcgaagaagccatcgagaaggatgtctacaaaaggaagcactggaacgagaaagtcttcaaggctgactcgtgtttctcatgatgtggacactcctgcactttctgttggctgtaattccaaagaggaagatttggatgtccctggagtacataccactgctttcggcggaagaagaaaaccttcaaagccgaagaaaaatgtttcttttgctgttgacactactgagctacctgattccaataaggaagatatgcaaggattcattgatgaacaggtaagtcatgtacgtacattgctaaatattttataatccatatgtataactgtactgtctgcttcgatacaggatggcgctaataatgaaagtgattttactgcaaatgatggattgaattcttctgccgctgaagaagagatattagacactggatttttaatagttccttatgctggatccacacaatcccatctggtatgtcgtctactaatactcttaacaatctgtttaaatggtgtacgtacatattcgcttaagaagttagttaaactatgtttcaggatagaggaaatgttgttgttggtaagactgtcttcttaggttcaatgtctgggactgtctttgtaacacaggaagagaggcctgtggaagaagctactgttgacaccgagatggaagaagttccatctaatgtgtctgcaagagtttcagaggtagatcttctggtaatcgttatatacagatttccatgactatatgcatatatattacattaatttcttcacttatctaacgcttaactctatggtagcctatgtttcaggataatggaccaaaggatgttgctgaacctggcttagttggtacccatacaggggccgatgaaatagctgatgctgacatagagatggtagacaatccatcaggtttaccttcaacatctgcacaggtatgtgttagtcacttgttctttttccatatgtgtacgcccataagactttgcaaattatttttgtttcaggaagaagcaagagatgccagtgcaacgactgaagctaatggcagcgagtcagaagaaacttatgagccttctgatggagatacagctcacgtacctggcacaagtgtacgtacatttttgtcactatgttctgtgtacatatatattgtttcatacattactaaaaagtttctttccgatgctaaattctacaggttgaggcggcaggagaatccaaattagtgacagtgatggaagttgaaatacctgagaagacccatagtgatcccccgtcaccatttcaagtagttaacaatgtaagctaactcttgcaacaaataaaatgtactattaactgttcaaatgtataaaatttatattatgcaggtcatacgggagttggataccaaagccgttggtgatttgactgcagccactattttggaggtaacaatttgtgtttcaattcctattctcggaatagcatacataggattatatgtgtacattatatagacttgtgtacgttaacttgcatagatagtgatggaagagctgggtattgtcgaggggtctgtaggaactgaggatcctaacccagggtcagatgaagcagacaagaccgatattcctaaaaataatgtatgtacctattttaaacatagaaaaacgtataaaactgttgttgacaatcatatttgttaacaggatgaatcagacaatgctgctgctgtcgaagcaaaagaagaaaaaaaagcatccccaaaggtcccaaaaaaagtgaagaagcaacttgtctatgaacaggatgatgcccatcctcatggttttaaggcaaaaacagttttggtgcccgatgtaccaactcaacagacagaggttgttctcagggctggaaatgtctcatacaaccccctggacatggttgacccttcaaaagtagaggaattcagcaatatcattaaaggaccctctgtgtaagtacattatattaaaatggattatttaatatctcaatcatcatttttgcaagtcttaagcttgttatcaaatatttttctggatttacaagattcacactcttttcgggtttcgcaaagtgcccaacgagttttttgcgaaccttctaacacctggtgaatgggtcgaaagttcggtacgttgcatttatatacgtacactccttgttataaattgtacatagatgattaaatttttggtggaagtgtacgtacactgatatattttttgaacatttcagcatttagaaatgatggcaacgttgatgtggcacaagaacggggaacagatgatagcaaacagatgtattgtattggacatgatgctgacgcatctacttaccaagcgggtgggcgacttcaagaagtgtattaataagaacgggttcaaatggggtaaattactgtccgacattgctaatggagttcacataaaccgtgaacccaatatgaagtggctgaaggatgtcgatgttgtgtatgctccgatgaactggaagagtgaacattgggttgctttgggaatcaaccttaatgaacggctaataactgtgtatgacgctttaatatcgcacacgcgcgagtcggctgtgaaggcgagaatgactcctatttgcgaaatgatgccgtacttagtcagagcgatgtgccaggatgtattgatttctccgtactcagttgaaccttttgagtatgtgcgttgccctttcttttctcaaaacccaactacaggagattgcgggccatacacgatgaagttcttggagttgcttgcgtttggacaccctttttcggaattgacaaccattcgagaagcagatatggtcttctactgtcagaaatactcggttgacatctacgagcacggcaagcgggaggccggtactatgcacttgctttaatcgtccaagaacaatattctcgttctttgcaactaattattatgaacaaacctatcttagatatatgattgcaactacatttaatttggagattgtcagaagttaatttagtatattctatcatattgtcgtacacatcgttcacttctaattatataatgtaaatgtgtacgtacatatctatatgtctcgtacactgcatattaactttataacataactcaagtgataaattgatttgacagcgaacgcttaccaacacaagtatgacattcatttcaaccgtaattgccccaaccaaattcacagtagtggttattaaagtgaagaaattactgacgatctctgactatctcatttcaaacatggttaacccgactcttcccgacgatttatcctcgaagatagctaagaacctggctgaccaatgctggtccgaccttggtccagtggtacgatcaggcactcgtggaagagacattgtctaccgtccggatgtcttcaaagatgccaatattctcaccttgtgtaactcgcccgatgacttccaagctggagggggccacaatccctctggatccgctgatgaaggccgacatcgaccatttttcttacggtgttttgcagctaataatcccacgaccgtgtattacgaaggtattcgtgttataacgcatgaacgaaacatcaatggagccatcaggctcttacagcgtcatgctccagtatga

SEQ ID NO: 180250 - DNA, 483 bp, Arabidopsis thaliana landsberg
aagaagaatcattcctcaagaagattctttcacatgaagatgctcaaaccttgggagattctaagagagtagaagacgaaaagcctgaagtagtatcgaagcaagaggcggtggtgataccgaagaggaaagctaactttttcagcaggaaatggaaatcagaagagaggagaaacagatctcaagttgcaaaaacaattgtggttttgaaacctggtccaaatactttggatgttgattcttcaactggactgcattctactgccaacaagtccaaaaccgggaaaacattttctcgcttctttatcggtttagtcaagagaagactacaatctgctgttggaaagaagtcatgtgatgtttctgttgataagaggagccaaaactgttctacgcaagaagagatacagagtaaatcagaggagaagcatgatgtttcggataaagaagaaccgttctgtgacgaaagaacgaccgaggatg

SEQ ID NO: 180251 - DNA, 341 bp, Arabidopsis thaliana landsberg
atgttaaaaagcttgaccttccatgtgggacaacgcatactctttacttgagagacaacattgaagacatggaagctgctgcaatgaagtttgagaaggaagatggagtttcagatttgattacaactgatgaagatttatataagtatccatcatcgattacacttccagctgcgaaagaagacggatatacaccgtattccactatatactttgatttctatactgaggtagagatgacatctcatgaccagttgcaatcgggaaatcccgtcatgagttatgaggcaaacgcttcatgtatctcctcagttgctgatgattatgaatgctctgattac

SEQ ID NO: 180252 - DNA, 62 bp, Arabidopsis thaliana landsberg
aagtctcgagcaacttcaatcggattctcgaggagcacaaacggttacaaatagatgaataa

SEQ ID NO: 180253 - DNA, 169 bp, Arabidopsis thaliana landsberg
agtcacacaacgacggctgcatgcccacgacgaggagggtgtcgtggatttcaggaagacgatgacccagtacgtgggcccaatcagtcagtggcgtggaggaaaaactaaaggcttaaggccaaaatgggccagcgggatggagagtttggcccagctgaagaattga

SEQ ID NO: 180254 - DNA, 1729 bp, Arabidopsis thaliana landsberg
atggataatcaacaggttgtggaaggtgttattaatttggatgatgatgatgatgatgatactgatgtggagaagaaagctctctgtgttgttccttcgtcgtctgagattgtgcttcttgattctgatgatgaagacaatgagaggcagaggcctatgtatcagtttcagtctactcttgtacagcatcagaagaatcaaggggatgtgactccattaataccgcaatgctctttcgaggaggtcgatttagggaggggcaaggagatgccttctgccattaaagccattgttgtaagttctgtttttctttcaagctaggttacaaatcaatgtcacctgtatttacaaactagctagccatacaagaggtttatttttttgtttatttgtaattttgtcaggagggacaaacaagtagaggcaaagtccttcctatagaaaatggtgtggttaatgagaaaggtgtctacgtgggcgttgaggaggatgacagtgataatgagtctgaagcagcagatgaagatcttggtaatatctggaatgaaatggccttgtcaatagagtgttccaaggtatatatgtctgaacagttacttcagatggaattgaaatttcagtcgttcaagaaatgaacaaaacaatcttgtgttatgttacctcttgccgtaatactcaattgtgaagaaactcaagtttaattatttgtgtttttctccctttctttttggttgatagagtttctgtttgacaaatcggttggtatggactctacgtatgcattaatcagattgagttatcattttcgtgaagagggttctgtactcttttctgtcactatagtgctcctagggcttgatgttgcacctcttagatttcttgcatttgagatatttagtagaaagctcatttaagaacttagctccttaaatttgatcttattttttgcctcttttcctgctttattcatttctgattccaataaatgtacaggatgtagcaagggagacttcacataaggaaaaggcagatgtagtggaagattgtgagcactcatttattctaaaggacgatatgggttatgtttgccgtgtctgcggagttattgagaaaagtatactagagataattgatgtgcaattcactaaagtaagtatcctattttctgatactacgctaatttgtgctttcagggaaaagtatgtttcttactcgacaaattttgttgtctgaatacaatagggtaggagttcttcatacatgtggtctattttcattacctccattatgcctagggttttaaattttgttatcaaattgttatgaaacctgtaatatccatatgatcttgaaattgtttcccaagtcagagtttggcggagcttctaatttttcttgtaactttcactgtaggcaaaacgaaacacaagaacatatgcctctgaaactagaactaaaaggtttggcgaatctgataatgaacttaagttttctgaagaagggttgatgataggtggacttgctgctcatccaacgcatgctgccgaaatgaagcctcatcaaattgagggatttcagttcctttgcagcaatttagtggctgacgatcctggtggctgtatcatggctcatgctccaggctctggaaaaaccttcatgatcatcagttttatgcagagctttcttgcaaagtatcctcaggctaagccattggttgttctcccaaaag

SEQ ID NO: 180255 - DNA, 98 bp, Arabidopsis thaliana landsberg
aggttgcagaggggagctctgtaactttgtcccgttgtgagattggggaagagtttgggcttcctgttgttgggcctgaggctttacacttacaatga

SEQ ID NO: 180256 - DNA, 116 bp, Arabidopsis thaliana landsberg
agggtcatcggatcattgtaattgaatttatgtttctgaaacgaaataatgaaacgatcactagtttaaacaggcactatgttcatcggatcattgtaacgtgcactagttcttaa

SEQ ID NO: 180257 - DNA, 821 bp, Arabidopsis thaliana landsberg
atggccacacaaagttgttacgtcactcgaaatcttaaatccgccgtcaaaaatgctattcagacgaagcagccaccaaccactactcgagccgccgtagatccagattccttaacagtagatgtcgccgtttgtgaagttttatctcttcagttacaattttctccaagcttctgcatggtatatctcactctttctctccttcctcgtttttcactctcttgccattttcttcgtttaggttcatcagatttgtgttgttgttctccgcagggcgatttcgcttctgattattcttaacagctttttatcgaacaagacgatcatttctgcttacgcttctgctggattcttgattagtgagtagtcaaatttggttaaattgtactccaaagtttgatcgatttgtgaacatgatctctgttgttatgattccgttcaggtctgtttcaaactgctgctgttcttgaagttcttcatggagctattggtaaatattggaatgtatttgaatgttttgttcctttttatatgaattatgaattcaaacagtgattgattcattgatcattctctgtgaaatttaaggaattgtcccgagtggattcttgtctccactgatgcaatggagtggaagaactcacttcatattggctattgttggacagatcaaggaggtttgtgtgttttttactctttagagcgtgttactcgttaagcaaaagtgttttcaccagtgtgattctgtttttacattcatctttttaggtccaggattccccgtggctgtctataacacttgtggcttggtgtatcggtaa

SEQ ID NO: 180258 - DNA, 132 bp, Arabidopsis thaliana landsberg
cccaacgaatcagacgccattgaacatgaaattcaattgatcggagaaaagaatcagaagaagatagacgaacaaaatcgcttctccactcaaattcaaactcgatttgaagaaattagaaatgaattttga

SEQ ID NO: 180259 - DNA, 367 bp, Arabidopsis thaliana landsberg
atggttcgcgccagctgcgcttgctgcagagcgggcaggtaggcaactatatacttgtaatggtactggcaatggtggtgtttatcctgatatggttcaacgatgctaccatcgcccgttttttcagtaaaatattttaacggataacagatgatccctgttttactcatattgacccctctgatcaccggcctggcagcgtttctcatgaagcagagcgcaaccgtaaaaggatgggccgtgctgtcatcactggtaagcctggccatcgccattgcaggggtgttcttttatcccagtcaccagcttgtttttgacgcagcctggttaccggacctcggcagccggttttccatgcagatggatg

SEQ ID NO: 180260 - DNA, 76 bp, Arabidopsis thaliana landsberg
atggccaacccacgagtcgtgaaaggggcaaaggccgtgggaaagaaggtggtcgtggataatgatttccaacaag

SEQ ID NO: 180261 - DNA, 63 bp, Arabidopsis thaliana landsberg
atgatcgacatccatacgcacgtatggctggattcgtttcgttttgaagctgcggatgccccg

SEQ ID NO: 180262 - DNA, 123 bp, Arabidopsis thaliana landsberg
agtctaaaccagtttgattctcttacccggaaaaaagccactgtagacatttctatatcctttagtgctgcgaacatgattgtagttatccttcgtaaaagcaccatgtcaattcctgtttga

SEQ ID NO: 180263 - DNA, 278 bp, Arabidopsis thaliana landsberg
cccaactcgtgttgatcgtgctcaccatcaggggccgacaactgccgcggctggtgctgatgttcgtactcctggtcaccatcgccgtcggcctgatcgatcacttcggtgtcttgcccgaccccctcggcaccaatgtcgccgccctcggcctgcagatcgctgccctgatgatgctgtccagcaactcctcccgggagtacgccgttgccgccaagcagttgcgcagtcagacccggaccgcgatccagaacatccaggacgccaccgggctctga

SEQ ID NO: 180264 - DNA, 925 bp, Arabidopsis thaliana landsberg
taacaatgttgtgaggacagttccatcaaagaagaggaaacatcctgaatatgagagcaaggttagtagtatggtttaaactatgactctgtgatcacatttttaaaaattgtacgtaaaattctaataaaacttatagggatctcagatccgagagcttatctcagggattaagagtgacaatctcagagaagctgtgagactacctcaaggtgtagacattaacgagtggttcgccatgaacagttaagacacaatcattatgatccctagttactttttccaaactcgggtgtttcttctaaatttgttctcgtgtcttgtcttttagctgtagatttcttcaaccaaataagccttttgtatgctactcttgaagagttctgcacacagaccacttgtccagttatgaatgctggaaggtaactttctcacttttgatattctcatcgcatcaattcaaatccaaagcttcttgatcgtaaaacaatagttgtagcatagtatcgatctttctcggtcttattgtttgcagatatgagtataaatgggcagatggaactactataactaagccaaaaacggtttcagcccctaaatatgttgagtatctcattgattgggttgaaactgagatcgataacgaagccatcttcccgaaaaaccctggtatatgtgaagctgattcgtagtaataaacatcattaggttggttttaatttgtaacacttgtttctttctttcttattcaggagaaccattccctccaaactttgaggatttcgtgaagcggattttgagaaagttgtttcgtgtctatgcacacatctattattctcactttcatcagattgtggctctcaacgaacaagctcatctcaacacttgtttcaagcattttcttctattcgtatctgtgagttga

SEQ ID NO: 180265 - DNA, 347 bp, Arabidopsis thaliana landsberg
gcggcggcgcagttccggcggctctcgctgctgcaaccggacccgtccggcgcgctgatcaacgccgccgcggcgctgctcgcgctggccctgccggaggaggcgctggcgagcctggaggcggtgccggagaccggacatcccgccgcctggcgccaccgcgccggcgcccacagccagctcggcgacgccgaagcgaccctggccgcctgccgacgctgcctggcgctggacccggacaatgccgaggcgcaattccgcgaagccggcacgctgctgatgctgggcgactatgcggccggctgggccggctacgaggcgcgctggcggctgtccgaccccccgcc

SEQ ID NO: 180266 - DNA, 197 bp, Arabidopsis thaliana landsberg
acctggagaaggagaatcggggaagaggagaagcagctggtttagacggaatacgaaatccggcgaatgaagcagcagccggagaagatccagtgccaatgggagaatttcgaaatgaagatctaatggcggatttgagagacgagacagaggatctgctcatgaatctagaagccattgtaagagctagaaaatga

SEQ ID NO: 180267 - DNA, 250 bp, Arabidopsis thaliana landsberg
atggcaggtgagactatcgccgatctcttcttcttcttcttcttctgattcgaatctctcgtccccattccctgatttttttgatttacattagataggatcttcttcaccgagcttgtggctggcaccgaatccgagcaagagatggggagagctcttcttgctcttctacactcctttttggctcactctctgtttaggcatcgttgttccttacaagctttacgaggtctatgcgatcatcaaatga

SEQ ID NO: 180268 - DNA, 275 bp, Arabidopsis thaliana landsberg
agataacctgctgcgtgaccgatgaactcatcatggagccacggtctgccgttaattcaatgatcggtgtgggagtcatcgccggggaaagaaaattaaggaaccctaggacacgatttggcaattcagaatttttgtcaagatcgatgttggtaagtaattagggctgtgacatcatctttggttattgacttatttccttgcgaaataaattaaaagagtagtttttgacccaatagaattatgatacttacaattttgactcggttatgtga

SEQ ID NO: 180269 - DNA, 610 bp, Arabidopsis thaliana landsberg
ggagaaggacaaagtggtggctgaaagtgagaaggagaaagaggtggctgaaagtgagattgaggtggctgaaagtgagaaggacaaagaggtgcctcaagatgatgagatggatggaggtaaggtggctgagagtgatggagagatggatggagagaaggacaaagaggtgcctcaagatgatgagatggatggagagaaggagaaagaggtggctgagccaagtgagattggggtgcctgaaagtgagaaggacatagaggtggctgatagtgagaaggacaaagaggtgcctcaagatgatgagatggatggagagaaggagaaagaggtggctgagccaagtgagattggggtgcctgaaagtgagaaggacatagaagtggctgatagtgagaaggagaaagaggtgcctcaagatgctaaggtggctgagccaagtaagaagcgaggaaaggcacatgaggatggagatgatcctagtgaagagggagttaaaaagccaaaggtggtcaagaagctggcagagtcgaggacggatgctaagccggtgtatcggagtcctatacagacgaggtataggaggaaaaagacaaagaagaatgtttaa

SEQ ID NO: 180270 - DNA, 314 bp, Arabidopsis thaliana landsberg
aaaaagacgcgtacacgtttctttgcaactggttcgagaaattcccagagcacaaaggaaatgagttctacattgcaggcgaaagttacgcaggttaaataaaaatcatcttgtgttttttttaactaatatgtctaattcggttttataaaattttttaactaatatgtcatcttctgttaaatcatcttgtgtttagtttttatattgtctaattcggttttataatttttttgggtaaacgtgtgtgtgcaggaatatacgtacccgagttagcagaacttgtgtacgataacaatgaaaagaaacaatga

SEQ ID NO: 180271 - DNA, 52 bp, Arabidopsis thaliana landsberg
atgacataccaccagagcatgcgacaaagaggacagcaaatgaaaactacag

SEQ ID NO: 180272 - DNA, 248 bp, Arabidopsis thaliana landsberg
atggtggcggcgagcggatcgcgacggcggctgaagaaaccgacgcgcggaaatgaaagccgcgcgggtccgatccaagcgttaaaaaggcttatgtccgacggctaggtggaaggccgtcggagataaccttatctccgacggctcggtacaaggccgtcggagataagcgctatttccaagagccggttgcggccgttggacataagcttatctccgacggcctcgtacagggccgtcggagataa

SEQ ID NO: 180273 - DNA, 731 bp, Arabidopsis thaliana landsberg
atgaggttatacctcctccttaatcgaatggtaagctatgcctcttcgaaatgccataaatggctcattaattgaatgattatttatttctatagataatcatgtcaaatctagctaagctcgatgtcgttgcccttgatgtatctggtaaaaattatatgtcatgggaatcagatattaagatgcatcttagatcaaatgggcttcttagcaccatagatgcatctgaaacgacatcagatgagagtaaagctaaagccatggtatttctacgccaccatctccacgacaatttgaaaaatgaatacatcacgagagaagatcctgtggatctatggcaatcacttaaagatcgtttcgaccatcaaaaatatgtgattttgccaaaagccagacatgaatggctaaatctccggtttttggattacaaaagtgttagtgattataattccgccatgttcggaatcacctccaggatgatattatgtggtgaaaaagtgagcgattatgatatgattgaaaaaacgctctccacctttcatcctggaaatgtaatccttcaacagcaataccaggccaaaggatacactcgttattccgagttgatgcaagtccttttggttgctgaacaagataacgaactcgttgtgatgaatcatttatctcccccacctggatcagctccacttttagaaatgaatgttgctacatctagtgatgataattggtga

SEQ ID NO: 180274 - DNA, 427 bp, Arabidopsis thaliana landsberg
atgagtaacgtgggtgtgacagtacgagatcgagagcggcttattcgtacggtaaagcttaaaaaggaaattggttattatcctttggtagccaagacaaaaaaaaatgaaccagctggtttcaattacgtggcagattttgtttttgtttacatcactcgctttctcattcgttcaggttcattgcagacttccctcaccgccggtatcttgtctcttcttctctctcaaatcacatatcttcctttttgttttgttttttttgattaacttattgtttgttttccccagttgatggagagaatgaacatgagcgaagaggaggagcaatgcaaaagaaaccaagaggcattcaagagattcttcgagcaaatccccaggactgcggtgataggcatgctttccttcttcctccacggccagatga

SEQ ID NO: 180275 - DNA, 181 bp, Arabidopsis thaliana landsberg
gaatttacaagtttgggatgcaattggagataatggagcattctggaggaaaacagagaacttatgttgcagaagaaattcggagaccaaaaatcgtgtaggtgtcgatcgacaccaccccttgtgtcgagagacacaatacctgacgacaattcaaagacgcgttttattgaagttatga

SEQ ID NO: 180276 - DNA, 82 bp, Arabidopsis thaliana landsberg
atgggaactactgatcgtggtggtggcagtcgcagccgccggagaagtgatcgggatcatggaaggagagacgaatgtggac

SEQ ID NO: 180277 - DNA, 187 bp, Arabidopsis thaliana landsberg
atggatctgttaccaccactgtcagagcgagataaagagatgctctctatagctgtcttctcaattggccaagagacgctgaagagcggctacatcagccaactcagaagtggcaccttcaatatgtcaactcgtgaaagcaagttgcccgtcgccgtgaagatactgacactgcccagtggacgac

SEQ ID NO: 180278 - DNA, 1012 bp, Arabidopsis thaliana landsberg
atacaacttgagatttggtttccaagctattacaaattctcagatatttcagtcaattagggttttgttgccaaaagctatcaaaagaatcaatcgttctatttgcaatggagttcgaaaggtatctgggggaaggttcgtttggatcggtgagccttttcagttacaaaagacgatgcgacgttgagactctctacaccgccgtgaaacctctgacgatgctaagtctctctacgaagagtttcagatcctgtctaaattcaagggttgctcgagaatcgtccaatgctacggtagcggagtagaacagagacttaacgacaagggttacgtagagtacacgattcctatggagtacgcagccggaggaagcttgagcgatttcatggaccgattcaacgacaaaaaattgcctgatccgatgatcagaaagtttactcgtatgcttctcgagggtttagccacaattcacagacacggctatgttcactgcgatctcaaacccgagaacatccttgttttccctggttctgtctgcgatctcaaattgaagatttctgattttgggttgtcgaaaagagatggagacactacgtggtggcatcctcttaaatcgtatgcgggaacaccgatctatatgtcgccggagtctatctctcacggggagatagggaaaggacttgacttatggttgttgggatgtgttgtgttggagatgtacactgggaagagaccatggtggcatactaactatgaactagaagatctcatgaagtgttacgagccattgtttccgcctaatcttccttgtgatgcaaaactctttctcatgacctgctttgcgcctgaaccagatgagaggaaagacgcgttgacattgttgagacaaagcttctttcgtcgagatgtcaataagttgacaaagcttctgaaggtttataattgtaatgatttcaccctggaactgaagaaacttagacagatgctttcggaaattaggagtatgggttaa

SEQ ID NO: 180279 - DNA, 257 bp, Arabidopsis thaliana landsberg
atgctttccacagcagcagaggaagatcctgaaggaggaagcagagaaactaataatggcggcgagacgacaccggacatgcaatggagatcgtggattatcccaatagtagtgattgctaacgtcgtcgttttcgttgttgtaatgtactataatgattgtcctcacaaaagccatcgatgtcttgcaaagttcctcggacgattctcttttgagtctttcaagtctaatcctcttcttggtccttcttcctctac

SEQ ID NO: 180280 - DNA, 645 bp, Arabidopsis thaliana landsberg
atgggttggaaagaacccccttttaagcgtttaaggagattcgggtttcggtaaggttccccataaccaaattttttctaagaataggcttaaaaataaatgctaagatcatatgttcgtttttcgcgggtttttccaattgggtcaccactggttgctgatgtatcaagggccatcctaaaagtggcggaatcatccaaagcaaaggatcttgatctcaaatatttcaaaaataaagatgaaacttgcccggatccagtcacaactccagatccaaatccgtcaacatcatctaggcagctcggtgtagacagtttctggcttttgtttgttgttgctttcataatgtgtcttttcaccctcggaaaattcactttcttgttcttcaagaaaaatcaggttgctgatttgtggaaagagtttcatcgaccagatggagattcgtacatcaataacgtggagaaatgttcttgttcgccaacccaacaaacgtctggcaacaatattcaagaaacaaaccaagaggatagtgggaacaacattcaagtaacaaaccaagaggatagtggtaacaacattcaagaaaccaaccaagctgatactgagaacaacattcaagaaacaaaccaagtaaatcattgttaa

SEQ ID NO: 180281 - DNA, 201 bp, Arabidopsis thaliana landsberg
atgaccgcacacgttgatggcaacacccaaggcgagcaggtcctgctgatcgacgacctgtccgacgacaaggcgccggccgtattcggccacaacaaactgggcgccttcgtcgcccaggctcgggcccaggtggtcggcgaagtcccggacctgaccaccgccgccggccgcaaacgcatcgcctcccttgcccaccag

SEQ ID NO: 180282 - DNA, 263 bp, Arabidopsis thaliana landsberg
gttggcacagaacgttctgacactttccgcataccacgactgtctgtgagtgactgaaaatagttgtgctgcagtaaaagaacaaagcccataataagttttaagtttcttaattttatcttatgtaacaggaaaatattgatttcaaatcttacatgttgatacagtcagagcacctaacaagctacagtaaaattaaacaaaaatcagagtccacagaaagagtagataaacttcatacaagtaaattagaatccgattaa

SEQ ID NO: 180283 - DNA, 204 bp, Arabidopsis thaliana landsberg
gaacccgtcaaccggactggacaggtcaacaccgttgactttgataacacgcattctttgggaaaatccgagcgaggagaggagttttgcaacttgaccaacggctcacaaccgacgaagccacttctagtgtggtggctcaatacgcagacggcaatgacttattcaaagtgggagccgttagtgtcctcacaggtgaagacg

SEQ ID NO: 180284 - DNA, 397 bp, Arabidopsis thaliana landsberg
atgattgaagatgccattgggcatatatatgatgacacacctatggtagatggagatgcaccagtgaccggacccaattcagaagttgaacagttttacaaacgggtcgaagaatcaaaaaagcctttatgggaaggttgtgaactcacagaggtaaccttatttgtgttgttgtttaatgtgaaatcctcaaacaaatggtcagataaatcttttggtgatcttcttgaggttctgcatatggctattcctaatggaaaggacctgccaaagaatttttatgaggctaagaaagtaatttctaaatttggactgggatatgaaactattgatgcatgccgaaataattgccaattgtaccggaaggacaaaaaaaatgatgatttttgcacaacct

SEQ ID NO: 180285 - DNA, 645 bp, Arabidopsis thaliana landsberg
atggcgaatttacatgaaccaatcttcaggctcaagccacctgactttgtggatccagagaaatcatctcatgtttgtcgactaatcaaagccctctatggtctcaagcaagcgctacgagcttggtcttacgctttcagcaattttctaatagactttgtattcatatgttgtaagtctgatctgtctctcttcacctatcacaaagatggcgaaactctggtattacttctctatgacgatgatatattgctaacaggaagtgatcaaactctcttggatcaactgctcatatctctcaactcatgattttctattcaagatcttggtccacctaaatattttttgggagtggagattgaagctcacttagtaggtctatttctacatcaatcagcttatgccaaagatattttacatcaagcagccatgtctaattgcaactcgattacgactcctctgccacaacaaattggcaacctcgattcagaacttttctctgagcctacttattttcaaggccttgccgagaagttacagtatttaaccataacaagacctgactcaatacgctgtcaacttcgtgtatcaaagaatgcaggctcaaacaatatcttacttcggtctcctaaaaagaattcttag

SEQ ID NO: 180286 - DNA, 311 bp, Arabidopsis thaliana landsberg
gtacatcggaaaagaaactctctgcttccgtaacagaatttgaattcgtaaccgctgatctagccttcttattatcactcctcacattcgaatccagatctagatttcccggtaacgtcgagagcactactgtctcacgcttctgccgtttacggcagttttcaagcggaggagcaacggcggagtcagcaacaattttgatcgacggaagtagatctaacctccgtctaagagaagctcgagaagttgaatcaaccggtgccgccggttcagtctctccaacaacaccgcaacaaatcccagccatttga

SEQ ID NO: 180287 - DNA, 502 bp, Arabidopsis thaliana landsberg
atcgttttgattcgaaagatctctctggttcgtattctctgcgtttttccttttggttattttcgggtttagggattgttcgcttataccgcaatcgcacccagacgcttcttttttgcagttgcggtctgcgttcggtacaaattatactaaaccgttcctttgtttttttttttcgtaaaccgttccttttaaaaagtgaatcatatctttttttttaagcaaccacacactaattaaaaactcaactccacaaccgttacttaatttctagaaaaattagtttacataaataatttgaaaaataataatctcaaaaatcaagctaaacagtctgagagttgcataaactaaagatgttttctttctttttaactaagtgttgttttcttttcattaagttcacgatttcgaaaagtacatcagtggcagccacttacaacttatagacatacacaagaaagcaagtaaactaacaaccatggcatcagaaaccaacaag

SEQ ID NO: 180288 - DNA, 480 bp, Arabidopsis thaliana landsberg
atgacttcccacggatcctcagacgacgggaatgcactgtcccacactgacgggcttgcacgagagggctttccccgtattttgtgggaggtacttcagggggctgttacacgacgcctcctcagtacacggtgcagcagttcgagaagcaccgagtgccccgctgtagggtgaggatgaccctggagcctcatcccctacaaccaggctggcgtttgctggactctgagtcctttggataccgggctgaggatacgatcgaggcgattgcccttcatggactgaccactttctgcggatttcaccccttagagctgtccactcaccccattggcttgttccccgctgagaaggaggacgacccaatgtggaaggaccgagtggagcatgccaaggacatctgggctatctacccaggacagactactcacttgaccgtgcggtgcatgaatgccctgtaccgtctgcaagtgatgcgtg

SEQ ID NO: 180289 - DNA, 240 bp, Arabidopsis thaliana landsberg
atgggaacatcccattgcgatgtcaatttggcaatacattgccaatcttcgattgactctggtgcgcttcctagtgaaccgttgcaagaggttttagccgaagatcaaatgaggctcgtagcgactcttcctcacaactggtgcttcggtcgacgaatatgggttccgggaatattatgtcttcgaagatttgacaaattggcgcaagagaaaatgaaaactaatggattgaatccgtta

SEQ ID NO: 180290 - DNA, 92 bp, Arabidopsis thaliana landsberg
ggcggaatacctaagcctcctcaaccagttctcaacttcaaccgtgatgacctcaagggcttaccattcactttccctacaaagataacaaa

SEQ ID NO: 180291 - DNA, 580 bp, Arabidopsis thaliana landsberg
atggcgcaaaagttttcagacgtggaaaaggttgtgagcactttgaaagcaactcaggtatctcttagccaaaatttcaatattatgcaatctcgcgttcgatctttgtggaaaggaaaccctcaaggagtccggaggagcatgttcagttcaccacagtcccatacagggaataaaactggcgaacagatgactccgggtgcaactgatcccagaactcaaccaaatgtcgtggaagtacaacctgatggtgaagaacagctcgggagtctcgtgagcaagaaaactatgagcagtttgaacctatgaagaaggttcgccgtaaactgaaagagataaaatcaaagttccattaggccaccagttcggaactagacatcgatcgagtcatcgaagcaacaaggtggacgcatttcacccctcatattacgagcataagaatcaagattcccggaagctcaaccgcgagccctataatgggctagaagatcctaaaagctatctcgcggctttcctgatagccgtcaggcgagtcgatttggacgaagctaaacaggatgcaggatactgcaagctttaa

SEQ ID NO: 180292 - DNA, 256 bp, Arabidopsis thaliana landsberg
ggaagaatttgacgaggaaaaagaacctgaaggaatggtactctctggatggacaccatctccagctaccaatggcgatagcgcatcaacatcaaacaacgagaacccagttgatgttacagagagttcctcaggatccgagcctgcttctaagaagagaagactctctgagaccgaggccagtaatcataagaaagaaacagagaacgtcgagagtgaagatgatgatatcatggaggttgaaaatcccatgatg

SEQ ID NO: 180293 - DNA, 1342 bp, Arabidopsis thaliana landsberg
gtgtgtagaaatggctcattccatttgaagggcaatgtatatgtccactacagatcactagaatcagctattcttgcttaccagtccattaatggtcgatactttgcgggtaaacaggtacactgtttctctggagacgtttaccacttcctttcattgaaaaatgtgattaacgatttcgtctagtggaccttcctctgtaatattggcactagtttgtcagatctttggtagcacacatcatatttgcgtcttcactatttgtatcttcgtggcataatgttggagacccatatctaggtttcagttatcttagcctttgtgtaggacgttttgtcagaggtctcatctttccgatctgtggcagtttttgttaacatctattggttgaatataggtcttggtgtatcgtagaatagaatgtcaaaggatttgtgttactttgctgatgtgtactttgaggcttgatttctgatactttcagcttgctgacatttatatccatgataattacacatcctcatcaggtgaattgcgagtttgtcaacatctcaagatggaaagttgccatatgtggggagtacatgaagtccaggcttaaagtatgactcttcatcatttgagattccaacttcttgcttatctctagttcatgattttcatctacttttcagacttgttctcgtggatctgcctgcaattttatccattgtttccgaaatcctggtggagactatgaatgggctgaccatgacagaccacctccaagattctggattcacaaaatgacctctttatttggttattcagatgaaaagcacatggaacatgaatcttcagggtcgttaaatgattcaatatcagatctatcaacagattcacacaggtaggttgctttatatttggaattctaacttttgaggatcctcatctttaactaacttatcagcgtatttcctacttaatttggttatggagcgtcatgctcatgtgttttgtttccatgtcaggcaaccttcaagaagatctagatcgagggaccatgatcatgctaatgttggatctacgccttcttataggagccgtaaatatcatggtgatactcaggacagcactcgtgaagacaagcttcgcaggcatgccgagaactgtcatgatggtgatgacagtccgagcagagatggtagtttagagagggagatgtataaagagcgacggtatgctaaggacacattgcatcgtgatagcagatggtctgaacactctcctggacatcgggtgggaaggaagagaatccatgggaggtattctgatgatgattctgctgatggagatgactatg

SEQ ID NO: 180294 - DNA, 106 bp, Arabidopsis thaliana landsberg
ggtttctcggtggggatctggttggtcgctctgcctcatcgggttgctcgatagaaagtttgtcgaccagttggccgttttaaaagaggccatgggcctatttcgg

SEQ ID NO: 180295 - DNA, 68 bp, Arabidopsis thaliana landsberg
caattttcaaaatcgtgtggctcttcgacgttccctcgagctcagggcatttactgtctacagtatag

SEQ ID NO: 180296 - DNA, 387 bp, Arabidopsis thaliana landsberg
  unsure (1)..(387): unsure at all n locations
atgtcccgttccgcctggcggcctctcgtgctgctccccatcctgcttctgctgggctgttccgaaggcccggcccacgactcgacgccagcgcgtccggtgctggtcgtccaccctctcgccggtaataccacggccgccagctattttggcgaagtgcgcgcccgccacgaaccgaagctggcgtttcgcctcaccggcaagatnnnnnnnnnnnnnnnnnnnnnnnnnnnnnnnnnnnnnnnnnnnnnnnnnnnnnnnnnnnnnnnnnnnnnnnnnnnnnnnnnnnnnnnnnnnnnnnnnnnnnnnnnnnnnnnnnnnncccaggccgaccggcaactggcgcaagccgacctgcgacgctacagcaaactgctggcccgccag

SEQ ID NO: 180297 - DNA, 269 bp, Arabidopsis thaliana landsberg
atggatggccgaaatgtatttgcagagctagagatgatgatggcgagagaattatatctttgtgagctcgcgaggtatggcaacatacacggggttgcgggattgatgattcaatactttgcctccactttttgttagatcgaattgctgtgaacaattggcagagcaacagaggaaagtgctgcagccaaagtatgagtttccaagttcagaaaatgtgtttttgcttgaatctgcagatgattcctttggagatcagagatgtcttg

SEQ ID NO: 180298 - DNA, 215 bp, Arabidopsis thaliana landsberg
atgcccgttcgctgtgcagccaagatcgcccgaaatgggcgtgtacggtctgcaaaactcgtgaattgtagccggtgcgccggttaggcggcaagttgccggcggacgttgatcccccggcccgccgccgccatctgggtggaaccatggccattaccctgaaaacccccgaagacctggccgccatgcgcgtggccggccagctcgccgccgaa

SEQ ID NO: 180299 - DNA, 205 bp, Arabidopsis thaliana landsberg
atcaaatgataacataacattgagagccacctgctgccgttttcttcggcgactaacgatgacgatgccgaatcttccaaaggagttggtagaggagattctcagctttgttccagccacatatctgaaacgtttgagctacttgcaaaccatggaaccgtttgatccacaacgacaagagattcgcaagaaagcactacgataa

SEQ ID NO: 180300 - DNA, 185 bp, Arabidopsis thaliana landsberg
atggtcacagattgcgtcaaggcttccgggtagaaccgacaacgagatcaagaatctatggaactcaagcatcaagaagaaactgaaacaaagaggcattgacccaaacacacacaagcccatctctgaagttgagagttttagcgacaaagacaaaccaacaacaagcaacaacaaaagaagcg

SEQ ID NO: 180301 - DNA, 148 bp, Arabidopsis thaliana landsberg
caattgtgtaccagcttaaaaatattggcagacctcagcgagtcctcacacgaatggctgacagtcttgcactggaaatctgtctccaagattccgtgtagttctcaattcgaccatccaggaaaaatagtatccaattggatcatac

SEQ ID NO: 180302 - DNA, 69 bp, Arabidopsis thaliana landsberg
tatttactgaaaaatgggaatttaccaggagatgtacttgtgagagaagggagaccgtattttcggtag

SEQ ID NO: 180303 - DNA, 908 bp, Arabidopsis thaliana landsberg
aaatttcactagaactgtttggaattgttctgacttcacttgttcttaccctctggtctcctcaccaagcagctaataacacttatggcgaaagagaaaaatcattgcaaaacttgcaagaaacttctggggaaggaaatctcgaaaacatgatatgggtcgagaaaggtttgcgggagctggcttcactaaaggtgaataatcttaacattctcatgtgaactcttctctatccttttttagaatcagagttctgttattcaagagacagatttgaagtatgattctttgcgttgtctaaaggttcaggaggcaattgcatttgtcatggctcaaaatagacggaacacatcatcaaagttttttgtttcaggtgataaccaaatatctaagcttaagccatgcttaaatttgaatattttcctaattcatgttttcttttcttgaacaattcatagacgaagtgaaaatgccaatggatggacaatttgaagcctttggtaagtcaataatttgtacattatgatctgttctcgttgtcattatcacaccaagtactgatgtgatgtgatgagaccctactcaaggtcattcattacatgataaggaaacccctgaaattctgccctcaaaacattctttctgcattttggtttttccttttcagagttgagcgacgaggaagttgaagatgtgaattttaaacaggtaaagaaaaacagatcaattctctatttccattagctgtcatgtggtcatctcactgtagctttggatataggcctggctttcatatttctggagaagagctaaaaaccatgaaatcgaatctgatctagtagatgagcgactccagtattggataaaccaagggactcgatctgccacatcacaagatgctgtcgatg

SEQ ID NO: 180304 - DNA, 435 bp, Arabidopsis thaliana landsberg
cctctccgcaatcaaaattgattaacgcggagaagcttcccgctgcagtcagaaatgtcttagagaaaattggtggcaaaatattaaacaacaatattaaagttgaacattcagacttgtcctcctttgtttcggatgcaagttacacaggtgtcttggagtccatttttgatgctgcttcatcagatttggatggggttcaaaatttaatttatgatttgaatgctcaagagaaggacgaacttcgtagttttcttttggatccaaaatggcacataggacatcagattggtgacctatacctcagaatctgcaagattttgcccattcatcgtatttatggagaaaccagtgctcaagaatccaagtattctgatcttgttaatcctcataagcatttacctccattagatgtgccagcctgtcttctaggat

SEQ ID NO: 180305 - DNA, 445 bp, Arabidopsis thaliana landsberg
atgcgcattatcggtgttggcgcgagtgtgacgttagagaaacggttgcgcggtgaaggcaattccgttgacctttcgtggtcggcggccaccatcgccaaattcgcctcttatcgcgtttatcgcgccgagcactcgggtgtgacggagcgagacaagctggtggcgatcaattcgtcggttattgcgacacatttaacggacgataccgtgattccgtcgccgaagccgggtcgtacctatttttatcgggtcttcgccgtcgatactgctggacggagttggggtagcaacgaggaagcaatcactttgatcgcgacgacgacgtctacgaagcattccgctccggttaccgataagccgagtctgtcaaaccagccggttaccgggcaaaatagcgcgatggcagagacccgggatgtcccgatgacgcatatcaagcgag

SEQ ID NO: 180306 - DNA, 437 bp, Arabidopsis thaliana landsberg
cttttgcgcaacctagttcagagagaccatcgtgcaccgagagggacgagggaggtcaccgccggagatttttgtctacatcgacggttcgaccgtggtggttacacggagaacttcagagagttgagcggtaagttcactacaccaaaatacctaacttccaagggtctacaccgtagaacgttagcgcaaaactctcggaagtaatctaaaccgtcggaagttagccgaaaccgtcggaaattagcccgtcggaacaaattagtcggaagttaggctaacttccgacggactcttggaagttaaagaaacttccgagagggccgtccgccgctcggaagttaattattaacttctgaggggccgtccgccgtccagcacggactaacgccgtccgcagaataacttccgacggcctctcggaagtttaccattaa

SEQ ID NO: 180307 - DNA, 154 bp, Arabidopsis thaliana landsberg
atgaaggatggtatccggaagcatagtatcacattgtggattttggctgacgcagagaaacacaagtggtcgagtaaagatgttcttgtactttctagtcactatgatggaagtttgagaacatgtttcaaactaaaaggttgcactcataatg

SEQ ID NO: 180308 - DNA, 155 bp, Arabidopsis thaliana landsberg
aatttaaaggagagattgaaacggttgagcgaacaaaagacgaagacgctaaaatgtttaagagacacaacgttaacattgatttcgaagttcttgttcaagtcaaagaagctatggttgatgtttcatcaaattgcatggagttagcactaaag

SEQ ID NO: 180309 - DNA, 66 bp, Arabidopsis thaliana landsberg
atgtcgtcgtctgacaagaaaccgttgattccgtcgtcacatatcaccgtcaaagttaaaaatcag

SEQ ID NO: 180310 - DNA, 1103 bp, Arabidopsis thaliana landsberg
atgagtccaattcagaattttgagcaacactctcgtcgtctcgtggagcctgacctacgtaataccactcattctcttcatttcgtcgttgtgttgttttgtttgtttgctcagaattagtttaagaagctttgattttggatttgaaaatttcttcaagctttgattttttctgaggaatttttgtttgattttgagtcagttcaagttaatttaaaaatgtagcgacacttactcgaagcttgtttttgtgttctgtagctattgaggagaggcttgcgatggtggtggaggtcagggacagtctagagatcacacatacggctgagtacttgaattttctgaaatgttacttccgggcatcttcagtgattcttcttcagattacaaagcctcaattcactgataatattgagcacaaactacgcaacattgtggttgagatcctcaatcgtctaccacatagcgaggttcttcgtccttttgtgcaagacctcttgaaagttgcaatgcaggtgctcacgacagataatgaagaaaatgggttaatatgcattcgcatcatctttgatcttcttaggaactttaggccaacattagaaaatgaggttcaaccattcttggattttgtctgcaaaatataccagaacttcagattgacggttagccattttttcgagaatgtcaaaatggaagaagtgaaacctgtggagatacctacaccatctgatcagtcgctgtccattactgcaccttccaggaatgggcagatcaacccaagtactcgttcattcaaaatagtcacagagagccccctcgtcgttatgtttctttttcagctgtatagcagacttgttcagattaatattcctaatttgttacccctgatggttgctgctatatctattcctggacctgagaaagtttcttcacatatgaagcctcagttcatcgaactgaagggtgctcaggttaaggtgagacaatggctctctatccagaaggaaaccataacttatttgggcagtgagaaaaatatttaattaaggcctacactgccttgttgtttcacctgaattattttgttttttaagggatattga

SEQ ID NO: 180311 - DNA, 145 bp, Arabidopsis thaliana landsberg
gaccccaaacggaaggttcacaaacctgttaaaggggttctaagactggaaattgagaaacatcggaatggacatggagactttgaagatctatctgagaatggaagtatcacaaatccctcccttgatccaactgaccgccaaa

SEQ ID NO: 180312 - DNA, 537 bp, Arabidopsis thaliana landsberg
atgtctagtcgtttggaccaattggtgaacaagtacaacaaatcgtgtgaaaatgtttcatttgctgaacacatgattttgaaagacaagtatgagagtctggtgatagagcatgagagcctaattaaaacgctcgagttgctagagaaaactcatggattcactgttgaagatctggtgactaagcaaaaagaagcattggagaagaaggaagtgattgaaaagtgggagaacaagtttggtgaaatggagaagaagctaaagactgtcgaaaggagtatcgaatacataatgtctgttgatgttcaaaccggtgtggattcaggtagtgcaaatagacctaatgtgaagaatagttatcaaagagggatattttagtgtttttgatatgtggtgtgtccacttactctatcaaaccatgttctctgactaaatctctatgcagatatgtcgactagtgaggacgatgatggaaaccgaagacaaagaaaaggaagactcattaactcatcagatcatgaccacttcattctttga

SEQ ID NO: 180313 - DNA, 138 bp, Arabidopsis thaliana landsberg
tcgcgaatgcggaacttcaagacagcagcataaatctgaactacgggacaaatctaagcggtgatgcaagtgttgctctaggcggaacgctaaatgtaaactttagcgcaacaccaacctttacctccgttactgcag

SEQ ID NO: 180314 - DNA, 857 bp, Arabidopsis thaliana landsberg
gcactacaaagtacagtggagtttgaaaaagaacttgaaaagaaatttggtggtggtgttcctactaaagatattgaagatgacattgaagaaattggtacatgggaagataatagtcagaatatatccaaaatccgcaagaaatatgaaaagaagtttgctgctagtcaagaaaccgaggagaatgtatattctatgttcttattctatattatggaaaaaacactctacaaaatttatattaacgcttacactttattgtgatagggttttcaacaggaaaagaccggaaacaaagatttatctgttactggagctggggtatattccctacctctagtctcgttctctccctgattttgttggctgatgtcatatctattgtaattctgaaataccttagagagcaagtgaaaggttctttactcttaatagattgtaggcacaattttgcatttatagaagacgggaataatatcttgcatgtcatcttcattttcgggtctacttgaccttactacatacctggaaaactgaaatgacatgtgatccacttgtgccattctatctttacaagatttatttactcactagatactcgaattcgcagtttaacttccgtggaatgatctcttcctgctttgaacctcatttaactccatatattgagttggaagagaaaacacttatggatgacctggagaaaattgttcaggtaatataatatttttcgcttcacgagattattttgttccaaggtttgtcaagttatcctagttttcgtttcgttctgtcagcaagaatcatgggatgttgaggatggaagcctaaataatgttcgatcgagtagcacacag

SEQ ID NO: 180315 - DNA, 220 bp, Arabidopsis thaliana landsberg
atgtgttcggccaacaaggtcgctcattcccgcgtctacgcccagggcctgaccctcgccgtcctcatcgtctcggccatctttgagatgaacgacgccaagtctggcagcggccgctggcagacggtcatggtcattgatcccgatgaccccgagcacaagcacctcatcgagaagaggattcacaaggaggagtacgagggacaggacctttggaagg

SEQ ID NO: 180316 - DNA, 188 bp, Arabidopsis thaliana landsberg
gaggtgtgaagagaatcagtggattgatctatgaagaaacgagaggtgtgttgaagatttttctggagaatgtgattagagatgctgttacttacactgagcatgcgaggaggaagacggtgactgctatggatgttgtttatgccttgaagagacaaggaagaactctatatggatttggtggttga

SEQ ID NO: 180317 - DNA, 500 bp, Arabidopsis thaliana landsberg
atggcgcaagaagttcttatgcggaatatgtttgctgcaagtaaagaattgagcaaaaacgaggccatgtgtttaagggatggaatgaaggaaagatttatttcccaccaacgtacaagtactcgaggaactcagatagatactctggagatgatttgcatcccaaggagaaacgtcgcactcctgcttggtaagtttccttattttaacagcaagaaaacaagaacttctgctgctatatgaatctttcatctgacatttggttttctaaaaataggtgtgataggatattgtggtttggtgaaggactgcatcagttatcttatgtaagaggagagtcacggttctctgatcatagaccggtctacggcattttctgtgcagaggttgagtcagctcataataggataaagcgaacaacgagttactccgcttcacgggtccaagctgaagagctcttaccttactcccgtggatacaccgagctcagcttcttctag

SEQ ID NO: 180318 - DNA, 75 bp, Arabidopsis thaliana landsberg
actcgcaaaaggtatcttgctcaacaacttttgaaccgaggatttcaggtattcctgccacaaaactggttaacg

SEQ ID NO: 180319 - DNA, 1133 bp, Arabidopsis thaliana landsberg
gatcaagtaggggacgaccccaataatcctgccctggccttcatctcctttgtcttcacccaaaactccttcggcaccttcagatcaggtattcctctatccattttgctggttaagattcagtcataacatatggaattgaggaaataaattttgtgtcttgttttataggtatttggggatggagatgaagttgactgcaattcgtcagccattgtccctgtagctcctgcatattttcttcacgagacgattaacattcgacagccagttcttcaaaagcgtgttccaatacggtctcggtaccttgaccctgctcaatatagtgtggacgctaggataagtgctttgtttaaaagccgaaccaagaagcctgcctacagcccccttgggtctttggatgagcttgaatttgagaattttaaatctcttcttcaagaagatacagaccagtaagttataaaacacactcttccttgctttacaaattactaatcctactatcaatttgcaggttattcaccatctgcactggccacaagctttctaatgcacactttttggacattgcaaccaaggacaagtgggtgacaactgaggtaattcatacttgaatgtttccatacaatgttactcatgccttctgccaaaattaaagcatattgttacttctcaaacagcatatgcaacttatcatgggaatgttgttgagacgccgcgccaaatcatatgcctttaaacggattaccataattgacacttggtttatcgctcttctgatgacacatcatgaagatttcatgcaacgtcaagacaagggaaactacgagtggggttcatcaatgaaggcttatgtaactggcaaatcaaccggaattcttatgaagtctgaatttctaaggaatgttgatgttgtctatgttcctatgaactgggggtcctgtcattgggttggcttggtaatcaatctccagctccgtaatgtgctgattcttgacccttttagtgccccctttccggacgaacaagtttcggtgatgatcatacctattactgagttgcttccttggctgcttaaaagatttgcaatgccagctctcactgaacacccgaccccttctcttggaccctag

SEQ ID NO: 180320 - DNA, 386 bp, Arabidopsis thaliana landsberg
atggaagatactgtcagaagattttcagaggaaagtaagagacaagttaaaatatccaggttagttaaattgttttaaaaaatgttatatacgttttttaaaatgttattttacatattttattacattcatcctaatattataatgtatatgcagaatacatattgcctgacgaagacaggattcggttatgtttacaagagctgcaaaaaatattgaaacgacatggaacagatctttggaggtataagatgttgccgcagcgtaaacctggcgatgaacctgcctttaatcagttgatactcgatgagcgcaactacaatcgcgaaacattgaaaaaaattcatgatgattggttaaagatgctaaatacggaacagaagaag

SEQ ID NO: 180321 - DNA, 412 bp, Arabidopsis thaliana landsberg
cggcaggtccggtcagcaaaaatgcctccgctacgaccgattataaactggaagcggaagtgtattcctattcacgtgccaagggactcttcgcaggcgtgaccgtgaacggtgctatgctcgcggtcgacgtcagggctaataccggcttgtacggaagtaaagccactgtcaaatctatttttacggagtcaaacatctcatccaaggcaatcgacgacctccgcgaaaagctggatgatttcaactaaatgccgctatgccatccacagtcgttgcacagatgatctacaacgaggagaagcagacattacgcatcgtatatgtttcggggatggtgtatgactacaaaaacgttccctgggaagtgtaccaggccatgaaagccttccgctcgaaggggacgttttga

SEQ ID NO: 180322 - DNA, 902 bp, Arabidopsis thaliana landsberg
atggatcagcgtttgcaatggtgagacgaagaaagctatcgggcttttcatctttatggttgctgattatgttacaatgttgttaattgatgagtgtttatttgaagcatgcatttgcgggccgattttgttgactgtaactctggctcagtgatgttggcgaatttattactgacctgtctctgtatcacgaccttgttcttttgactgagttttggttactatcattggttgaaatgatgaggaaaacactcttgtgcttctttgctctactattgttggcgtctaagagtactcaagattcatgcatttccctttttctgccattgctttatatattttcacacatgatgtttctcaatttcacacaggatattccagtggcttaaacggtgtctctgtggagacacaaacataactattgatcaggcaatagctttggttgatgaagagatcgccaacttgcgaaaattggagcgagggtatcaaactaatatccgcaacgcagaaaatgccagagatcaaactaatgtccagataggtactatttctactcgtctagtcacttcaatattgtttcttaatattgttggttaattctcttctgttgttttatcgcagaaagggacagcttcaacgatactattcgacttttacaagcagagtgtaatctcatcaacctagagatcccaaccctcaatgaagaggtaaatctttatatgtattttggttttgacggctctcaaaccatatcatttttatttatttatatgattcttctaaatgttattattatattggattttgttacagaaatttgcgattacaaggttgaaatcagcaaaacatttctttggtgctgttagttcggggaacaagaccagagaaagatcccaccagtg

SEQ ID NO: 180323 - DNA, 336 bp, Arabidopsis thaliana landsberg
gttggaacagttgcagctctgaatttctgtttggctctgaggcccccccttctaaaagtgactccagagttggttaattttctgcaagaagcattacaaattgctgaggctgatgaaactgtatgggctgtgaagttgatgaatcctaaagtgcttacatcattgaacagacttcgaacagcttgtattgagcttctctgcactactatggcgtggactgatttccgaacgcaaactcacaatgaactacgtgccaaaataatttccatgttcttcaagtctctaacatgtagagcaccagaaattgtggcagttgctaaggagggtttaagacag

SEQ ID NO: 180324 - DNA, 192 bp, Arabidopsis thaliana landsberg
atggttctagattcggtggttctagattcggtggacgtgctaatggtcgtggtaatggtggacgtgataacggctgtggaggagatggccgtggtggtggccgtggatatggctgtggaattggtggtggttacctttgaagaggaagaatttgggctgcatttatgggacatggatgtggccgtggaaggg

SEQ ID NO: 180325 - DNA, 331 bp, Arabidopsis thaliana landsberg
gaccttggacagatattgttaatatgttttctgggataaagatcatacctcgtgatgaggtaaagtttctagtttcatatgatcctgaattttcttttgtgtttattcatcttggattgagtttgatgttatttttctttgctattaggtgcatgatgatagttcggagggggaaagagagaaatctaaaggtgggaaggatagaagaagaaagaacaaggacgtaaatagaaaggagcgtaggggagaaggaagtaagagagatgggaagaagattgccaagagtggagatggcgagaccgttgatgatgacttgcttgaaggggatatt

SEQ ID NO: 180326 - DNA, 94 bp, Arabidopsis thaliana landsberg
atggatattttttccttccgagagagaactatactgagctcaaccaataatgatgttggaatcattaacgactacacgctatcaaatatgaaag

SEQ ID NO: 180327 - DNA, 191 bp, Arabidopsis thaliana landsberg
atggattatttgcaagtaagtgaagatatgttacacaatgtcacttataactttattgtagtgattaatgagttttggttatttttatttttttgtttttttatgctaaggctatgcgtctccgcgaagccaatcgtctcatgattgcaaagttcaagaaagaatctccggctaatgactctcctgaacag

SEQ ID NO: 180328 - DNA, 524 bp, Arabidopsis thaliana landsberg
tcttcttatgcttgcttggagcaggagccggtacatcagcaaccggagcggctaccggagctggaggagaatcagctactggtgctggaaccggtggagagctcactggagaagaaacctttggtgcaggaaccggaggagagctctctggaacaggtgtcggtggtggagacgactcgctaacaggagccggagatttcggtgactcaaccggtgaagaagccgaagcagttggactttttgccggagctgtagtgggagaagtaacggcgggggatttagtaggggaagtagttggagcagaaggagtggtgggagatttggtcggagaagagataggagattggccaccgacaccggcgacgacaatgcagatcaatgtaactgttaggaggaaattgcgatccataattttgttaaaatttggatcaaacaaaaaaaacaaatttggaaagagtttgaactttgaagtgatggttaaagtactgatggagtttaaccaagcgtgttgttgtttgatgtaa

SEQ ID NO: 180329 - DNA, 190 bp, Arabidopsis thaliana landsberg
atgtcctatcaagcccaagcttttggaacctctgtttggttgtgtagacagataatccatttccgagaagacaagccgatgaagcagccatctgcacagacgattacaagccatggcgtgaacaaaaaaaaacaatctgaacaaagaacaaccaaacaaaacgagacctttaacaacatgcaagtttctg

SEQ ID NO: 180330 - DNA, 119 bp, Arabidopsis thaliana landsberg
atgaaagacacttttggtttcggcttccgaatttactatatgaaaaatacgacaaaggaaaggaaaattactataaaagaggcgatggaaccgagtagaagagtccaaaatcttccaag

SEQ ID NO: 180331 - DNA, 959 bp, Arabidopsis thaliana landsberg
gttttctcgatagccattcctcggtcaagtcctagtcttggtcaagggcattacaaccacgatggtaataatacacatgatggttcggaggaggttaggggtcagttgaggtagggcgatttcaagagcggccaaatatcgaaccaaggcttcgggaagagggaaggtcaatccgcagcctttgaagtagatttcgtaaacacaaaagaatccgggacggtggtcctccggcgattcagtgggctcataatttcgggtgggattgaagagtgcatgtggattgataatgtggaccggcaatatcgtttggccgggtgcaaatgtcattactagaaccaccgtctttgtaagatggagattcaggcctttcgttttcagaatttatcgtaagagaatgaacagactaggggttcgagggagagaaagtgtagaaaggaagaagaaagggattttgttctaaaggaaaaataaagcgtgaaaaataataaggagagagtaaagtgaatttaccttacgcaagctagtgatgatgacggaaccgccttggaagttgtgggggaagtggaagagtttttcccgctttaatagtaaataattgatatacggtcataattgtgacagatgtcacgagagtaattatgggtgattgtgtaatcataggaataacgtgattttggcgagaaatcagagactcacttggcgcaatctttgccccttagagcattaaagtctttcgaattggagtatcacttcgaaagacttggggggctaattgttggtgtcggatcccgcaccatgggcttgggaccggtcaaagattgccacataagcaggagaggcccaaaagaagagaagcccataggataccccgagttgatagtacaagcgaggtgttgacctgcgaagtggatacggaatcaaggtcaaagttacccggagtgaagtgtcgaatgggctga

SEQ ID NO: 180332 - DNA, 496 bp, Arabidopsis thaliana landsberg
atgcccattctcaatgcctatgaaagggggtggcaagtcaatgagatcaaattcaaagagatcaataacctggcaggaggtctgaatgccttaaaaaccggggaagcgggatgtgtttttttgggagaaacacaccactcggtcgtatttaaagtccaatcagctcaagtatatcgattccttcaaagggccctggggcgcatttgtgctgacggtaaacagtggattaaatgaccttgagctggacctgctggcacagttttataaacttgtacttgaagaggcggccaatttcaagctttcacatctttcagcaccgtctattacgcggttcaacaacatggacctgcccactgcgcaatcgtggttacactctacccgttttgcttcaacagtaggacataaccaactggaaatactcaaggtgcaggagctcctgttccgttcgggcatcctggtggaagaatccaaagcaaaaaccgaattttttgtctga

SEQ ID NO: 180333 - DNA, 109 bp, Arabidopsis thaliana landsberg
gtacatggattcagacaaaagggttcagcatgtacttgatgcttgtggtgtgaataaatcactgaagaatatgggcgttaaagaaggcgataccgtcatcgtaggagag

SEQ ID NO: 180334 - DNA, 181 bp, Arabidopsis thaliana landsberg
attgaccaaaactgctcatttcttaccattgcataccacccacaagacagagaagtatgcggaaatttatgttgatcaaatagtgcgattgcatggtattccaaagaccattgtatctgacagaggagcattgtttgtggcacgcttttgggagcagctgcaagaatcacttgggacccag

SEQ ID NO: 180335 - DNA, 502 bp, Arabidopsis thaliana landsberg
atgattttcctttttcatcgatcaaagtacgcaactttttcttttgatgaagatattatcgtagattatcttactttagttaaaattaaattatatcaaacttttgcactatacacagaaatggatcttcatcaaaggtagtgcagatccgtaagctatcatatcgttaacttataaaattcagaaaatgacccattattagaaaatatatattttggatcaagacttaattgatatctatggttactcataaaaatattgaaataatccatatatgcattccttctacgtaaaatccacaataacattttttttctctgtgacacaacatttattaactctttttttttttaggcaaaaaacatttattaactcaaaatgtgaaaaaacaagaataaaagcaaagcataaagacaaaatctgtgcgaaggcttttgtcggttgcgatgagtttgcacatcccgaagaagctctggctctcggcgaagagaatcaactttga

SEQ ID NO: 180336 - DNA, 846 bp, Arabidopsis thaliana landsberg
atgattcccggtgagaaccacttggagaaaactaaaaaatttgaaacagttctctccacaaaagaggatggcaaatctgaaaatctctccaaggtaagacaacttttgcgccaaagacccataaggccaaatatgagttctgcacaaaatgtggcaaagacgtgcgtcttcgacaatctcaaatagcaatcttgaagtgggagctcgattcgattcagagtataggtaaagagcggattgaagaagctacaataatcttcgctccgtaaaggcgagatcataatgccgttcttcttcaatctactaaactcaaggataaaatgtctaggtgattttaagggcaaaggttcacgaaaagactttgtaccccactagcaattgagttggattatgctccaaatgatgttcatgatcagttgtactcataaaacgacacacaatgttgctaagaaaggactaataagagttcagatcaaacctggccaaacaagggaagtgtcgatgccttggaaatttcctggtcaaaggaataaggcagttgggcctggcttgagactttaaaggagttgggccggcaattaggttgtgcacagatgcgagatgggctttaaaagaagccttgcagatgggcttcaggaaacttgttgttgggccggaactcttcaagctgatcaacaaataagtaaatgtcgggccctgaagcttttgttaattactaggtctaggcccagcagaaagaacctccagccagattagggtttcttcgggcgtcgccataggttttgccagagagtatgcagacgcccacgcatgtggtggtggagcttctgtcgggcagcaaggccg

SEQ ID NO: 180337 - DNA, 271 bp, Arabidopsis thaliana landsberg
atggctgcagagctaagcaagaagcagcaggcgaagaaccacgccgaaacggctcacgaccaaacagaaggcgaagagcacgacgatcagccccccggcgggacgcggggcaaagaaccggcagccaacgacggctgcccaaggaccggatgccaaacaagcgcacagatgggcgggagccacaagatcacggccgaccgcgccgacgagcgagcggaacgcacagacacaggggacgggatcccccaaagaaaaggggaaagacaggccg

SEQ ID NO: 180338 - DNA, 965 bp, Arabidopsis thaliana landsberg
  unsure (1)..(965): unsure at all n locations
atgcgagttacaaatgagaatgttataactttcattcatctggtttccaatcatcggttaaattttcaggtactggggaaccacttacctctcatttatcttggcatacctgaggtcaccctgtaaatcaacagctattgatatcatctcatttgcagatacgccagcagagttctcatttcttgagggggtttcagcaactcattccgaaagaatggatcgacatgttcaatgannnnnnnnnnnnnnnnnnnnnnnagtgtataattatacttgctttgttagttgttccctcgaggagcatgaagagagaaattttacctttgtgggctttggttgcaggttctcatatctggttcagttgatagtttggatatagacgacttgcgaaacaacactaattatgctggaggctaccacgcggtgagtggttcttcactgttagccgaaatgccattgtgaattagtgtagggacacttttggagtattgttatatatgattatatcgctatgttgttgacacttgacagggacattatgtgatcgatatgttctgggaagttatgaaaagcttctcaactgaaaaccagaagaagttcttaaagtaagcaaactttgcagttactactacagtctgtgtacgcaatgatttaccggagtctatgaattttctaagggaactaagaggtacctctatttttcaatttcaggtttgtgacaggctgctcacgaagaccactgctgggtttcaaatacttgaaacctgcattctgcatacagaggtaatatacacagactcacaatcgttttgacttttgatgggccctggacaatagaatcataaaatatccatcctcgatggaatgtgtatcagggctgccggtagtgcgagtaatgaatcagttgataaactgccgacatcagccacttgtatgaatcttcttaagcttccgccctatcaaag

SEQ ID NO: 180339 - DNA, 211 bp, Arabidopsis thaliana landsberg
gtatgggtcaattttaatggatggccagcatccagatgggagtttaggatacaccgtgttacacaacggtacttgtcagcatgctggtccaatctacatcaatgttatgcatgctgcgattctccgacttgctacgggtaacaagaatatgaccattcaaacccgaaaccatcctttgccccctacaaaaactcagcgcatacagcgtcat

SEQ ID NO: 180340 - DNA, 476 bp, Arabidopsis thaliana landsberg
atgacggacgaggcgaaggaagcggtgtggcagcgcatcctggcgcagggttacccgttctggtacggctgagctcatattaatactggcaccagcgcatcccacgtcgtccccgcgcatgctcagcatgggaccccgccgaggcggctggcgaggtcgacgctacgtgcaggtaggtctcgtatcagaacgtcccgataaaatccttcttgccgatctccagcccattgtggcgcaggatgtcgtaggccgtggtcgcatggaagaagaagtgcggcagcgcaaaatgcagcaagtaggtcaggcccttgaactggcgctggttagcgcctgtgccgaccgtgacgtcgcgcgccgtgccatacttgatcgccgcgcgcggcacgctgttgatgaaggccagagtcttttcgatgcgcgcctgcaggccggcgaaatcgtgttcggtgtcgccgtagcgcgggacctttatcccg

SEQ ID NO: 180341 - DNA, 190 bp, Arabidopsis thaliana landsberg
atggccgagctgacggtggtcggtctgtatgtggacttctgggtgccggggtttccgcactgggtcacggccctggcggtctgggctgccgtgaccgccatcaacctgacccgcgtcgcgtggatcggcgagttcgagttctggttggcactggtcaagatcctcgccatcgtcggcatgatcgtgctgg

SEQ ID NO: 180342 - DNA, 1369 bp, Arabidopsis thaliana landsberg
atggtgacagaaaaacagcaaaagttatatccaaatttggataaagaatctctcaagcgcgtggggtaggtgggagaagaagaagaagaagcaaagggaaaagcagagcagagagactctctctcggctataaaaacagagcagggggtcacaacacaggatcactacaacagaaatacccagagcaagatattcaaaaacttataaattctttcaaaacaaaaatggggatcgtagcattggaatgggcagaggggaaaaaccaaccaactcacgctgctgatgaaccgagacaattgggaaaacaggcaagtttaacattttcattctacgttccattaggtttgaattttgttcatcagacattgttgttgaatactttttgatgtttactttttctttctatgagtgattgatagggtcataagtggggcatcttggagtcgaaacggtcagattttgagtggtcggtgcaaagctaacaacggaacctggtttggtattactaaaggtggccgagtcgcttttctcgtgaatacatcgttgttgttggaccgtgttaagtcatacagcggctcggagttgtatcccgttcgtttcttggaggtttggtttgttagcatttcttcttttcatttatatataaactctttcgatctctgtgatcacgggattgcttttgattacagggcaacatgagtccagagcagtttgccaacgaagtgaaagtgcatgaaaaggagactaatgaaaggcatgcctatagtcttatcgttgcagacatgacttcgagttcaatggttcatatcctgaaaccctcggatactaagtctgatgtcgtgatagagactgttccgtttggtgtgcatacactttcttcttacgaaggtctcgattctacagattctgccagggtaatttaatgttcaagtgtcttgtaatagagtagagatgttacaaccattttgcaaatattttcgtctagattcttctttttatttctaaaatcaaactctctgtttttttttgtttttggtatatattatgcaggatttactcctgagacgcttgtttacccagatggttggtaatttgggaaacgttcaacaacgacagatggaggagattgctgggaggtttatgtatgatgctcaagcaggaagagacgcggtgttttaccatagtagagatgagcatcctaatggaaaagtaagaaagttattatcttctgtttttatgatcctcaccaaatcctatacttaatctccttttttcccatttcgattcagcttggaacgcaacgctttggaacaacaagtacgacggcattggttgtgaaacgcactagagaagtgttgctctttgagaa

SEQ ID NO: 180343 - DNA, 137 bp, Arabidopsis thaliana landsberg
atgatcattgttatacgagagcatgatcacataatgaacaaaagagatgaaattaagttcaaagcagtaacaaaggaaactaaacaaaattggtctaaagataatggttttgaccgggttcgaaccggaaacctttg

SEQ ID NO: 180344 - DNA, 2650 bp, Arabidopsis thaliana landsberg
  unsure (1)..(2650): unsure at all n locations
atgactatctccgacgcaaaatccgatcccggcggcgatgaccgagactctgaaatcgccaaagaaacagaactagtgtttctccgtaatcgcgtcaaggtaaaaatctccgtgcgacttgtcatcttcttagcttcttcaacgtctctgtagtctcttcgctcaatgtttgtgcccttcgttgttaagcattttgttagtggaacgattcgattacacattgcttaaaggttgagtttgaaactatgttgaatcttcggttaattctcctgtagaaacgttagatagtgaagttgttgattgtttcattgtttgttctatatctctcatcaggagttagaagtggaaaatgctaaattgttgtctcaggtttcaagctgccaatgccaacaggtgaagatatacttaacttttgattgacttcacattgtttcgtttgaaattgtcaagaatctcggtgtttttgttgtagatggaagtgaagcatgatcggtcattgtcagattccagtagcttagttaggagaaggagagttagaaaaggagataagaatagtataccgagtcatcttatctcaaagagatatgttgcactcaaaatcatgtattttggtaagaggtatgttttttggattgcttctcttcttcatgttatgtcattgttcctaatcgtatgaatgaatgaatttttgttgttacagattttatggattttcggctgaagcacaaatggaaccaagtattgaggtgtgtttttgttctctttgttttgtatgttaactagtaataactaatttgtatttacatgatgagtaatttgtgtgtttcctgcagtcagaagtttttaaagcacttgaaaggacacggcttttagttggggacaagaaagattcttgttactcgagatgtgggagaacagataaaggtgtttcctccacagggcaggtggcttgcttgggcctctcttgatctctagcattttactcgcaatagtttctttcgatctcactgattgtgtgccaatgatataactactcatatgatctcatcagtttaagaaccaatttctcattgtgctgatgtttttccaaaaccctgtaatgggagcattccaaatgtctataaggtagnnnnnnnnnnnnnnnnnnnnnnnntgtctattcgattgttgatgcaggtgattgctttgtttttaagatccagactgaagtcacctcctgagactctaaagcccaagtgaatgggagaacgggtgaaagtaagtttactctgggaatgtaattcattttggtggttttcaccctcttaatgttgttgctgtaactctctgatttctctggtttaggaccagaatatgattatgtaagagttctaaatcgtgctctccctgatgacatccgagttattggatggtctcctgctcctatcgactttcatgcaaggtttgtgttttcccgtttttttttgtaatccttcgttgttgtttgtgctattccgccctgactgcagaatacgttgtgaactagtattggatactggatgcttaccttttttttgtttccttgggtacaggtttagttgctatgctagagaatacaaatattttttctggaggcagaacctgaatctttcggtgcagtgatctttacacttgttaataaagtcaaaatactccacaattgaaacaatatagaagttaatttttattcgcatcttcctctaggccatggactttgccgggaagaagttcattggggagcatgatttcagaaacttctgcaagatggatgtggcaaatgtacattgctatacacggcgtgttactttctttgaagtctccccttgtcaaaataggttggctttggtaaaaggcacatttaagctgatcttctgatcctcttttgatgaccgctgactacattagtattctttgaactgattttggatcctataaaggcttaggtcaactaagattcttgcttaaaaccgtaggattgttcaggttctaatggtagaccactagtaatatagggttatgactaatacaattgtaaaaaattaagggtagacaaaatcatgttctaggaacaatagaaattgcgcatcctattgagcacaatggcacccattgttaaactcacaccagtcactactttatatacacacattcttctgatcaattatcttttattattttgtcttttggttctaaaacatctgatcttcttgtttttccttcttgtgaagtcatgagggtgatcagctttgcacatttacaatgagaggcagtgctttcctgtggcaccagatccgctgtatggtcgccgtgctattcatgattgggcagggcgttgaatcagttgatgtaagtcacttggaaaccttcatgtttgttccagtttccaagctcaatccaatccttacttgggaggtttatatattcatcaagtgttgatttagggatgaactggtatttacccaggtgatagatacattgttggacacaaagaaaacgccaagaaaacctcaatacctattggcctcagagatacccttagtcatccgtacatgtaaattcgataatgttgccttcatatgttctccaggatacaaagtctgattcaaatatcttgaaagtggttttagattga

SEQ ID NO: 180345 - DNA, 386 bp, Arabidopsis thaliana landsberg
atgtctcttgcaattgaaccacctgtcaagctgtcacggaagaggtaagacccaccgcggagctaggatatatttacagagcattttgtacgtgtagttgtttacatagagtatgtaagattttctgtcagtaccttgctaagggaaaagccggtccaaacctgacaccttttgatgcaacaaatcttgaaacggttgaagataagccacttggacacaaccggaataccttgttctatttgcatactaaactgaaaaagcaagaaaccagtatgaaagacccaaatgaacactcaaacagaaaagaaagatatgaccatttcagttctgcagattatatgaacaccaacactattaagtcacaaaacttgcctgccaatcactaa

SEQ ID NO: 180346 - DNA, 162 bp, Arabidopsis thaliana landsberg
atggctgcccgccttggcctcagcccagatctgaggctgggccaggggtcgtcgagccagccaccgagtgggccggtgctgtcggtatccggggcgggggcatcagggtcccgacccgaagaacaggggcaggccgagggggtttttgaccccttggcccag

SEQ ID NO: 180347 - DNA, 39 bp, Arabidopsis thaliana landsberg
atggtgactggtatttttcgggaaattatccgacaccag

SEQ ID NO: 180348 - DNA, 832 bp, Arabidopsis thaliana landsberg
gaagagcttagactggcgctgttccaagctccatatggtgagaacctctttcttgatagggtgagtggcttctcatggtttcttggacttgttgagatgaaagttttttttactttatattgattggtgttttgcaggtttttgatttgttcgatgaaaagaagaatggggttattgagtttgaggaattcatccatgcactcagtgtctttcatccctatgcatcaatccaggagaagaccgattgtaaggatcaatattactactaatataactccttggatgatctcaagcatatgcttttattatctgtgacagttgcatttaggctctatgatctaagacaaactggattcattgagcgagaagaggtaaataataatctgccattgcaagttgcaacccttcttttcagcttcataataagttggacttgttaggtgcaacaaatggtttctgctattctcttggaatctgatatgatgctatccgatgaacttctgaccatgattattgataaagtgagttcttgaaatcccatctctcttagtgtgatgtataatattttggtaaatttagttagcacatgcttcttttctttctctactttgtttttgctagacatttgctgatgcagattctgacaaagacggtaaaattagtaaggatgaatggaatgtctatgtgcataaacatcctagcttgttgaagaatatgactcttccttacctaaagtaccaaatcctctctcttttttagattagcccttccatttaggatttcctttactttatcatcaaccatatctgtatttgaatttgaagggatgtga

SEQ ID NO: 180349 - DNA, 246 bp, Arabidopsis thaliana landsberg
atggctcaaattccccacaccaccagcaaaaaaggaatgcttagactagctcaagagatggtatgtgtgttctgttccattttaaggtatgcttaggttattctgaaacttgaattggactgtttttcatgcttgtagaggaataagagttctgagcctagtaaggtgactaagagtaaagtatgggtagcaggacatacacattcagatggacgacctgttagacaagagtttgctgacacaatt

SEQ ID NO: 180350 - DNA, 680 bp, Arabidopsis thaliana landsberg
atgagatcgattctgatagattggcttgtagatgttcacaggaagtttgagttgatgccagagacgctatacttaaccattaacctcgttgatcggtttctatctttgacaatggttcatagaagagagcttcagctgttgggactaggtgctatgcttatagcttgcaagtatgaggagatttgggctcctgaggttaatgatttcgtctgtatttcggacaatgcctataacaggaaacaggttttggctatggagaaatcgatcttaggacaagttgaatggtacatcactgttccaactccttatgtgttccttgcgcgatacgttaaagctgcggttccatgtgatgctgagatggagaaattggtgttctacttggctgagctgggacttatgcagtatcctatagttgtcttaaaccgtccatcgatgctggctgcatcagcggtttatgctgcgcgtcatatccttaagaagacgccattttggactgagaccttgaaacatcacactggctactcggaagatgagattatgtaagctaatctacactaatccttgctctatgttattattggatttccatttttagctgtcatgactaaactggtttggtctggttgcttttagggagcatgcgaaaatgctgatgaagttaatggactcggcttcagaga

SEQ ID NO: 180351 - DNA, 64 bp, Arabidopsis thaliana landsberg
gcttttacctgactactacaagtgcacagtatatcggagtagtactttaggatcgaatccataa

SEQ ID NO: 180352 - DNA, 599 bp, Arabidopsis thaliana landsberg
ggttcatcggtatggcgctatcttacggtttatctttgaatatgggacttgtttactctgttcagaaccaatgctacttagctaactggatcatttcggttgagagacttaatcagtacacacatttaacacctgaagctcctgaagtaatagaagagactcgaccaccggttcattggccggtcacaggccgagtagaaatctctgatttgcaggtatgtttgatttgaacattttcactccctaacttaaaaaatgagagtttcttgatcttataatgttcatatatacagataagatacagaagagaatccccactggttctaaaaggaatcagctgcacatttgaaggaggacacaagattggaattgttggtcggaccggtagtgggaagacaactctgatcagtgctttgttcagacttgttgagcctgttggaggaaagattgtcgttgacggtgttgacatctccaagattggagttcatgatctgagatcaagatttgggattatacctcaagatccaactctgtttaatggaacagtgaggtttaatctggatcctttgtgtcagcattcagatgctgagatttgggag

SEQ ID NO: 180353 - DNA, 516 bp, Arabidopsis thaliana landsberg
tgtgagaatatcttgaaggatgaatctgccaagtttgaggagcttcataagaaattcgtgaaagacaaagctgatcatctacagggcttgaaaggtattgttctttctactgttttctggttttgtcatctcttactgttgggcgtcaaaagtgtagatttctttcattagctaattgggatgttaccaaaagtattgaacatatgtttctgcttacagacactatttcaaagtttgaggaggacaaggagaggctctacatgcgatatgagcagctaagtaagcaaaccaaccccttataatgacaccactgttatgagaagatggcaacacttactcacttccacctgtaaataacatatagggaagaaagagaagacaatgataacggaacaggagaagttctgcactgaaaagcttgctcaattggaagagtcgctgaagaaaaagaaacgggtaaataaaagcctttttgatcttgttatacatcactctctctttgatcttgttaaatga

SEQ ID NO: 180354 - DNA, 1018 bp, Arabidopsis thaliana landsberg
atgactgcactctacaacttacttgatggtacatctgataatgccaagtttgaagatgactgccgagcgataatcgggactcagtcttatattctcttcacattggacaaactgatccataaattcatcaagcatgtgagtatttttgctctttgatgttttctctatgtattcacctctctatctttacttgctttttactaacatacgtgtggtcattcttcagctacaagtagtagtagctgatgagatggacaacaagcttcttcagctttatttttatgagaaatccagaaggcctgaaacgatttttgatgctgtgtattacgataatacccgtgtcctcctccctgatgagaatatttaccgtattgaatgtgtaagtttttgctgcatcttacattagctacttatattctgtcgatgcactgctgatcatgcttttggactccaaaacctcatgtgtatgcagagattatcaaccccagcgaaactctctattcagcttatgtgcaacggtcttgataagcccgatgtgacatctgtatccattgacccgacctttgcagcttatctccacaatgacttcctctccatacaaccaaatgcaagggaggatcgcagaatctatttaaataggtaaatgtaaaacatgaacaaatgactgtcccttgatctctgaaacctagtgggtcactcatcaaagccaatgccatttttcgttttctccaggaacaagcgcaaagtttgtcgtgaagatgaacagttatacagcacagatgaagttaagatcaaaaatggtttggagtgtaagatagcttgcggttcttcaaaggtaacacttttatcttcttccctatatcacgcttaccgcttatgagtatatccatgagagaccagcacttgaaagcacgttcttgaaaatctcttgcaggtctcctatgtactagaaacagaagatttgttggtgcgagttaaaaagagaagaaaaactttgtgccacaatcaggagtcttgg

SEQ ID NO: 180355 - DNA, 108 bp, Arabidopsis thaliana landsberg
tctcagatccgactccgatttaacacataccaccggagtctaacctaccaccgacacttcttcttgatcctcatccgccgtcgtatccgttgccgttacctctactaa

SEQ ID NO: 180356 - DNA, 143 bp, Arabidopsis thaliana landsberg
atgaactatactcaccgagcatttctctgggtttcgtcggaacaagctgtagatgattaccacgatcgggaactcaataatctgaatatcaacatcaaaacaaaaaggctaaaattaactgaaaaatatccactagcaaccag

SEQ ID NO: 180357 - DNA, 475 bp, Arabidopsis thaliana landsberg
attgttgattgcattttcaaatggattactttttctttgggatgcatcagaagatcatgtcgtgttagttcgggggaacaaagatctacctgtggagggtaaaacagttgctgattctcttgaagcttcacatgatgagctttccaatcttgaactcgatggaaaagagataagttctttgtgttgggcatcaactgatggttcagttcttgctgttggctatgtggatggggatatattattttgggacttttctgatgggcaaaaggggaagccatctaatcacgttgttaagttacagttgtcttcggctgagaaaagacttcctgtcattgttatgcattggtgtttggatgtatccgcaagagtagtggtggaaaactcttcatctatggtggtgatatcattggatctgacgaagtacttactgttagaactcagtccacataagaacgttcatagcacacattggtga

SEQ ID NO: 180358 - DNA, 1583 bp, Arabidopsis thaliana landsberg
attcttaaagaaccagaaaccttggaggaacaagttgttgaagcagcaactccagttgacgcaataaggtttccacttatattcgaagaagattccaattcatctttagcagatgacaatagcaacatcactgaggggaaggtatcaacattcgtaccataaccaatcttgtaatcatacatttttcaatgatgtagctctgaatacctttgttgatgtttctcattgaaccgaatattttagcgtaaacaacgtgatgtggacacatcagattcgagcagtggagtaatttggcgtcctaattttgaggagttcatccaccgccttagacataaggttagttatccgtgtttctcttttgaggttgtttgatgaggaaaaaagctcattggcatttcaaattttgctttccgaatgtcttactgttccaatctattaaccacttgtttctttgtttaaggcgtgtgtggagatagtgaaagagcgccgggatgaaggatgtgccattgtcttgagggcaatgttagaagtaggaagatcgcaagagaagaaggtgaaaacagacaattcgggtaatatttgagtttctcactcattttcattcaatatcttaacataatcataatatgctgaagttaaaattgtatttggtgtgaattattttgcactctccaccaaaagtccacctatgaagttctgttaactgaatttgctataatctttgaaacagctccaatgtcagttggttccatttatgaagaagttattaagacagaagcaggtcgcactatgttacaagagcgagttgaagcatgccttgaccaattgagtgctacgtcttcttatctaccagcatttgtgaacgaagtgaatgattcatacatagttggtatagtaactccattcaaaatctagtcaaatgattcttgtattcaaaataatattattttgttatttggttttgcagattataaatccattatcagcgtagcacagaaagatgaggtgcgtttcatatttttcttttcttgatatatttctgaaactaaaaacggtatctttgagatgtttccagatagaggcagtagtgatgagaagatatgggaaagaagctttcagaatgttcagatacttatcacaggaagggcgttttgttgagaccgataaggttaatgactgttctttatgattcatatagaaacatcttaagtcataatgatttcttaacttcatcatttttttctctctgtaagattgctgatgccgcgctgactgaaaagaaagatacaccgcaattccttttaaagatgtggaaagacggatacttacatatgcaggtattcacagtttggaaaccaaatcattatcaaaagtaaaacgaattggttgttacgagattcattgttgttatcttctgttcatttttgtagaaattggcggtcacagctccgggtatgtatacaccgtttctgttgtggaaggtaaacaagttgattgtgacaactcaaatgttggatgagatgtaccatgcgtcccttaacttgagtcttaggttggcccatgagttagaagccgaaaaagag

SEQ ID NO: 180359 - DNA, 132 bp, Arabidopsis thaliana landsberg
atggtgttggcagtggcgcaccggacagtgtctggtgccaagccgagcacctcccaactggccactcttgggtttctaagtatgcactccgctataattcacgaagtgtccggtgtgcccggacagtgttcg

SEQ ID NO: 180360 - DNA, 318 bp, Arabidopsis thaliana landsberg
atgggcaaaaatgaggaagtgaagcttttgggaatatgggcgagccctttcagccgtcggatcgagatggctctcaaactcaaaggtgtaccgtacgaatacttggaggaagatttggagaacaagagctctttgcttcttgctctaagccctattcacaagaagatccctgttcttgttcataatggtaaaaccattatcgagtcgcatgtgatcctcgaatacatcgatgagacttggaaacacaatcccattctttctcaggatcccttccaaagatccaaggctcgagtcttagctaaactcgttgatgaaaag

SEQ ID NO: 180361 - DNA, 135 bp, Arabidopsis thaliana landsberg
atgggcaagcgcgcgatgggcgcgctcgagttccggccggcaagcggcgcgacgcgcgagtcgcaggcgccgatcgaaatggggccctggttgaagaagcgcgacacgccattcacgccaatctacgtggcgatc

SEQ ID NO: 180362 - DNA, 1895 bp, Arabidopsis thaliana landsberg
  unsure (1)..(1895): unsure at all n locations
atggcgggatctggagacttgcaagtttttcggttgttgagatttctccgcagccgaaactctgccgatggacatgctaactatggcacacaaatggcagtaagtacttttgtgcaaaatgaaggttccttgatttcatgtaattcaattgccttgaattttatttttgaagtttggatattaaaatgtaatttctgaagcagttattttcttgaaggggctggggatcttgtaaacaataaataaaatctcaggtcactgagcacacagaaaaacataaagaagatctagctcatttattgcattaacctcatatggccaaaacaattcgactctaatgtaccagtgaactacttgcaccatgtaaagtaatttaaaagctgctgattttgtttgagcaatgagatcgaaaaatgtgactttctatagctagcttacgattgcatatttattggtgagcagaggcctatacttttcttttttttgtgaaatatgagcatcataatttctttcctttaggtgagcttagccacaggattcttgtttcttggaggcggtatgcgaacattttcaacgaataatggctcactggcaatgttgctcattactctctatccacggttgccttctggaccaaatgacaaccgttgtcacctccaggcaagtttaaatctcttatttattctttgcatcgctcttttttgtctaatatgtcaattctatagaagcaagagttgcttttctatagaaaatgctacccaacaccaatcactttgtcgattgtgatatcaaagacatgctaagcttggaagttggtttcaaacttttgttgtgctatttatgcttttgcaagaatacatctgacaaggtgagatttcctttnttttaggcattcaggcttttatatgtccttgcaacagaggctcgctggctgcagaccattgatgttgattctggtctgcctgtctatgcccctctagaagtcacagtaacagagacgaaactttattcacaaacaaaattttgcgagataacaccgtgcattctgccagagcgtgatattgtaagaaaagttcaacatcttgccttgcatattttttatgaacaaactacagaaggtttcttgatttgcatgtcacactgctttctacaagattatgaaaaaaaaatagttttctggtagaagcacatttgtggcaactgcaagttgaaacatcagaaaactaggcnnnnnnnnnnnnnnnnnnnnnnnnnnnnnnnnttttttcatgaaatacttgctcagccattctacctgtttgtttcgtccacgtcacctaaaaatgtatttgtatcctgcagctaaagagaatttgtgtatgtggtccccgatactggccccaacaaattgagctagtccccgaaggtggttgatgcatttgcttatatattccttatttgtccttggtcattttgtctacctggttttaagataatttatttttatccaatgaaatatagagaaaaattggtggagctttggggacaagagtgatcccttcagttctggtgttatatatgtcaaaaggaaagtaggagcttgttcgtatgttgatgatccagttgggtgtcagtcactgctttcgcgagcaatgcataaggttgtatacgccatcatatactcttgactcagatagattaatattcagtcatagaaaactggttctgatacacgtttgtatgctttctgtgatacaggtttttggtttaaggactctgggagaatctaatttgattgctaatagtcatagagaactggattctgatagtgttgatcacttggtcagcactttctcatcagatccaagcctaatagcgtttgcacagttgtgctgtgacaaatcttggaataacag

SEQ ID NO: 180363 - DNA, 203 bp, Arabidopsis thaliana landsberg
aaaattttgagaaatcaaagagaggaaagttagagattccaacgtacagcgacggcgttacaagcggcgcatttgtcatcgacggaggatccatgggagaaaatagcgataattacggcggtgaagagcaccagcttcgccattcttactcaactccttccgatctgtctcttcttctctctctgggcaaaagagatttttga

SEQ ID NO: 180364 - DNA, 753 bp, Arabidopsis thaliana landsberg
gaggagatatttccacaaatgaaaagtgcagtgccagcgagcaaagttcaagtcaagctgactgtaaggatgaactgccatccacttcttgtacgggtgaaggcatgccaaaccacggtactgtagctttacaggatggattgccgcggtccagggtacctagagaggtagggaagaaaagcaaagaagccttcagtaaacgccaaaggtctagcctgttggctggtgcaaaaggcttaccatcatctcaaaagggaggtcagactgcagaatccagcgacacctcaggcgtgtctgatagtgatctctctaccacgaaaaacgttaaggaggatttaaataagggtaataggttacgagcagcagtagatgctgctctgcgtaaaaagcccagctttggcaagaacagagtattggagcaatctgatgcgtcattggtagctaatgtggattctagttctgaaaagactctacgaaatcaattgccttcaaagatgcataagaatcatgtgtcacacgaaggattgcaaggagggcatccgattttatggcctacttctgatccgtacaagcagacaattgtaacaaatgagaagcagcttatattccctggtgctgatactataccttcacgattggtggaacctgaagtcagttttcccgccgtaaagcctgtcatgagagatttgcctttagttccctcacctgttatgttgagaagctcagccattccggaccatgagtttattggca

SEQ ID NO: 180365 - DNA, 140 bp, Arabidopsis thaliana landsberg
tttatggtgttctcttcttcatcatcgtcttcttcttcgtcacgacaacttttccgagttttcaccagcgcacttacttcatttacgccctactcacctattctatcatcacaatatccgtcaacacctgtttcctctaa

SEQ ID NO: 180366 - DNA, 505 bp, Arabidopsis thaliana landsberg
gaacatcagatcatactcgggttgtaatcgaacagggggcggttcctatcttcgttaagcttcttacatctgctagtgatgacgttcgagagcaggtttgccactaactagctagataactgcgtgcttccattttgtatatgtgacctggtccacctggatacatgcctctaagttccgtggtcgtatttggtttgtttgttgtttgttttgatccttagtggtttttcgtgatatagtcagccaactgcttttccgtagtcataggtgctataactttttatggcttcgtacaaacccttacatgatatcattgtaggcggtgtgggccttgggaaatgttgctggggactctccaaactgcaggaatcttgttctcaactatggggcccttgagccattgctggctcagttaaatgaaaattctaagttgtccatgctaagaaatgctacatggaccttgtccaacttttgtcgtggtaaaccaccaacaccatttgaacag

SEQ ID NO: 180367 - DNA, 611 bp, Arabidopsis thaliana landsberg
atgatggcagacaaagctttggtaagaatcagaaggagtgttctcgcttaagttctttcttcttggttattgtctgaccattcttctcaaatgccaaacaggttagaaggctttcagcttgtgaaaccatgggatcagcaacaacaatctgcagtgacaaaactggaactttaactttgaatcaggttagtatccagtaaaatgtgagcttcttgacatgaaaaccatcatacccttctagatagctaactttacccctcacaaaaatacagatgactgtggttgaaacttatgctggaggatcaaagatggatgtagcagacaacccttccggtctccaccctaaacttgttgccttaataagtgagggtgttgcacaaaacacaacaggaaacatttttcatcccaaggtagtttttgttactctgctattgttgaaccttcctatggattttcaaagaggaacaatgttactctaagctcatcatgttatcatgtagttatcaaatgattgatgtttagttgtcatgtttgttttactataggatggtggagaggtggagatttctggatctcccacagagaaggctattctgtcttgggcttataag

SEQ ID NO: 180368 - DNA, 831 bp, Arabidopsis thaliana landsberg
atgagtacggagttggctcttaccacctcttcctcgactaccacacaacctcgccgtaccatctcaccatacgatcttacctccggagacaatccaggcaccctaatttcaaaacctctcttacgtggacctaactacgatgaatgggccacaaatttacgtttggctttgaaagcaaggaaaaagtttggatttgcagatgggacaattcctcagcccgacgaaacaaatcctgacttcgatgattggattgctaacaatgctcttgtggtttcatggatgaaactcaccattcatgaaagcttagctacctcaatgtcacacctcgacgattcccatgatatgtggacacacattcaaaaacggtttggagttaaaaatggacagcgcatccaaagactcaaaaccgagttagctacatgtcgtcaaaaaggaactcccattgagacatactatgggaaactctctcaattgtggagaagcttggcagattatcaacaagctaaaacaatggaggaagtaagaaaagagcgtgaggaagacaagctgcatcaatttctcatgggtctagacgaatccatgtatggagccgtcaagtccgcttttctctctcgggtaccactgccttcactcgaggaagcttacaacaccttgactcaagacgaagaatcaaagtctttaagtcgtttacatgatgaaagaaacgatggtgtgagttttgcggttcaaactactccaaggacccgcagcctcaccgaaaataaagattctgcaattgtttgttctcattgtgggcgtcttggtcatctcgccgaaaactgcttcaaacta

SEQ ID NO: 180369 - DNA, 734 bp, Arabidopsis thaliana landsberg
atggaatacatttcaaggcaaagtccgaaaggcctggaaccacaattggcatcgaaggatcttcaggcgtcgaagccgataatttcatcatcttcttcgttatcagagcgtcgatacaagagtggtacttttcttttctccaattctcgatcatacttgaatcatatgtgtttcgttttgctccgaatttctaaatcaatcagaattacgtggttatgtatggctgatttgttagaattattagtgtagctatagaccaagattttttcttactcaagagttgtgattttctctcgcaggcagaaagatacctattattgctattgaatgccgtagatgcttatcagtctcttctccggtagttattgccgacccttgcatgcacagattctgcggttaggttcttctttactctttctttaacccactagctaatgtgtgtgactgaaaacaatcagggtgtttagctttgtcttattttaacacaaacccctgattctggactaacttattaccctaacaaaattgtcttttttttctttcttaatgcaacagtgaaatgtatcttattcctctggggacgccagaaacgtagagaaccttgtgtatgcccccttgatggagaaaagatgatttgcttacatcctcctatgaacattgcagaatctgcggctgaggagattactggccttgtcgacgtttataatcctatgttcaatccacgccattacatg

SEQ ID NO: 180370 - DNA, 51 bp, Arabidopsis thaliana landsberg
ttatatcaccaaccggtgcatcatcaagtgttcgaccaaaagctatcggat

SEQ ID NO: 180371 - DNA, 361 bp, Arabidopsis thaliana landsberg
ggacgtgggcgtgtacgcctcgatgccggccatgatccgcaacggcggcaagctgtggggcgccgacggtgccgaggacgacaccctcgcggtcatccccgattcctcctacgccccggtctacgcgaccgtcgtcgaggacgtgaagaagaacggcccgctggacccggcgacgatcggcaccgtccccaacgtcggtctcatggcgcaggccgtggaagagtacggctcccacaacaagaccttcgagatccccgccgcgggcaccgtcaccgtggtgaacgcgtacggcgaggtcctgatcagccacgacgtcgaggccggcgacatctggcgcgcctgccaaaccaaggacatcccg

SEQ ID NO: 180372 - DNA, 743 bp, Arabidopsis thaliana landsberg
gtacacaggtcaaataaatgtgtattgtctattaatgaaagtatcgtcgctgttcaggaatatgaaggggatggaattgattggactaaggtcgaattcatagacaatcaagagtgtctaaatctgattgagaaggtaagttgtagcgtgccatcttactcatcttgtctttcctccttatggaaagggattgtataatgctttgctccaaactatgacattaaggttttttcttacatgttttagaaaaccatttcgcacatcttttgcagaaacccattggtttggtatcgctattaaatgaggaatcaaattttccaaaggcaactgatacgacgtttgccaacaagctcaagcagcatttgaatgctaactcttgtttcaagggagagagaggtcggggtttcagaattaagcattatgccggagaggtcagttgttaccccaaatctaacaacgtatctgcatgaatagttctaatgtgatatgtatctgtcaaattatgaaggtgcaagaaaatgaacaaacatctcactttacattatggtgtttaataggttctctataatacaaatggcttcctggaaaagaacagagatccgctgcatgttgatcttatccaacttttatcattgtgcaaatgtcaattattgaacctgttttctactaagatgcatcacgattttctaaagccggcaaccttttcggactccatgaatcaaagtgtgattgccaagtttaag

SEQ ID NO: 180373 - DNA, 117 bp, Arabidopsis thaliana landsberg
ttttcctatcctcatgaaatcaacagaataagtaaaacgcagagagtgagagagcaagagactcacgatggagagatccgagagctgcagaagacgccattggaagaagaagaaagc

SEQ ID NO: 180374 - DNA, 280 bp, Arabidopsis thaliana landsberg
ggatatattgaagaacttgaagcgtgataagggtgaagatgctgttaaaggtcaagcggtgaagaatcagaaggtatgaccttgttctgcggtttgcgaagtagtctaactagaaatcagttgcagttgtatattcctattttatgttaatgaagttgatctagagcgaatttttgacaattctttctttgtgctctatgtaaaggctctttgggataagattctggagttcagattcttacttcagaaagcatttgatcgctcacccagattaccacag

SEQ ID NO: 180375 - DNA, 147 bp, Arabidopsis thaliana landsberg
atgataagtaagaggaatgataaatttttggaataagtaaaggaaacatatttgtttgattagttgcaaactaaaacctgttttgcagtgtgttcacgatttggtacaacaatgatggcaccggaatgtggatggatgtatgactga

SEQ ID NO: 180376 - DNA, 119 bp, Arabidopsis thaliana landsberg
cggaaaccgctggggttgacaaaatgccttccctacaaatatttggattttcagctcgatatgtcaacaaagtggagaatcccaatgacattaaaaacacaaacccaaagaggaactga

SEQ ID NO: 180377 - DNA, 1397 bp, Arabidopsis thaliana landsberg
atgccgcgtaaacctagacatcgtgtaccggagattctatggaggttattcggaaacagagccaggaatttaaacgacgcaatagtagatctgattcctaaccggaatatccagccggagcaatgccgatgccggggtcaaggttgtctcggttgcagcagcgataaaccggcgtttctgctgcgttccgatgatcccattcactaccgtaaacttcttcaccgttgcttcgttgtacttcacgaacaaacccctccgcttctggatttctctccaacatcttggtggtcacagagagaggtaagattcttcttcccactgtactatacattgctttgagtgcttaatttgagatatttcaagacgtggctactccttataaaatgcctctatgttatcttattttgtatgatgttgctgatttctaaacattttgcttcaattgagtttatcagattgttgaaaggattattgaaatgatgcaatctggatgtgattgccaaaatgtgatatgtgccagatatgataaggtgaattcttcttcttccttctcaaactcaatgtagagtgctgattttcttagcctaatgatttctcgtctcctttgacagtatgatcagtcgagccctattttggagctattgacaagttcatcttgggagtttcttctcaagcgggtttgttctcaaaccctttagatgatttactttcaatattcgagtttgcggtcactaatattcaagttcccttgtttataggtcggtccatgacgtcatggtttatcttctacagcaaacatcaatattcttaccattactagggaaaaaacaccatcaagtgtctggacctcctctatgtatcaagcataagcgtgagtctcagaattaaacttgtatccgagctcttctgttggctttcttttgaaacttccactttcttgttggttctctgaatacttatgatttgtctgtgactgcttggttatcgattatcaacttctggtttttagttcatattaacttagtaaagttttccttctccatggtatagggacattgtcagtccatgaaaacaaaagaaagagggatgacaacgttcagccaccaacgaaaaggcagtggctttcttcagctgtcgatgactgtcctaaggatgactctgcaactattacgcccatagttggcgaggatgtagaccaacatagagagaaaaaaactactaagcgttcaagaatatatcttaagcgtcggcgaaagcagagaaaggtcaatttcaaaaaagttgactgtaatgctccttgtataactcccagtacaaatggtaaagtctcaactggtaatgacgaaatgaatctgcacattggtataaatggaagtctcactgattttgtaaagcag

SEQ ID NO: 180378 - DNA, 39 bp, Arabidopsis thaliana landsberg
atgaggaatttgaatgatggctttagatactgttatcag

SEQ ID NO: 180379 - DNA, 1780 bp, Arabidopsis thaliana landsberg
atggacgttgttggaattagtcctgaagaacaggtaccttttgttttttcattgacatgatcagcaatgaggataactcttcttacattttacttttgtaggatgcaatctttcgggtagttgctgctatccttcatctaggaaacattgagtttgcaaagagcgaagaatcagatggtgcagaacccaaggacgataaatcccggttccatctaaaagttgctgcaaaacttttcatgtatatgcttcactattatgtgttctcggattataggtttcttgtcaatgggaggtagaaccctgattgctcttttttgggtaggtgtgatgagaaagctctagagaactccttgtgcaatagggtgatggtgactcgtggtgaaagcattacaaagcctcttgatcccggtagtgcagcactaagcagagatgctcttgccaagattgtctattctaaattgtttgattggtaggtttacaataacggcttctttcttaagggcttattatcaatcctgggatatgaagttttgaaagctaacaaatttattgctcccaggcttgtgaccaagataaataattccattggccaagactcaagttctaagtacataattggagtcctggatatttatggatttgagagtttcaagacaaacaggtgcttaaccggtacgctaccaaaatgttcaatttcctttttcgagttgatttataaactccctatactgcttcctgcatggctgcccatatgctctctgatttagtcttcttcaaacattgagcagatggtttgttattggatttcttaagttttagctacttagctagagatttttttctggtctgggccaatattattattattctcataattgattgttcctagctgttatatggttcaactgataacagttttaatgcttgtgttacaattacaacgttctctttctcttttcacattttgcagttttgaacacttttgtataaacctgacaaacaagaagctgcatcatcatttcaatcacaccagcagactgacgttcttttcatattttcgattcttgattgatctaattttatgctgatccatattcatgcatatgttcctctcttctacagcatgtgttcaagatggagcaagaagaatatactaaagaagagattgactggagttacatagagttcattgataatcaagatgtccttgaccttatagaaaaggtaagtagtatcacaatgagtggtgttggaatctttattccgttttctagcagttccagtttcatacatatttattgatttctagcacctaatacagaattgttcaatgtcagaaacctggtggaattattgctcttcttgatgaggcttggtaatgtaccaaagcgtcatgttctttcttcactgatttctttttacttcttcaataagtggctgagtttgtgtatgcctctacagtatgttcccaagatcaacacatgatacacttgcagaaaagctataccagacatttggtagccacaagcgttttaccaagccaaaattggctcgtacagactttaccatctgccattatgctggtgatgttagtgatttaatttactacagaagtttgtgcttaaatgtttgtctttaagtaatggcaaaaatgtcaatgtggtgtaatgactgatttgatgttcaacttcaggtcacttatcagactgaactatttgtagacaagaacaaagattatgttgttggagaacatcaatctctcatgaactcttcagattga

SEQ ID NO: 180380 - DNA, 377 bp, Arabidopsis thaliana landsberg
atgcacacgcctaagattcggttgatcaccattcggtgttatttggttcggttcggtggtccaaaaatcaaatcaaaccaaatcatgtacgttatgagatgcattaggactttcttataggagttacaactcaaaaacgaatcaatcaattgacttcttataatttattttgttggggttttacataaataacgtttgtgtgtgtatattaatgcagcgaaaagatagtgattccgagggagaagcaaaagataataatgcaaggaagcgacgcatcaaaagtgataattcaatacaatgatgcaggactatctgcttcgagtggtcctttaagagtagacgccgaatactttgtcgctatcaacattactttcaag

SEQ ID NO: 180381 - DNA, 20 bp, Arabidopsis thaliana landsberg
atgaagatggaattgaagaa

SEQ ID NO: 180382 - DNA, 377 bp, Arabidopsis thaliana landsberg
  unsure (1)..(377): unsure at all n locations
atggaccgtaccaatggtctttatgagcgcatctcgcatatggacaaacgcatgttcatcgatggagaggccgaagagattgcggtcaatccggtcatgaaacagatggccatgatgcaaaacgccttcgccagcgaaaccttcagcggccagtaagcataagcctttctaaatacacgaaaaaggcgtgaccttccgggtcacgcctttttcgtgcgcgcgtctccaaattcccnnnnnnnnnnnnnnnnnnnnnnnnnnnnnnnnnnnnngcacgagttgtgaaacctataaggcgagctgtttcactttgatacagcgccacaacaagtctgttaccggttccactcatggccaccgatatcgatctgcaatgg

SEQ ID NO: 180383 - DNA, 660 bp, Arabidopsis thaliana landsberg
  unsure (1)..(660): unsure at all n locations
atggtttgctgcatggttttgagagtttcagctaacgaagcactgatggcgtcttctatggccattgctgcttgtctcgaaaatgtggtgaagaaaaatctgatgacttaagaatcctccgtccccacaggcggcgcgaaaatgtggatctcggattcacacactcaagtatttatttatttagagagaaggattattcttgaagacaaatgtacttgataattttttaataancatagagaaaactatgagttttgtaagaaaatgtgtatagtaagtctgcacaaaaatgcgtgtgtctttacatggtcattgacccacaaattatactcaaagaatacatttaattctcatttacacacaattattctatcttaaatgtatccgtttcagttttcgaattaactattcaaacgttcaaatttgaattgatttcaaacttcctgggctttatcttctagccctcttgactctccaatccgggcagttttgacctcgatgtcccgttcacctcgcagatccatcacttcgtgtgtacttttgcttaaagaagcccatatgcctttcctattttgggcccctccttcttacgcggcgatctttgaccgatcccgaacccatggtgcgggatccgacaccaacaaagattgctccaaatga

SEQ ID NO: 180384 - DNA, 99 bp, Arabidopsis thaliana landsberg
ttaactccctgcacttgttccatcacctactatgcggtgcagcagatgtcgaacaccagtcgagtgcacaggggcgagatgcacggcgacaggacctaa

SEQ ID NO: 180385 - DNA, 466 bp, Arabidopsis thaliana landsberg
atggacacatatgacaggtaaagaaaataaataggagcatccatgtggcccgtggaacatgacgacagcccaccaaattactcatgtttttaaagagagacattgacaaattttaatatcaatagaagcttcaaattcctctactttaggacaactaaaagagcaaagtaatgaagaaaaaaagtgaagcaaggtcaaccttttggtatcatctaggtgtttattatggggtttggttcacttttttgtttgcattgtttggattttggatttcttttggagttctatttcatattatcagtttttatctttgcgtatttaagaaacttttactgaggtaaaatattacacaaattgccactgattttagagaacaaattcaatctaaaaaactcgaaacaccgatttgttttgtagagctgaagcacacctaaaccaaaaacctaatccaaccggaaccatttaa

SEQ ID NO: 180386 - DNA, 828 bp, Arabidopsis thaliana landsberg
gaaaacagcgaatggaatgagtggcaaggtagtgttctgcaggaccgcaacacggttgaaaatgtcaacagatgaggatgtgggtatgttaacctctactcacaaatcatctagtaaccatttaattggtcagtctgctacataatgctgattatggatgtaaaaattcatgtgtgatccttgttcctcttggacaaaaccctcaaagataattctgcattgatgactgatggtatcatagtcaaataatatttcttctcatgacgagaccactcagtaaatgcaccatgatctggtcccgggttttggattttatcttcactctttttggttataaaaattcctaaactaattgttacgtgtaggcgcccaactaccctacaagataggacaagagatagcgatgaggaagacagggattacgatgttgcagctctggccaataactctaagccaagcatttagatacaaaatatatggaaacgatgacaatgaagaggtatcttctcacactagtgcttttcttcaatttatgaatgatttcctgggtactgaatttatcgtctttgtatttctctcaggaccacaatgcccttgatagagacgatgatgtaagtcttgcaaaaattcttctctccgcttttttgaaaaatcaaggaaactatcaacatcttttatcacactatgatacgtatgggggatgtacgctaataagagtttgctattgaaaattggaatgtgtttatatactatacaggatgtttacttcgacgatgaatctgctgaagtagtaatttcatccttaagacttggggatgaccaaggaag

SEQ ID NO: 180387 - DNA, 120 bp, Arabidopsis thaliana landsberg
atgacttatgagctagaaggacacgagcatcgtgtatccgacgttaacgaaggttttgaatgcgatgcttgcaatcgatcctacggtgatggctactcatgtggtgaatgcaagtttacg

SEQ ID NO: 180388 - DNA, 219 bp, Arabidopsis thaliana landsberg
gaggaggaccaaaatagaattgagacatatgacatctcacaattcgattttgtgacgaccgataaagagctagaaatccttgcttgcttgggtagccagaatcaaccagataatacttctctgacggaggcaaaagaaactcggaatcactatgctgtgctatttgcagaacaactgtatcgtggcaagaacctggtgctccatttcaaatatatatga

SEQ ID NO: 180389 - DNA, 924 bp, Arabidopsis thaliana landsberg
atggcacaacaatcaaggtcttttaaactgttgtcagaagaggctgccaaagcccctcaaaatgaagaaattaaagtaatctttgcgatctgtttatgatctttatcatattttggatcaaattctgcagatatttactttcctggttgtctttggttttatgcaggcagagattataaacctcaatggcgacatcaaggcaaagaacgaccagattgctacgttagggaaacaaatattggattttgttatagcatcacatgatgaattggataaatctgatatcgtgcaggtcgattatctttttcaaacatcacacagtagccttgtgcttcttgttctgacatttgtttgaggttggattttctctcatgtgagtcgctcttatcttcaggctgtttctgaaatgagggctcaactaaatgagaaatgttttgaactcgaggtgctgctgaaactctctctctttacacaatacttcagctcttaattgatactgcacctagatggctttgctatataacctacctgcaactatatatcttatttagctcgatatgatctgttaaggattaggactctttttactcagtattcatttaatttacaggttaaagctgcagataatcgtatcattcaggaacaactcaccgaaaaggttcagataatacaccgtctctttccgcagttccagcgtatttaggaacctttgaagctagtgcgcagacatttcagagaattatctaactgatcaactcttttctgcagacaagtttatgtgaagatttgcaagaagaggttgcaaacctaaagcagcagctctctgacgccctggaactgggagatatcaactcggtcacatgtcacatgcaacaatcttctcaatcgccaaacaaaaatgaagaaaaagtcatagaagcacag

SEQ ID NO: 180390 - DNA, 119 bp, Arabidopsis thaliana landsberg
caccattttatcaaatgcagcagtattaccgggttggaaaacttgatgattgtactaagaagttctctgacctctttgattgtctttccttgaagacaaaaagagcttctgaagccgag

SEQ ID NO: 180391 - DNA, 93 bp, Arabidopsis thaliana landsberg
aaatttcggaattctggaggtggaggtaacgacgacaaagacgatttcggagaagaagatagagaagaagagtggagccgtcgaaggatgtga

SEQ ID NO: 180392 - DNA, 662 bp, Arabidopsis thaliana landsberg
atggatgtgtacgagttcatgagcagtggggtcctcttcaaaacggtgagaaaggatgaggaaatgaagaagctgaagccggtgattattcatatgaattaccattcagataaactcgaaagaatgcaagctgcagtggagttctacgttaatggcaagcaagatgcgcttgataggttccgtgatggttcatagaggagtatatgcttgttaagcaagatatcgaaagaaccaaacttcttcttcttctgatgtttaggttattaaaccgcttttttgttttgtcaaacttggaagttggttgaggaaaattggaaccatttcttttcgtttcgatcgaaaaattaaacaacttctctctttctctgtcagtatgttatgggcttgatcacagaagacgaaagtgttcactaataagatgatgtttgttatttaagtttgaatactatagccgaatctagaaatacttggcgggagatggaattgattggggcgaacaagcacattatatttttaagggtttccttcgacttctcttttatattttagggctaaacgaaagctctgattccttaaggccgtcagccaccgccgaagaggagcttcgttggtctcttaagaaagaaaagaaggggagaatatggcttatcaagaagcaatga

SEQ ID NO: 180393 - DNA, 339 bp, Arabidopsis thaliana landsberg
cgtgagcgcgccgcggcccgcgaggtcggcgccctgcggcacctggtggacctgcacgccgacgtggcgaccctcgacagcgaggagtccgcgctggccgcggtcgtccaggcggcgatgcaggtcgtgccgcacggcgacggggcggtcatcgagctgcccgaggacctgccgcaggacggcggcgagggcgcacgggaggtgctgcgctaccgcgcggtgaccggcaccctggccgaccagctcggccaggtcgtggaccggcaccgctcgctgtcgggccgctcctaccacacccgcagcctgctgcactcgcgcgacaccgagaacgacccgcgc

SEQ ID NO: 180394 - DNA, 410 bp, Arabidopsis thaliana landsberg
gtatgtatcaagtgagttagcaacagatgttattgtcatcattggtgatgtcaaattctatcttcacaaggtacacatttttatatagaaagattcaaatcttttgtgtatccttaatcttgatatgaaactttggttgatcaaatcttttgttatgtgttttgatgttttcagtttccgttgctttcaaaaagtgcacggttgcagaagctaatcacaacatcaacatcatcatcaaatgaagagaatcagattcatcatcatcatcatgaagacgagattgaaatagcagagattcctggtggtcctgcttcatttgagatctgtgctaaattctgttacggaatgaccgttactctaaacgcttacaacgtagtcgctgctcgctgcgccgctgaatttcttgaaat

SEQ ID NO: 180395 - DNA, 478 bp, Arabidopsis thaliana landsberg
atggacaccagcctcgacgcgggcgccaaccacgacgccgcacacccccaggactggccctacgaggagaaggtgatgggctgggccgcctggtccatcgacaccggccactcctacgccagtgacggtcgccaggactggcccggcgacagcggcttctcctccgcaggcttccaacccgcctggtggctcacccccgaccagcgcagccagatcaagcccccgctggacaccttctgcaacgagtccaacgactgcgacgtctccgacccgcccccgtgcgagaccgaacacaatcgaaggctgcgaccaactccactggtggcacgagccgaacaccgactggaagcccgactgcgccgacacctgcggccacgagagcatcaaatacctgaccctgcgcgccgaaccaggccgcggctaccgcctccaatacggcgaacccgactgcacggcggcccccgcgggcgccatggtc

SEQ ID NO: 180396 - DNA, 366 bp, Arabidopsis thaliana landsberg
gagcctttaacactacctgatcagctagatgaagctgcaaactacatcaagaagctacaagtgaacgtggagaaaaagagagaaaggaaaaggaacctcgttgcgactacaactttggagaaactgaattccgtcggatcttcatcggtttcgtcgagcgtcgatgtctccgtgccaagaaagctgccaaaaatcgagattcaagaaactggttccatttttcacatctttcttgtgacaagcttggaacacaagtttatgttttgtgagatcattcgtgttctcaccgaggaattaggagctgagatcactcatgctggatactccattgttgatgatgctgtcttccacacccttcactgcaag

SEQ ID NO: 180397 - DNA, 457 bp, Arabidopsis thaliana landsberg
atggatttttctgatgaagacgacgacgaagactgttttggttctcgtttcaacgacggtgtaaatgaagaagaagaagacgaagagggttttgtgtttaacgacgatgttgaagagaatgaagaagaagagggttttgcgtctgatttctataaggctggttctgattggtcttgtttagtggaagatgaagagactgattcttcttctgtgaagaagatgaaacagtcgaacttgtttcagatttggggtttacaagagaattctcctgatacaacgaagaagatgaaacaaactgatttgtttcagagttggggtttacaaaacccttctcctttcacttcacctgcttcgaattcggcgaagaagacgacgagtgctcttggaaaaaggcgtagagactcttcgtttagcaatgactcgcctcgaccatgtccattttacaagaaacttccag

SEQ ID NO: 180398 - DNA, 259 bp, Arabidopsis thaliana landsberg
atgtttgtttcacgtggctaccgacgaatccggagtcagcgttatcaaagacggagatacctcctgagcgatggatctgagcggaggtacgaacctgtttctcccactggatgccgccccaagaagcggttagataacggctaccggaatcgacaaagctttggaaactcaagtaagaagcggtgagagcgatgaggaagagagcccaaagaaacatggtgctcgtagaagcgaaacaacggtggagctgacggtttga

SEQ ID NO: 180399 - DNA, 430 bp, Arabidopsis thaliana landsberg
  unsure (1)..(430): unsure at all n locations
ctgacagcatcatcccgccgtcaacgaccagggtgtgcccgacaatgtatgacgacagcggcgagaccagaaacaacgccgctccggccatttcatccggcatagcggggcgcccgatcggtaggcgcgccgaaattttttcgagcattttgggnnnnnnnnnnnnnnnnnnnnnnnnnnncgtttcaacaaggccgggcgacaagccgttcacattgatgccatcccgaatgtagtccgcggccaaggccctcgtcagacccagtatccccgatttggatgccgtataagccggctgctcgcgcagtgtccggtaggccgcaaccgagctcacgaggattatggccccttttgtcgcccgcagcatcggtcgaaagcgttcggcgcagtcgaacatcgaattgagattgatctccatgatttcccggag

SEQ ID NO: 180400 - DNA, 148 bp, Arabidopsis thaliana landsberg
atgagcccatatattgatcatttagtaaaagtcattgagagagatattatcaacggagcccaaaccatcgaatgttccgaacttggagtaataattattagtaatcgtcgtatgtccacccaaaaaataaataggagtatccaaagac

SEQ ID NO: 180401 - DNA, 693 bp, Arabidopsis thaliana landsberg
atggatgagtggacctgggtaagcaccatgattaagctaccttagttttaacttttttggtttgccacacatagctacaaatactcacatgggtaaagaagttttgcgctcttaactgtggatattgcactaaagctattagattagagcattctgatgattgtgccattctagatctctggtgtgtttgtagatgacttcatcaatagagagatggaaccaaacacgtctttctactggtcccataacgttatccactcttgagttgtacagatactcaattcaaaaaacccgtgtttctaatctcaggattacatgatagacttcaatgataaaagtcatcctgtaaaggcatttagatgttgctgcggaagcgaatcatgcagagacagaaaaataaaaggtcagttttctttacacattgcttttgttgttcaaacctttgtgacagaatgctggctacttccttcgtttgcttacacattctaagttagattttgtgtagtttcgtatgagatccgagccaaaaatatgatttggcaaagtacattggttcacagaaatgaaatgatgccaccaaaaaagagaaactatatttcttggctaattatgcattccggtgatatgtcatgtcaggatctcaaggcaagtctatagagagaagaaagattgtttctgctaaaaaacaacaag

SEQ ID NO: 180402 - DNA, 153 bp, Arabidopsis thaliana landsberg
atgtggtggccgacgatcggcggagcggtcgacggcctggggggtcttgtcgacgcgcatgtgctaggggcgggctattcgaacattcagcacctcctggacggcggcttcacggtccggatcgttctggcgctgctgctggtgaaaggggcg

SEQ ID NO: 180403 - DNA, 73 bp, Arabidopsis thaliana landsberg
atgccaaaggagactatcagcaagtctgacgaaggtgggctggttaggttgaaatacaccttcagatatgaag

SEQ ID NO: 180404 - DNA, 611 bp, Arabidopsis thaliana landsberg
atgtgtctttggatcataaacctctccccaatcctcgatatttttggacgaagagcctccaatcacgtacaacttaccgtcgattacatcagcggctggagaaactcgaggtaggcgcaatgtttgggagactactccattggtgagatagagaattgagtatcaacactctattgctcctttgtctattcacgatgcctccgataatgtaaatcaatgaatcgactaaaagaatggtcgagtatttgggatgttgataaggaaacgaagggatgggtagtaacttctgttgttttggagttgaggaaagtatgaaccagctagggttagggtttttcttattgaggtctaagcaaacgaaatcttctgttattccaatgcggagtcgtgtggcctcgagctcaggcgaagcgatgagagatcttaaattcttggagactaagaatagagttggataatggattctcgagacacgagcccaacaattcagagctacgtcgaacggtaacgacgaaaacgacgtcggaggagacgacgactctgatgatgatgatttcggggagctcatctcttccgtcgtcgtttgtgtttcgattttttttttcatttga

SEQ ID NO: 180405 - DNA, 231 bp, Arabidopsis thaliana landsberg
aaggaagcaaaagttgcaaacataaagagcaaaagggttgatattctcgagctcgataatcttatactcgaccctttcctcgccattgaaatagatccaaaatcagatctcttagtcaaagcaatcagacgcaaatgcctcttcactgtcgaaattcgatcaaatttcactaattcaaatctccagaaatcggattttctggatccaatgattcgtcgtcactcaaaataa

SEQ ID NO: 180406 - DNA, 155 bp, Arabidopsis thaliana landsberg
tcttctctcagaccgcatttggatttacgacaacccagcaaaattctgaatttgagattcccgccgtctctttgattcaagaaattcgatacgagaatcgaaatgggttgtcctccgaattcgtgatacaagcaggatcaaagacaaagcaatga

SEQ ID NO: 180407 - DNA, 999 bp, Arabidopsis thaliana landsberg
atggaggcactgacggagctttgtgacattatagcaaagaatccgaagcaattctcggagaagttagcttggatatgcggtcgttgtccacaaacggaatggcttctcgctgaatcgcccagggtttctcggagtcatctcaacgctgttttagccgttgctcggatcatctccaagaatccagaatcaatcgataatcgtgccaaatccgtcgttaatgagtttctcagcgctatacctgcatcgttccgccgttccttctggccgcattctttcccttcgcagctgatctcttcgttttattgtgatttcttgagttatctttcgtgtgcggcggatctatccccggaatttggtacagaggttgctaggtttacaggggaagttgtgatagccgctattgcaccgagttctggtgatagcgacggggatccagcaatttctaaggctttcttggtcgcgctttctcagcatttcccgtcgattctgcagtctgatggagataaattgataacaatgctgcttgatcagtttgttctgaaccgtgctcctgcttcgcccaaggaacagcggcagcagaactcggctaactctgaaactgatacttcgtcgtctcagggctctcctgttagtacgaaccgttatccctcgggaaaaactgaaatggctagtcctggcgatgaggtggctagccatgggtccaatttatcctctaagagttcatcgtctgtagtgatgaatgggggtagtattgtgtggaagagtggtgttgatcagctgagctttggatttagcgaggggagtggaggtgctaaccctgtttttagacaacaagtggcttcttttgaagacgaatccattgagagcttggagaagcaagagattgcctttagattgataacccatattttggataaagtcaaaattgactctaaacttcaggatcaagtgagatttatagccaagaggcagcttcagtccatgtctgcatttctgaag

SEQ ID NO: 180408 - DNA, 1167 bp, Arabidopsis thaliana landsberg
atgaaaggaagcttggaacaacaacttctattagacagcctttcgggtacaatgcagagaatttgtcgaactttgagaactgtttcagaagtggggtcaactaaaaaagaagggactaaacctggatttcggagtagtgatatgtctaatttcccgcagacaacgtcttcagaaaattttcagacaatatcattggattccgagtttaactctactagaagcatgttttcgggtatgtcctctgataaagaaaacagtatcacagtatctcaaggcactttggagcaggtatgtgatttatgcaatttggttattctgtaaattttgtgaaacagttcgttaaactgaacactgatatttttccttacaacttttcataggatgtgagcaaagcaagaacaccagagaagaagaaaagcactacagagaaaaatgtgagcttaagcgctctccaacaacacttctctgggagtctaaaggatgctgcaaaaagccttggtggtgagacttccgcatatttccaagcatgggtttatttttgttagcacacaaactatctgaccctcgacttggattttcttctgcagtttgtccaactacattgaaacggatatgcaggcaacatgggatcatgaggtggccatctcgtaagattaacaaagtgaacaggtcactaaggaaaatacagacggtactggactcggtccaaggtgtagaaggaggactaaagttcgactcagcaactggcgaattcattgcagttagaccttttattcaagaaattgatacccaaaagggtctgtcgtctcttgataatgatgcacatgcaagaagaagtcaggaggatatgcctgacgatacttcattcaagctccaggaagctaaatctgtcgacaatgccattcagttagaggaggatacaaccatgaatcaagcaagaccaggtaagaacttctctatccataaaccatagatggagcgattagaatcttaatccattttcagtttttgcaggatcattcatggaggttaatgctagtggtcagccatgggcttggatggccaaagagtctggcttgaatggcagtgaaggaataaagagcgtttgcaacttaagctctgtggaaatttcagatggaatggatccaacaatccgatgcagtggca

SEQ ID NO: 180409 - DNA, 690 bp, Arabidopsis thaliana landsberg
atgcttgagcatgactggtgtatagactgggtaagtaacgtgtttctatttttctactttcccggtaaagcttgttttggtcttcgaacaaaagctaacaatcatctaattcattaaaaaaaaaaaaagagaatgtgggatatatatcaaatgtagttgttgcacacatgatatagatatctaatgaatatacaatccataaatctataaagtcttaattccatggaatttcaactatattcaatcgactactaggatctcattttatatttgactgtattatatacattttttttcttgaaaagttaagcaacaagaaaagttccatgtagagctagtagattgaagtttcaactgcaattacttgtatacatcagaaaagcaataaaattatgttgtaagatttatgtttaatgtcaacggatacttagacctatttatatatgaatggacactatttcatatttgcatcaatattacattttcagaaaaatttaaagacacaaaaaaggttcataagtattgttgccattataatccttctttaccaggccatcgcgatgggtgcactcttatgctatcacaaggaggaggaggcgaagtcatctcctccaaaagataacgtcaaaaaaggtgaaacgacgggaaaaaaagatggaggtcttgttgttgtgtcgtcttcggaaaaaa

SEQ ID NO: 180410 - DNA, 862 bp, Arabidopsis thaliana landsberg
atgtataagtctaacttcgccgtccatagtaggtctggctttgctggtaagatctctcttgaagcgttagagatctgtttgttgttttgcctctttccataactgtctatatctagatttgatgcttttacctctgcccttttgtgggatttgaaacggatgaattctgcaattgaaaaaatcccatgtagatctgttccagttcagcttactgatctgtttttagtaaagcaatcaattgtattattcgagttttcagtttagtaaagtaaacttagtatgcgttttccgttttgtacaggtgggaaaacattcgtcttatgggacgtcgaggtttgccctatccctgatggtcttggtcctcatgatgttttcagtaacataaaacgtgtccttatggataatggttatcgtggtgatgtctcaactacaccttataccgatttgacaaaatcaaatggtgagtttaatggtattcctgtccgtcacctatccgcaggtgaattccttaccctttcaattaaactctcattctcctttaaacttgtatgtcttgtatcttgatatgttctcatatatgttttcaggagatagagatgcgagacttgaggtgtatatgatagacttatattcttgtgttgtgaaggaagatggaccattaaatttgatgctatttgtcggcgacatctcatcacgcagcaaggacttcttcagggtttttcgtttgttgcaatctagctcatcagactcatcagtaccgctatctttaacccaagatgggatttgcaaggccctgacatttggagaagaggttatcatcagggaatgtggggagcgtcggaaggttccaaattctgactag

SEQ ID NO: 180411 - DNA, 302 bp, Arabidopsis thaliana landsberg
gggaccaccttatgggtttatagggaaagtactgttagtatttgatgagaatccttcagctaaagtgggtgttagatttgagaatccagtacctgatggagttgatcttggtcaactgtgtgaaatgggacatgggttcttctgcagtggtacgtcatgttcagtagtgcattggttactcgtcctcagctgctcttgtctcacacactgtttcgtctgttcttttaatagctactgatcttcagttcgaaagctcggcatctgacgatctaaatgaattacttgttaccaaattgtttgag

SEQ ID NO: 180412 - DNA, 825 bp, Arabidopsis thaliana landsberg
atggcaatgttaaagaacaaacacatgaccgtctcattgatcttggtgtgtctcgttgtggtgtctccaatggctgaggctcagcttggtcttggtggtagtggtggtcttggtggtcttattgggggtcttgttgggggtctcggtggtctggttggtggtcttgtagggggtattctcaatctcgtcaatatcaatggggttgtcttttgctctctcaatggtgctcccagtggcacttccactcctgctttcgctagtaagctttccattcttctactttcacctttgatcaatcatgcaaaaccagcccaacaaaaattgcttaggttctgttaaccaggcgggttttgttgtagattatgtcaaatatacaatcgtacaaatgatattatacaaaacaattgcttagaattctaaaaatgcacgaatttttttcttctattgttcctacacactcaaagttataaattcaaatggaagtatgagttaacctacagatacggactaagataaagattcacgaaataattaatatacagtttaataaatttctcaacgtatatatatatttactaattctaatactgcaaactaacagatgcaggagttgagctccagtgcggaaggcaaaacagggtcgtttcaacagcgaccacgaatgctgccggattattctcgcttcctacggactcaattcagatgttactttccacacttctctctgattgtcgggtcgtcgtcacgaccgctctctccacatgcaacgccaacctcccgttccgttggcaacctcgtctcacggttagccatgatcggcaatag

SEQ ID NO: 180413 - DNA, 425 bp, Arabidopsis thaliana landsberg
catgatttgaagaccgaattagcggctttcacggatatatcaagcggtaatctgttgttggaaaagaatgacattcatgctgcggttgagtctgcgaggagagaactcgaagaagtaaaagccaacatagagaaagcagcttcagaggtgaaaaaattgaagataatagctggttcattacagtctgagcttggaagagagagacaggatctagaagaaactaagcaaaaagaaagtacgggtttggcccggacaaacgataaagacgcaggagaggagttggttgaaacagccaagaagttggagcaggcgacgaaagaggcagaggatgcaaaggcattggctacagcttctagagacgagcttagaatggcgaaggaattgtctgagcaagcgaaaagaggaatgtctacgatagagagtcg

SEQ ID NO: 180414 - DNA, 126 bp, Arabidopsis thaliana landsberg
ttagaatcggtggagctgcttgcatattaccaaagagataaagataagttgattcaagaagatggatattacagtctgaatgtgcatattaccttcgattgtggaggaactcatgatgagacttga

SEQ ID NO: 180415 - DNA, 2221 bp, Arabidopsis thaliana landsberg
  unsure (1)..(2221): unsure at all n locations
attgaccttaggagagccaataacacggaaattatgcttactaaagtaaagatgccgctacctgatatgatggtaagttccagtacctactttacctgagtgaaagtcatgactggttaccctttcatagtttgatgataattattctaatttttctttgcatcgtccaggctgcagttctggcaatggatgagtctgtactagatgttgatcaaatagagaatcttataaagttttgcccaaccaaggaggagatggagctacttaaggttatgtcttgacttttgagtagcattatctatntctgtctttactttggagatcatttgtgaaatatgtcaatttttggttatcattattcacttgttacttgacacgagtcattattcttggtcgtaattgattggtttgttgtagaactatactggtgacaaggcaaccttgggaaagtgtgagcaggtctgtctttaagtctttagattaccaatctcacactgtttttattttccactataatatagttcttaacaatttgcttagtttagctaaagctaaaggtccattaaaagagtatttacgtgtgattaatgcgttttcttctctcatccattttgcttccgcagtactttctatagctaatgaaggttccatggagtagaatcgaagctgagagtgttttccttcaagattcaattcggtactcaggtcggggggtatttacctataacgttttggattttgtcagtgtctaagtaactgtggaatcttgatctcctttttttatgatgattactttgcagataaaagaacttaataaaggtttaaatgccgtaaattctgcatgtgaggaggtaagatatttgcaatacttaaaactcaataatttacgcagcccatttgcgtttatctttcttagacattttctccttattgcttgtttatcagattcgtacttcacaaaagctaaaagagattatggcaaatatttctttgcatggggaacatattgaaccaaggaactgcggagggtgagtgttacattatcttttggctttaagatatctcctaacgcaacacaataacattcgtgtgttcaatgtgagctaagttaacgaaaggaatggcgcctttgtttaatcgttgcattatgtcctcttttgttttatctgaacgcaaatcctttgcactgctttctgtaggcagtgccgtgggattcaagttgaaaagtttattgatattaagcgacacatgtgcacctaacagcaagatgactctcatgcattatctttgcaaggtaaaactacaatcgaaagaacgaagcatgcattatatttatgcgatcatgaaaccatcctcttttattttcccaggtccttgcttccaaggcatcagatctactagacttccataaagatcttgaaagtcttgaatcagcttcaaaggtttgcctttgtacgtaccttttccgttcttagctgtaattttgactgtcctgtctatttcagatacaattgaagtctctggctgaggaaatacaagctataaccaaaggattggaaaaactgaacaagcaactcactgcatctgaaagtgatggtccagtttctcaagttttacgtaaagtatgttgttgtttttctatctatctcgatctcttgcatttctcttttatcaatcatgaatttgagattaggtccatgactctgccacataacttaatctaggtctatgtgttttggacaggtattgaaggacttcatatccatggctgagactcaagtagcaacggtatcgagtctttactcctccgtggtaatgtttgtcaatctcttattactagtagattccaagtgccttacatttgacaatgtgtttgatcttgaaagtaattacacttgtttttgaatcaatcttatgtatggacgacagggaaaaaatgctgatgcacttgcacactattttggcgaggatcctaaccattatccatttgaaaaaggtatatatgcctcggaaacaataaacttcatcctctttagagagtggctcgttatatgtagctaataacattaagacctggtgatcgatcgatattgctgcagttaccacgacactcttgagttttataaggttgtttaagaaagcacacgaagagaatgtcaagcaagcggacttggacaagaataaagatgctaaggaagcggaaatggagaagacgaaataa

SEQ ID NO: 180416 - DNA, 150 bp, Arabidopsis thaliana landsberg
aaacaaacggggccgcagaaagcggaaagcgccgcaccacaaaaaggcgagcgcaagcgcgagcaacaaggggcaatggaaggaccaagaagaaaaagaaacaagcgacgagaaaaaggtaaccggaaggaacgcacaggccacgactga

SEQ ID NO: 180417 - DNA, 147 bp, Arabidopsis thaliana landsberg
atggcaatcttgttcgtctcctcttctgttttcttgttacgaatcttcaaggaaaagacaagactatgtttggctgaggggtcccaaggagaaggctacgatgatgaagatgatgatgatgatgatggtctcattgagattgatctt

SEQ ID NO: 180418 - DNA, 366 bp, Arabidopsis thaliana landsberg
ggaatgcgaaagcattgggtgacgtgaccaatgcatgtcgggaaacccgcgaacgaaagtcttatcgcaagatgaacattttgaccgacgatgatgttgccgaatctgaacttcgggagctcagtgtcaaagcctggtatgtgagtgtaattgctttgctgatttgggccaaggccattcgtttagttctttttttttttattttttgaataaatttccgctttcccgcaattcagtgtggcattttgtcggcagcaaatgtcaatggtttggtgcaacaaaatattccgcaagggtttgaacaagcggtcgcgaatcaactccaacaagcactggcaccaatccagaacacccagcaacaaataa

SEQ ID NO: 180419 - DNA, 533 bp, Arabidopsis thaliana landsberg
attgagagagcgcagtgcaataattgcatcgtatgggccaaaagcgacactttggctagggacataattagacgagcaccagatactatggtaaacagaaatggattgtcttgtgaggatcagatagagaagtttcttgctcattcctagtgattttggcaggtgggatacattgtgatggtagatcctttgactggggcgagaaacagcctgctgagaatgaagggagctagggttgtgggagtttatcatcccttgatcgatgaagaattagttagagttgtccgtcggtaagcaatcgatttcaatgtttcaaataaaaacacacctgctcatgtgtttacaaccttgctcgatctgatcaacaggagaaacaaagaggtgtatgcatggactgtggatgatgctgatcccatgaaaaggatgcttcacttaggtgtggatgctgttgtgacgagcgatccatctatgtttcagggtctcatggaagatcttagaactgagtgtcttgaagaaggtttttcaatacggac

SEQ ID NO: 180420 - DNA, 174 bp, Arabidopsis thaliana landsberg
ctctcacctcttcttctcctgttccacataaggataagagcggcccacaggacgtctccgacctctccctttggatgagtgcgacgtcgtcaaagggtcctatagtagttccatgggtcttctgcatcctcgaactggaggacacctcctcgcagccgactacgaaaacggaag

SEQ ID NO: 180421 - DNA, 75 bp, Arabidopsis thaliana landsberg
atggtgatatggtccatgtgcctcgatcggttcatgttgcataatcgggaccgtcaagatactatatcacgccag

SEQ ID NO: 180422 - DNA, 391 bp, Arabidopsis thaliana landsberg
  unsure (1)..(391): unsure at all n locations
atgcagatcattgtactttcacctactgaccccgggaagatcggtcccgatgcagtggtatgtacttccaataatcannnnnnnnnnnnnnnnnnnnnnnnnnnnnnnnnnnnnnnnnnnnnnnnnnnnnnnnnnnnnnnnnnnnnnnnnnnnnnnnnnnncgcttctacggtgaacaccaaccaggctacttatacttacgacaaccttaccactaccactttgttccgcgcgctggtgaagaatggcgtgggtgtggcaaaatattccggtatcgccgccaccgtaacggtgctcgacctggtaacgccatccaatgcagggccggaccagtcgctttgtaataccactactgccacgcttgccgggaatgcgcccagctccggtacag

SEQ ID NO: 180423 - DNA, 75 bp, Arabidopsis thaliana landsberg
atgtgtagaaggcggttacggctaggagtaacaaaagtgaaagactcaaccatcctccacgagcaagtgaatatg

SEQ ID NO: 180424 - DNA, 843 bp, Arabidopsis thaliana landsberg
atggagaaaggagacactgatttacagctttacaacgcttctgaacgcgcccggcagttgcataagttgaaaaagcgcagactgcaaggaaatgaggattctgtaagttgtttaccaaatttgtggcttaattttaaatttattttctggcttattatatattccccttcttcgtttcctaaacttgtccttgctttattgtggcatacttattccctaaaagttaaatctaattttgtcagagcaactgtattactactcatctaattcgatactctttcagttgttacttgaactgatcatcgtttccctcctgcgttttcttcaggtgttagcaaaactcgagaagtttaagcagtctatctctgcaaaaccgtttacctcgagtaatgaaccagtagtgttgacctcgagtagtgaaccagttgacaataaagaagaagatctctctgattggaagaatgtaaagctcaagtttgctcctgagcgtggcaaggtaaatctctaaggttccatcttacttgagtgcggatctaatggattcattactacgttgttctgtttagttaacattaaaatcgaaaatccagtagttcataggatagtgcatgctaatcacaaatgatttcatcagaaggctgagctatgtttgtgtttatagtgtcctgtggaagaacctgacagtgtgaaactatcctgcaggataaaatgtcacgcagggatgatccagatgcgtatatggtggttgaccctcttcttgaaaagggaaaagagaagttcaacagaatgcaagccaaacaaaaacgaagggagcgagaatggtctggaaaatctcttgcctga

SEQ ID NO: 180425 - DNA, 918 bp, Arabidopsis thaliana landsberg
atgaaacgagaacaagaagagatcgtggccgttcctgaaactggtaagaccaaattacactcaatctcagccatccataagaaaattatccggtttaacacattttaattactatatggattgaaaacagaggcagctgaagtggcagagattctggcacagtacgggatagagccacatgaatattcacctgtggttaatgctcttcgtaagaatcctcaagcttggcttgattttatgatgaggttagtctcactaatgaaaattagtgttattttatgtatactatatagtccattagtattattttatgtatattatatagtcttaattaaagagaaaatcgagggatacttttagatttctgcaaaagctgagcttatactttccaggtgtgggcaagattcttatatggtccgacttccaattttaatcttttttgttgcaacaaataaagtacgtgaatagtaacaaacagaaaacaacaaattacgtgaatataaaaacttatcttattgatttggttaagtttaacactctttacctatcacataatgtttatattcctactataagcatgtaacttgttatataagtgagactttattgtttcgttacaggtttgagctgggattagagaagcctgatccaaaaagagcgttacaaagcgcgttcacgattgcaatcgcttatgttcttggcggttttataccgttacttccctacatgctcataccgcatgccatggatgcggtagtggcgtctgtggttataactctgtttgcgctcttcatatttggctatgcaaaagggcatttcactggaagcaagcccctcagaagtgcgtttgaaaccgcctttataggagcgattgcttcagctgctgctttttgtttggctaaagttgtgcagcattag

SEQ ID NO: 180426 - DNA, 174 bp, Arabidopsis thaliana landsberg
ttttttgttcaagagcttatttctgaactgaatgaagtcttagtagaaggaaacatcgagaaagaagatcaatggaagaagaatcttaaagaagaaacattaaagatttttaagtttcttcctcaaaatattaaggatcttatcagattaactaagggtcattgtggatcttaa

SEQ ID NO: 180427 - DNA, 333 bp, Arabidopsis thaliana landsberg
atgcccgatggaaccggaggagattattactccgggccctcttttcatgcctggatgatcccccagcgggctgccgaggcgggtgttgtcgtccagccagtctttggggaagaagccgagatcggcgtatatcgggaagaggccaactgccgtatgacccttgccaatggagaagcggtcgcgctcgttctatcgaggctcgctgaggcggatcttcatcacgtcgtagtagagcgcggcaaagacttttgctgcggagaagacagaggtgttgtgcccctcctatgcgatgtcgatgaggcgtatggctttaagcctgatgaattgcgcccg

SEQ ID NO: 180428 - DNA, 780 bp, Arabidopsis thaliana landsberg
atggaagctcgagtcggtgtagtggtggaaggaggacagagagctcttaatacagccaccaccaccgccgttcataacaccgtcgtagacgccggaaacaggaaacttttacagcaacaaccacagacgcaacagacacaaagctgtcatcaacatcaccaaagtaataaacagtcgttgaatcagcagcaaggccatttcggcaccgttgagcgtcttctcgccggtggaatcgccggcgcatttagtaagacatgcaccgctcctcttgctcgtcttaccatcttgtttcaggtatagtttttacaagttaatgtgaaatttaagaaattttcaggcatctgaatttgattcttggtatgattgtgtaaggatccagttatgatataaagttggaaactttgacttaccctaaggctatttgaagctgaattgattttattgttgtattgacagatacaaggtatgcagtcggaagctgcaatcttgagcagtccaaacatttggcatgaagcttcgcgtattgttaaggaggaaggttttagagcattttggaaaggaaacttggttactgtagctcatcggcttccttatggtgcagttaacttctatgcatatgaagaatacaagactgtaagttgcattcaagtctcttttagagtgtggtctgtagtagttcatgctaagccttgccttgctttttgtttgcagttcttgcactcgaatccagtcttgcagagttataaaaaaaatgcgggtgtggacatttctgtgcacttt

SEQ ID NO: 180429 - DNA, 916 bp, Arabidopsis thaliana landsberg
atgagcagccagcaaaaagaagtgtacaaagctgttattaccaataattatcaagtcttgacaaagaaacgagatgctaaagtaagttttgtggatctcttgtgcttatgcagatgtgtatatattgtcttggtttaggaaccttttagactgtacttggtaggataattcggctggttaaactgtttcagatatctaacgtgctaatgaaattacgccaagtttgctctcatccgtatctgttaccagactttgagccaagatttgaagacgcaaatgaagcttttacgtaacatttgatcactaatcttgacgtattgattcctttttagtattttgtgctgacttttgcttgaccttttctgaattgttctaaagaaaactattggaagcttccggaaagttgcaactgttaaacaaaatgatggtcaaactcaaagagcaggggcacagagtgctaatctatacccaattccaacacaccctttaccttttggaagactacttcactttcaaggtaacctaatctgctatatctgtttgtcgacctattgatttgttcagttggtgttgtcgctctgcaaatgacttgcgatataatcttttccttccacttaaaagttactttttaatatatcttgagacgcaaggaacagtaactttctttttataatttgcttatatgcaattaaggaaaaactattgtatgatattgagccgtaacaaatttatttttattttgtcagaattggaattatgaacggattgatggaaagatcagtggacctgagaggcaagtaagaatagatcggtttaatgcagaaaactcgaaccggttctgttttttgctcagtacaagagctggtggaatagggataaaccttgcaacagctgatacagtcatcatttatgacag

SEQ ID NO: 180430 - DNA, 420 bp, Arabidopsis thaliana landsberg
atggttaggcgaagaagttctgtcgggtcggccctttctgtcgcgatgcgaagttttgggctcgagtcggacaccgttttgaaaatcggattcctggcgcccttgacggggccgctgaaggcgtgggccgtgccgggactcaatggaagcaagatttgggtcgagcgcgtgaacgcggccggcgggctgagagttggcggtcgccgatacatgctcgaactcgtgccctacgatacgatgtaccggccggagctggcgctcaagggagccaaggagctcatcctttcggccggcgtcaaactcatccttatgattggcggtgacgatctctcggacggtgtccgcagcatcatcaatcaacaccgcatgctggtcgcgacgttgctccccagcgacctttctccggatacgccgacgctg

SEQ ID NO: 180431 - DNA, 222 bp, Arabidopsis thaliana landsberg
atatcgagactatccagaaaagatttaaggcttgatcaagtgccaaaaaggttttcggtatccaatatgatggaccaaaatcttgtatttgaatatcgaatgtgtagaaggttgacaagtttggttcgaattcgaagtttggttcgaattcgaagttcgaaccaaacgcaacacttttacatgaaaatcgttggcaccataaataacactactatgaattaa

SEQ ID NO: 180432 - DNA, 670 bp, Arabidopsis thaliana landsberg
atgctcaaactcgagatagaagctttgcagagagaatatgaagatctcaagattaccaaaaaagaatctttgcaccaatttcaggtttctcctttcatctatttctttatcattggtgaagctcttctatgtatattacatagtcatattgagaaacttttgtctatcctatgaaaaattgaggagtttttttaccaaaatgtaatcgaatatttttatataacaacaccacatataactttgatcatagaaaaagtggatcatatttttttggaactgattagcttaatctataaacttctaagctcaaatataagctcaagataaatgagatgttcatatggcactctaattgagttgttcacatggcactctaagttcaatattattcttcttcttttttgaactttggcaggaggtgaaggtagagaagattggggaaatgtttcaagtaaaaataaaaagtccacggggagaaaacaatcttgtgaatattcttgaagcatttgaagaaatggggttgaatgtggctcaagcaagggcatcatgcctagattcatttgccatggaagccattgttgcacctcaatccaaagacaagctttgtagtgtggatgatttgactcaaactcttgtcaaagctcttgtcaagccaagtgtcccactgtaa

SEQ ID NO: 180433 - DNA, 489 bp, Arabidopsis thaliana landsberg
atgttcctgtgtcacactcacaatcctaaacggatgtttgattttgtctatagacgaaagtcacggaagcataagaacaacttagacagggatgctgctcttactaaagaagtcagtccaggttcttgtagtcaggatcatggtagtggctctaagtcccatgaaggtgcctctaatgggttccatgggactgagttgaatggattagagaagtcggaaggcagtttgacccacatccaagataaaataagtgattcacgtggaaaccaaaactctcaggaagaattgagatccgcttctggagcaacacttcggttgagatccacaagaaatagaaagtctacttatccctttagtgaaactaaacctattgaaacaaagaagcctcagcagttaatagaaaatgtatcctggttgacattatcgatacatgaagagggttctcgttatattccacaaatgggggatgaagttgcgtatttgcgacag

SEQ ID NO: 180434 - DNA, 157 bp, Arabidopsis thaliana landsberg
atggagaacaactccaagaagcacacaatcaacgccaacgactacaccaatagccactaccgaagtgaaagtgccaaaaacacctgggtccaaacagaagagccctgcaacaccaaaacgagacagaatggaagcgcaaccccaacacgagacgatg

SEQ ID NO: 180435 - DNA, 77 bp, Arabidopsis thaliana landsberg
gcgcaaaatacgctctctataggctacaaggcgcctttgacacaatgacacatctgaaggcggcaaagtgggactga

SEQ ID NO: 180436 - DNA, 1284 bp, Arabidopsis thaliana landsberg
aaattctgctaaacgtcgtgaaggagcattactcgcatttgaatgcctctgcgagaagcttggaaaattatttgaaccgtaagagaattttttaatgatgggtatgccaaaagctaatgcaacttggtaataatcttatttctatcttttggtttaggtatgtgataaagatgttacccttacttctggtgtcgttctctgaccaagtcggagcagttcgcgaagcagcagaatgtgctgctcgagctatgatgtctcaattatccgcatatggtgtgaaacttgtccttccttctctactcaaggtgataatttatagaattctaaagattttcaagattaatgataactaaggttttgtgcattgccatgtgccctgctcatgatcatctttttgattcggttaattatgcaatattgctatcttctttctaattttaatatgttttgcgcttgactaggatagattgaaagtttactaatgcttcaataatagtattttgattataactcctttttcccttctacttttaccctatttgagtgctgctccttagaaataaggttcaactactaaacttggtatacctagttgcatttgttcattggtcttacatgacaggtacttttttgttgatttcattctttctgatagggacttgaagataaagcatggagaacaaagcaaagcagtgtacagctcctcggtgctatggcattttgtgctcctcagcaactgtcccaatgtcttcctagggttgtgccaaaacttacagaggtgtgtatgtatgtagaattcagttgcttcttaagtataaacctgggaatgattttccctcccttgattatttgtattatctgatttcattagttaaaactatacaggttttgacggatacacatccaaaagtccagtcagccgggcagttagcacttcagcaggttagactgatagaacagaagaaacttcatattttgtggacattattgactagagttccgtctcaccattatatttaggttggaagtgtcataaagaacccagagatatcctctcttgtccccacccttctattggccttaacagatcccaatgagtacacacgacatgctcttgacacccttcttcaagtaaggcttccgtatttaattgtcttcgattatacttatcttcttttctgttttttttctaaatctttcttctcttattacagacaacattcgttaattctgttgatgccccctcgcttgcactgttggtaccaatagtacatagaggattga

SEQ ID NO: 180437 - DNA, 273 bp, Arabidopsis thaliana landsberg
gttgatccggcagtacctgcatctttgacatggcaaagaaagatagatagtgacgtaaaagctccacgggaattcaatctgagtgttaaagagattttccagctggtacacctatggaaaacaaaacgtttttgatataactgttattaaaattctgtaggatgtttgataggattgtcaaaactatgtttttgagacttgcttttgttccggtaggctcctgttggcattcggttatggtttctttgcagagaagaagctgctaaaggaagg

SEQ ID NO: 180438 - DNA, 227 bp, Arabidopsis thaliana landsberg
attggaaggcggatctcaacaacccttctccctatttaacctctgctcacaaatttcccgctgaatatgaacctcgaggagttatcccttaccagaaatacttcatctttcgaagctgcaatggattgtttggttttgctaagatctctcatgcttggctctctcttgacctcctcagatgcccaatcccaccggaaatcgccaccagtgaagaacggagacgctaa

SEQ ID NO: 180439 - DNA, 125 bp, Arabidopsis thaliana landsberg
gtattagtctgttagctgaagtggtctacggctatctgaaaaacttgtttctctctatgtctaggtcaattgaaaacatcgctcctgtaactgtacaaactttggcacgaccacaaattgaaaag
